United States Patent Application Publication US 2017/0335317 A1 - sequence listing, part 2

SEQ ID NO: 2238 - DNA, 1000 bp, mus musculus
actaacttagatccttatgtacataattttacattaaaattaaattaacaactgaataacagatgactagagattgaaaaataacaaaaagtaatgggaaatcagagcttaatttcagtctaatcagcactcagattaagcattgccttaaaaataaaaccttgaggggagaaggatcttctgatgagaggattgcttcactcaggaactcacagcatttttgctgcctgcagaagactttcaccaaatccagacagacaacatcatagcatggaattcataggctcccaccccaaaccaaggagcaattgacagggatttcatgggttcatggttgaaggagtaaattttctttaaaggtatagctgctccttgagccactgtccattaaatgtcctgccattttgatgaaaaggaacagcctaaattagagataatgggctattaacttaattatttaaaagggcatgtgaccttgaagggtaatctgtaaagactggatctgggatgagttaagaggactagctgaggatcaatttaactaaaacatattgtatagaattttcaaagaattaaaatgtagttggcattaaaaaaccaaatcaactaacagtaccacccagagctcccagagaccaaaccaccaaccgaagagtacacagggagcgatccagggttccagctacatatgcagcagagaatgaccttatctgacattaatgggagaagaagtccttggtcctctgaaggcttgatgccttagcatagagggatgctagagtggtgaggcatgagtgggtgagtgggtggaggagcatcttcacagaggcaatggggagggaggagagggtgaatgggaggagggctgtagagagataactgggaaaaggaatctcatttgaaatgtaaatgtataaaaatattaatgaaaatatccaagaaaaactaattttcaggtagaaaaattttattatgatgttcatagtcatttaaaataatg

SEQ ID NO: 2239 - DNA, 1600 bp, mus musculus
agtgttgcctcactttgggttttctttattgtgtctacttccctttttagttcttggacggttttattcaattccatcacctgttttgttttgttttcctgcaatttaaattaaattaaaaatctttaagggatttttgtgcttcctttttatagtcttcttcctttttagcagtgttctcctgtatttctttaagtgagttattaaagtccttcttgatgtcctctaccatcatcatgagatatgcttttaaatctgggtctagcttttcgtgtgtgttagggtgccctggactgggcaaattgggagtgctgggttctgatgatggtgagtggtcttggtttctgttagtaagattcttacacttacctttctccatctggtaatctctggagtttgttgctatagttgtctctggttacagattgttcctctggtgattatattactatctatcagcagacctgggagactagctctctcctttgagtttcagtggtcagagcactctttgcaggcaagctcctcttacagggaaggtgcacagacatgtggagtttggacctcctcctggccgaagttgaaggcgcaaaacaggaactttcccagaagctgtgttgctttggcctgtcacagaagctgtcagcttctctggtgcacactctcacctgtgcagactacattcggtggagtcccagaaccaagatggcccccgccaattctgaggcaaaagactcccgggccaggtgggcacctgtcctctggccgggaaggtggccggatgtctggagcccgaaaagggcactggctcagaagctctgtggctcccatctgtcccagaagctgtcagcttctgtggtgcacactgtcccctgtttagactactttgggcagattcccggaatcaagatggctccttctgatcctgaggcaaagggctcccaggccaggcagacacctgtcctctggtcgggtggttggccagatgtctggggcctgaaaagggtgctgcctctgaagctctgtggctcccgcctgtcccagaagctgtcagcttctgtggtgcacactctcacctgtgtagactaagttcagaggagtcccggaaccaagatggctcccgcagatcctaaggcaaaaggctcttggactgggtagacacctgtcctctggccgggaaggtgatcggatgtctggagcctgaaaagcgcgtggcctcagaagctctgtggcttcgcctgtcccagaagctgtcagcttctgtggtgcacactctcacctgtgcagactgctttgggtggagtccaggaacccataaatgcatattcactggataaaacagttatggctgtagaactgcatggaatgaaaaattactatgatacattagtttcctagggcagcacaataagataagaaaaattttaagaattcttggactacattatatatgtaataaaaaaaggctatatagccatatcatgatcatgctactgggaaaacaaaaaaacagaaaaacacctattcacagtacaagatggttatcaaatttaaatattcaaaaatctgtaataactagataactaaaaataatctaatt

SEQ ID NO: 2240 - DNA, 1200 bp, mus musculus
tctgatgttgaaaacttatttaagtgggtctcagccatttgcattgtactgtattgtattgtattgtattgtgaataaataaattaattaatagaaaagatttttaaaaaaaacagtaagtactgaaaaagcaaaccttttcccatgttcatgtaatgaaattgtaaaagaacaacctttatttcattttattttttaattattcactttacatcctgctcattgccctcctcccagtcattgcctcccacaatacttcccccattccccctcaccttctcctctgagttgatggggaccctcctgggtatcctaccactctgatacttcaagtctctgtgaggctaggcacttcctctcccactgaggccaaaaaagtcagatcatctagaagaacatatcccacatataagcaatcttttaaatgaatcactataataagtcatgccttaggtaacaagaaaggcaatggaatttcagcctttaaaaagtcctttggctgaatgattttattaattgctctcagatctgtcaacatctttcatttgccagattttttgaagctgtagtttcatttcattgaaaaaaaaaaaaaaaaaaaggcagctttgccaattctttctttttttttttttaatttttactagatagtttcttcatttacatttcaaatgatatccccttttctagcttcctctccaaaagtcccctatatactccccctgccctgctccccaacccacccactcctgcttcctggccctggcatccctctgtactggggcaaataatcttcacaagaccaagagcctctcctccattgatggccatcctctgctacataagcaacaagagacacaagctcagggtggtactggttagttcatgttgttgttcttcctataggattgcagaccactttagctccttgggtattttctttagctccttcatagggggccatgtgatccaaccaatagatgattgtgagcatccacttctgtatttgccaggcactgacatagcctcacaagagatagctatatcagggtcctgtcagcaaaatcttgctggcatatgaatagtgtctgggtttggtggttgtatatgggatggatccctgggtggggcagtctctggatggtccttccttccatcttagctctgaactttgtctctgtaactccttccatgggtatt

SEQ ID NO: 2241 - DNA, 1000 bp, mus musculus
atctccccctttttgttttaataaaatgaggctggactaggcctgtgcaattatgtccatccgccgtggctcttgttttaggtcattcctctaatgtcacaaccttacccgtcatagggtaaccctatcgccaccgggccccgtgtcttaggttggactgtgcacgaggaaagttgcccgtctctggatgtggagagccacaataacatcataagatggcgctggctccgcagtgccttatgccacctaaacaaagaatagctatgtgcgcatgtgctaagagcaaaagcccgccaaaaagtcaccagcccatttccggggcaccagtccatctcccagggcactagcccaacccctgggggctatagcctatccccagggtgcatgagaatcgtgggttaagctaccagtccaagtttaacacgtcacaccttagggtatttaagccacacacgtttctgagccttctttctctacctcattatgttgtgaaataaagtaaccacagaaggatctgtgtcctgtgtgcgttcctgctgggcggggacaaaagctcaggacatctggatacctcagtgctgtgtgacagtaactgctaaatgacctagggcgaactctgcaaaagaggccagccaaaaaatgaattagtggggaaatcatgatcaccgtatcgcttgcaatgaggaaatctcagtgatgtgcaagggctgatcaatgatcgttgagtctctctcatctcagtgccgtggagtgcaagagcagagaactcagatgccgactaattcttgagcatagataaccaaatttcaggggaggagcctttttcaatagctaaaagtgcctgagttataatcaccttgtcacgtttttgttgggttctgaatttgcataccaaccagagcatgaacaccagtccacagcatatggcagcaccaaacaaaatcactcccacccattccttaaagtaagaaaaagcagaggtaagccaagaggtaaagtc

SEQ ID NO: 2242 - DNA, 1000 bp, mus musculus
caataagagaatattgggattgttttgcttgtaaggttgcaaaaattgctataattaagaatgcggaaattgagtgtgatatctatggccattgagttatttttgtggccaagccatttgcagaagcacactgaggctttcatgaaaactctctgtccaaggagggaaagataaagggtcacagacaggaactccatcaaaggatatgttccaataagctccaagagggagcttagacaaaaaggggaacaaggatgctgtgaggggacaagtgtcatgaggaggaactctatcgagggaggattcgagtatcataaaggtccagagtgtcataaggaagctgatagccttagcagacaactcctagggggaggtgaagacattctaggagagaattgaaaacatgtggggattaagaaagagtgtagggttgaggggtggggaggcagacacttgtcagtgacaaatgtcccaagtcacagacgataagcatcatgatggaggtaccatggaatgaatggagacacctggcattccactctggattttaaagtaaaagaatccaaagcagggagggagggagggagagagagggggagagagagagagagagagagagagagagagagagagagagagagaccctatcatggtccaggagcaagagatccagaaagcccagattctcattggagtaacatcacagatggaagaaagaagcagattctagaatttgaagtcaaatatagtgggtgtcagaaacaaatattccatatatatcttagtggaatcaaatcacagcttggttcagtctggagaggctgagtctttaggaagagagctcatatatgcttctcccaggtttcaggcaccagatccataaagggaaaattttctgaaccaggtgtatatacagaaaacatgagacagcttcaaggtctagttgaggggaaggatttattatagatataaaggtgattacagccagagttaatgaaag

SEQ ID NO: 2243 - DNA, 1600 bp, mus musculus
tactttacagctgtttcatctaaaagtaagatctcccccttttacctaaccatgaaatcctgtctttcttttctccacatctaagagactacaagggcaagcttgaagaatgttccagaaattgaaatgttgtatttctagcaagtgttgcatctggtataaataaataaatatctctctatatatacgatatatatatacacacatgtgcatatatatacacatatatgtttgtatatatatatatatatatatatatatatatatatatatatatatatatatatatatgtgtgtgtgtgtatatataaagttatttcatgtttataattaaaaaatatccataagaaaatataagtatactctctgtgactatgactaacacaaaacttccaagaagtacaatcttgctttatttgaagaactctggagatttgagaaaaacagaaggtcaaggtgaacaagcagtgtgcagagattaatgcaatctagacgggattataactcaatgtcctcaaacattttatgacaggtctgaaagacagtttcatataaatgtaattttaaaaattagatgcactaagtatgattattttctttctttcttttttttctctttgtctcttttgctaacagtatgaaagaagtaggaggaagccataagcaatggagaggtctcccgtcatctacctgcaagccatgccctatcgcctatgccagcccagtctgtggttctgatgggcattcctactcttcacaggtgaggagagctctgttgatccaggttgtggtttgaatatgatgggaccaccgaggctcatgtgatccttatctgttgttactgctctggaaggttccagagtcttaggagatagagccagctgaagcaattgggtatgtgattggagattttatagcctggccccaattcctatctaccctttctccctgagatgagactgaaggtaacctattatcccctccacagtgccccacccaccccatgctttactgacctacttttctcttcatgaattcctgccaaagcaaatctagcttgcagttatatcagatgtttgagcacaaccacacaaaagtaactgatatagtaagtaactgagttaatcagtcatctgtctatgtggtgattttgtaattactttgcttacttttaagtaatattaataaactcactggtaaggagggcagtctgaatggcatttatttctcctatataaaatttataggaacatgaaatactagtgttgtgattattctgagcctttatatctaaatgccaatgtttcctacattcctttctgttgataaattcagaaaaagcataactagcaattattgttataacagcaattacaaaccccacattcataagaagtctcattccctatctcccttgttatcttatttaagttgccaggaatattttggaagtacagggttcagtaagtaacagtgataaggccaattttacacttttgattatcattaaagccagatttggtagcatttttagatccatgttcctggttttcttctacattattctgacttcctagtaactatgctaaaagtttaaatg

SEQ ID NO: 2244 - DNA, 1000 bp, mus musculus
aaatataataagataaagctaacatattggaattagacaaaataaacaaaagaatgagcccaagagaaggcataggaatcaaggacgcattcttttgcaagccctggagtcacgtaaatcactagcctggaagccataacttaaatatagaaagctctcgatgccgacctgtgtgggccatgtgcgtgctgtttcagtctctgtggttttgtatgcacgtgaatcatgttaactcagagggccttgctttgatggaattctctctcacccgggctcttacactctttatgcctttctccagcaggattcccagatccctaaagagagggatttagtagagaaatcccatttagagttgactgttccaaggtctcttactctctgcattgtggttctctgtgaatctctggttgtggttctctgcctgtgtttcaaatgatgcagaaggaagtttcgctgatgatgtctgaagaaggaattgatacatgagtaaagtagaatttcattaggagttattttttgtcgttgttgatttattttattattatttttgcaatagtatttggttttacttcaagtccccagactatatattctctggtcctggttacctaagcaaggagaggcatcaattttatctcatggagtgagctttaagtcaaagtagctattgggtggttattcccataacctttgtgtcactcttacctttatataccttgcaggctgtatatcaatgtagaccaaagaatatatggctgtggtggtatttatgtttcttgtttggtaacatgcacattatttccacgtaccaaattattgggaatagaggactgaaggctctatgtaggtaccagcttgactttttcatgttctattatttgtaggtgttttcttcagtaatggagccttactgtcagattggagcaacagcttgggttatcatgggactcttttgtgcatcaactcaattagatgtaactcactctggattctagac

SEQ ID NO: 2245 - DNA, 1200 bp, mus musculus
ctcttaataaaaggaataaaatggtttaaataagaatgagactattaagggcttatagagcatatatatagttatttctcaatacaagcataataatgaaaccaagtgtctacttaaatgtgtaattcaagaataagtgaagtttgatttaaatatttacaaagaatgaaaggaagaaactaagtaaaaagaatatagactactcaatactaagagataccttcagagaataggtgtccgcccggccgaggagggctttgcctgagcatctgcgggagacatcttgaatcccggactccactgagaatagtctgcacaggtgagagtgtggactacaaaagctaacagcttctgggacaggagggagccacagagcttctgaggcagcagccttttcaggatccagacatccaggcaccttccctgccagagaagaggtgtctgctcagtctgggagggctttgcctgagcatctatgggagacatcttagttccctgacaccactgagactagtctgcacaggtgagagtgtggactacagaagttaacatattctgggacaagctgaagcaacacagctcctgggacaggtcctgttttgggccttcatcttctgccaaaaggcaagtctgaaagccaggtacctgtgcaccttccctgaaagaggagagcctgcctgaagagagtgctctgaccactgaaactcaggagagagctagtctcccaggtctgctggtagagtaaaacagaatcacaagaggaacaagctctaaccagagacaacaataacaactgactccagagcgtaccagatggtgaaaggcaggcttaagaatcttcctaacagaaaccaagaccactcaccataatcagaacccagtaatcccacctcagcaagtccagggcaccccaacacacccgaaaacctagacccagatttaaaggcatatctcatgatgatggtagaagacatcaagaaggtctttaataactcacttaaagaaaaacaggaaaacacaaccaaacaggtagaagtccctacagaaaaacaggaaaacacatccaaacaggtgatggaaatgaacaaaaccaaactagacctaaaaagggaagtagacacaatagagaaaactcaaagtgaggcaaggctggatatagaaaccctaggaaagaaatctggaaacatagatgcaagcatc

SEQ ID NO: 2246 - DNA, 1000 bp, mus musculus
agttggatctcatggaggcatttcctcaactgaagctcctttctctgtgataaccccagctgtgtcaagttgacacaaaactagccagtacacacactaaataataattgttttttattaattatgtttgcgccaccaaagcttggcaagctataaagcctccccaccagcaccactgtgcgctgctctcagttcctgtgacaccttctgccctgatgccccaccagcaccactgtgcgctgctctcagttcctgtgacaccttctgccctgatgccccaccagcaccactgtgcactgttctcagctcctgggatggcttctaccacttctcccagccttgttccttccctttaaatgcgggagagaaaggaacaaaggtggcaagaagaaagtgagtatgtgttactgcaggtctgccatcacagggtgggtgtcccttgcactcacgtgaagtgcatgggatcagcaggcgccatcctttccattccgagccccagaatctctgctttgagagaatgattcccaccacagagagctgatgtggttgctttcagccaacccagaaatccaaactatttccattttaacgaacgacgtatacattctgagaggtgtgattccaaggtacatggaggtcagtgccccgacctgtgcaccactgcagaggagggtggctgagttctcaaggaaaagtcctgcaaggaaagatattccctgcggccagagctgttgcactaaaaagaaagccaaggactaagtggaaagcagctgcaggtcttcccgggcgtggcccagtgccaacctgtcagaaagcatgttcgctcatttaagaccgaggaaacatgtgaatttgaagtgtggttttggtctgcaacttaagtagacaaacagatatcgtttctaaacagaggattcctgtggttcagatttgtatccgacaagatggggcagagaacagagggcaagtggctgagagactggacgaagccacagatggg

SEQ ID NO: 2247 - DNA, 1200 bp, mus musculus
actagaggtcttaggatctcctgtggaatcctgtgtgggcccttgcgggtgtcaggcgactcagctggcaaggtagcccggggctcgagtggagcggaaggagtttgtgcaccagatatagcccgggtagcctgcttccctatgtacagcagtctcaggttccgtgcgattggattggggcaggcgctgtgttccactcaccagaggtcttaggatcccgtggggagtcccgtgtgggcccttgggggtgttgggcaagactctcctggcaaggtagcccggggctcgagtcgagcggaaaggaaaggagtgttttggaaagaaaaccttttataataatttccacagctgcctcaggcctttctcaccccaaaggctctgattttactgtttcctgtaaacttgtctgttctgaacatttcatatgcatgccatcatacaaacagccgtttgtgtcaagtagtataacaatatgactgtctcttgctggcatgcggtcaaagttcattgatattatagctttgattcctttcctctttgtagttgagtaatattttatcctgtgggaatactacaatgttttcttccactgtgtttattcatatagttgcttggcataactgtaggaatagttatgtaagaaaaggtgtctgaaggaagatagtgcatcatgttccactggttctttggaggctggtgtgtaacttttacgttatgggatttccttagaagttctaattataattggttgacttagaagggaacactagggtgctggtgcttcctcttttgcttttttatttctggccaaacacaagcagtttcttgtgcccaaaacacctgctgtgatatacagtgttaccgtacactatagcccaaggacaatgggatgaagtgcctatggagtgagccaatacaaaaccttccatctttataaattgacttaatcttgggtatgagttacagcaatgaaaagctaagttgtacaaacgctaacaagtttttgcatttagagacagattaaaaaaaaagagtttataaaggaaacagagaaaaaaaatatcccaaatgatgagacaaaccacagagggttttcttcttgttataaaaactaaaaatgaagaatgtttccttcagcaaagtggctcgatacaaaaattgacaagaaaaaatcagtagccctctgttttataaatgata

SEQ ID NO: 2248 - DNA, 1000 bp, mus musculus
tgatgtcctctatcccctctgactcctacaatttaccctccccctcttcctcaatgttccttggtttctagggtgagggaactaatggagacctccaatttagacactccaaataatgtctggctatgggtctctgcactcattcccattgcagccagaggagtcatctgatgatgactggacaaggcaccatactatgagtgaagcagaataacattagaaatcaatcctttatccagtctccagttcctggccatctgagcagtgaagtaattgggttccctttcgttgggtagccctcaagttaaaccaatcactggttggccactctcacaagctgtgtgccactattgctccagcacatcttacaggcagagcaggttttgggtcaatgcttttgggtctgagtcagtttctcttttcatagtctgcagagtaccttttggcaacaaagagattgtaaagggtagaggtgaaagctccatgcaggccctagctaggcctctctgtgatcatgagctgtgtggacattttcctcagcaatctgtctctattgtcagtttttaggcagcaaccctctgtcatagcaatggcctcgcttgtgtcagaatctccacgggaacacctcagccatcaactcaactgaacacaacccaatcccatcgttaaaatccttgcctggctataacaaatggccaggtcagatctcatagccttaattactagtaacccttactagggtcactctcagatttcaggtcgtttccactgcactaagttttcacactgcccccaagtgctcctcaattctagctgtctctcccctcactttctctttccatgcccctccaacttgatttttcttggtcctgggttccacccaatgtgttataaatggtttagaacatcgctagtatgtatagggacagcaacattgaagttctcatcagtgctgctcacagaatactgagggagtcacttctgctggtaactggatttc

SEQ ID NO: 2249 - DNA, 1000 bp, mus musculus; identical to SEQ ID NO: 2248

SEQ ID NO: 2250 - DNA, 1000 bp, mus musculus
gaaacaaaatactcactcaccggagagagagggtaggagggactttataggaagaggggaaaagatgggcaggatcaggtatgggaggagatggggttgatatacagatggtcaacaatttgaacagaggtgtgtagcaatgggggactggaactgggaatagccaccagcaagtcccagatgccaaaaaagcaagaggctcccaggacccaacagggatgtgcttcatgaaatacccaacaaaaggaagggagaacctgtagagaccatatccagaggttaggcaaggcccctggttggggcatcaggccaaccactcatctccaaatttttaacccagaatggctcctgtctaaaggaaataatagagacaaatggtagaacagagactgaaggaaaggccatccagagactgcccatcctggggatccatcccatatacagtcaccaaacccagaagctgttgtggatgccaagaagtgcttgctgacaggagcttgttatagctgtctcctgagaggctcttccagagcctgacaaatacagaggtggatgctcacagctaaccattggactgagcacagggaccccaatgaaagagttagcgatgggactgaaggagctgaagaggtttgcaatctcataggaagaacaataatatcaaccaaccagaaccccccagagctcccagggactacaaaaccatcaaccaatgagtacacatggagggacatatcaatccagccacatgtagcaggggatggcatcagtaggaggagaggcctttggtctcctgtgaaggctcattgcctcagtgtaggggaatgccaggatggtgaggtgagagggtttgggtgggttgcagagcaccctcagaaaagccggggaaagaaattagggtaggtggattccggagggggaactcggaagggggataacattttatatgcaagcacataaaatatccaataaaagaaaagagaaataaaagagaacattt

SEQ ID NO: 2251 - DNA, 1000 bp, mus musculus; identical to SEQ ID NO: 2250

SEQ ID NO: 2252 - DNA, 1200 bp, mus musculus
cttcctcccagccccatgttccaagaaacaagactcagactcagaatatatttacaaataccttgacaatatagctaggctcttctctgactagaatcatagtttgagataacccacttattttaacctacattctgacacgtagctagatatcagaaagagctgctctcagtcaactactcattttgcctttatcctcaaattgttcttctctttggtcttttgaagatgaaaatagattatagccattaagcgactatgcacaggacacagtggaagaactatgcatagtaatcctcctttagtggtatacgaatgtatttcaatacccacagtgtatgcttgaaaccatagatagtatcacactcgatacataccccattatatctccataggcattcctatggaaaagttttgtcttgattagcaacagtaacggagtaacaatgactctgaatacaatggaatgactatattaattaagccatggaccacaagagaacacaataatacaccaacaatagcctgctactgtgtgactgtgggtgactgtgtgtgactgtgtgtgactgtgtgtgactgtgtgtgactgtgtgtgactgtgtgtgactgtgggtgactgtgggtgactgtgggtgactgtgtgtgactgtgtgtgactgtgtgtgactgtgtgtgattgtgggtgactgtgggtggctgtgggtgactgtgtgtgactgtgggtgactgtgggtgactgtgggtgactgccatatatagtacagacattctggggatgattcacatcctggatgcaacatagtgagattgcttcaccattgatcatgtttcttagaattatgcacggcataaatcttatgaatgttttagttctaggtttttatatttagcagtcctgcaccatgattagcaacagacacctgaagtcatagaatcataaataaggaatgggctattgaaggtaagtcctggctcttcctcccagccccatgctcccagaaacaggacttggactcaaaatagatatacaaataccttgaccatatagctaggatcttctctgactagaatcataacttgagataacccatttattataacctacattctgccacatagatggttacctgtgttcaggtaccacaagtctcgggctctatcttgcagaagctatttccatactaagaaatcaatata

SEQ ID NO: 2253 - DNA, 1200 bp, mus musculus; identical to SEQ ID NO: 2252

SEQ ID NO: 2254 - DNA, 1000 bp, mus musculus
tgtgtctgaaggcagtcagcaggaacagtctcctgcagaaaatctttgtgttcagaatccattccttttctgctaaattgtatgctgagccaactcaagtgattctggacagctgttgtgtaacccagaagcatttgcaaagggccctgactcacaacaatgaggctggatgtgctgggagccattttctagttggcattgagtagatatcctgagaagatataaggtcttgacaggctagttgtgaaataaaaaaaggaagggggggcagagagagagagaagacagaagaggactggaatttatatacgattacttcaataagaagttgtagctgaaaattactttttttataagtagttttgcagttaagttttgaatttgggtctttgtcatgtgacaaatgacttgaaagactgaagaccatgcattgggctgtactcctatataagatggcaccggctgccatcattgactaaaacaacacagtaagatgtccttgaatgcccagttaagatcacatagtccagttttatcaagcagcaagcatttacttggagtcttctgtgtgccatttgctgcccataagatttcaggaatgaatgagacacaaagtctctcacttcagtgaatttgcattctgttatgatgggaatttcaggaagaagttaagtgagttggttggcctccacattctgtgatttggtcagttgtggttttctatagtggtcaccatctgttgcaaagaaaagcttctttgctgagaggtgaagactacatttatctttgggtataaggacaaatgccatgatctatacccatgctttctcaggtacacgactgcctaaacataagctgaacaagaatggtaagaataacatgccaaaatggacaagtaaaatcccaaaatttgtcaaccctccacaaagaactattggcaactaaggaacggtgataacaggagaagtagtcttccttggggagaagcctatcaattggt

SEQ ID NO: 2255 - DNA, 1000 bp, mus musculus; identical to SEQ ID NO: 2254

SEQ ID NO: 2256 - DNA, 1000 bp, mus musculus; identical to SEQ ID NO: 2254

SEQ ID NO: 2257 - DNA, 1000 bp, mus musculus
cagttctctctggggagaatttcggtttgcaaagctgtgccacaggatcagctctgggtgcagatggaaaccagaaggatcctatccctggctgcagcttggttcatgtgtcctgggggttctgggtggtttcctctgagcagaagttgtggtcttatctgcactttcaggtgtgaccgcactcctggaagaccaggtttccccaagcagtatttgagtatatagcactgtggcacaggatcagctccaggaactatggcacaggatcagctctggacatagatctattttcacatttttagtactgcccttaacaggaaatttttaattttgataaagcccattttctttttatattacttgtggttctttgtgcatttataaaatatagtctcatgtagcccaaatgtatgaaattgtatacttttggcaatttcatgtggctattagaaaatacaccaagtatttctttcttccaacccacatttctctcttaatgtagaattatatagaggaatagcattttcctaagctagataactttgtacatttttggactgataatatccattttttttgaagagaaaagaaataaagggaaaagaatgtatcctcacaaaaaccttgaactcctgggggaaaatatattgatgcataaacctaaacaatgtacagttttgtgcaatttcgggccaataaaaaagaactgacaggggacatcttaaaacaggatctttaaactgttttcaaaacaggatcatgactcctttggagaagaacattgctgtattctccaaagaacaatcttagccttcctccttcctccctctccactcagcacttttgttgctttgctttcccactctgccctagaatatgaatttactggaattactcttactataattcaaacttgtaactgaaaaatattcacttcaattaccagtatcttttgatccaggttttctgtgccactagtgttgccagtgtccacaagatg

SEQ ID NO: 2258 - DNA, 1000 bp, mus musculus
taacccaggcgcttgttgctttggagcatggtgcctcccccgatatatggttatcgatgctcaagcaataaggtcgctggccatccagctccacaaacccctgaggcgagtcttgctgcatggggcggagcgggtgtgctttagcagcccaggagagttgcgaggctaagcactgcactggaatggctttgcagtctaatttgagcttcttcctgggagatatgtcatctttcaagaaggttgagtgtcctaatgtccttcccccaggaaaaacgacatgggagtggaccaagacccctccgggtgacgggcctgggaggaggttttgtgtaaggcccctatgcttgcacactggggatttgacctctatctccactctcagtactgggtggcctgttgcttctaaaataaaagaaaatggggagatgtgaggagccaccctcagggtcgccattacaagatggcactgacatcgttgctcgtggtgaaaaacaagtagtgtgcgcaggcgtcagggtatctttccattacctgagccccgcctctcccgtggcatcatctgggctgatggtgagcagccaatccgggcggtgcacatctccaaccgtacttcgcagcctatataagggaagggttttctgctctctgggtctcctctcctgaagctgatcatctatctctcgagatgcatgaaagctttactgcagaaggatccgagtgtcctgcgtgcgttcttgctggcgagacggtagtgtgggtcacgtgagcaggctgttgatactgttgattcaggcttttgcagccctagagctgggacaatcttctcaagtgtggcttggcatgctagagaagtagtcaatggcaggtaagactccctggaggtattaccaacctaagacagggatcagaccactgctgtctgtcctcccgatgacaggtaaggagcattatcacagggggcaacctaagacaggcattctctctgccaaaataataaata

SEQ ID NO: 2259 - DNA, 1200 bp, mus musculus
tcagagaggacacgaggctggctgaggccacatgggagacaggaaaaatgcaggacaccctctgactatcaccatggcatggaatggaggtcaggggacctatatgcccagaactaccgaccgccagcacccccaccaggccaagatggtctagacccaagagctccatccatagagatactgagaaaagtattattttctcctacaccagccgcctgtttctgaaaagaagtcgtgtgaagccttgttccctgtacgcttcctgaagattgagcccagcgcagccagctgtgctcaggccccaccagctcaggccattggccctcagggaagcagggatgaaggaacaatagagatactattatgcaccattgttctctgaggtctcagttttgtaccatccaatcaccaggcttggtggtccaggcctatcactctaccaatttgtgaggttaagacgggaggacctgagtccaaggttaaggtcaacttgggcaacagtgaaaatgtaaaggaggggctgctgcagctcaggggagagcactggcccagaacccatcagtgagggctgctgccgctcagggaggaaagcctctgcctagatcactcagtgggccatcactggcctaacatacttgaagctcaaagcttaatccccactatggaaaaaacatggaatcaaacaggacaggagtgtggttcagtggcagagcttgtgtgtgcctggtacatgggaggtctggggcgctatcttagaaccaacaaagaaaggtacaaatacatgagataatgtgacaaaccaatacacggtacaatgtgatgatgagcaggtgcaggacagatctacagcagtaagggcagcgatagcactggctgtgaagcagcacgttcctgactctgccctcaatatgggccttagcctgagcccaggagaaacagagggcccagcccactgtgggtagctatccctgggtgttacaagaaagcaggttgagccgagcatagtggcacacaccctgaatcctagcccttaggaggtagagaaaggtagatctctgtgaatttgaggtcagtctggtctacataatgaattctaggatagccagagctacatagtatcactctgttttgagaaaaaaggaaggaaggaaggaaggaaggaaggaaggaaggaaggaaggaaggaaggaaggaaggaag

SEQ ID NO: 2260 - DNA, 1200 bp, mus musculus
gggagggcgctggcactcagcttttgtctcctgctgcctgcaggtgttcgctcctgggaggatgtggaccccgctgtctgcagcctggatgagcagctcaaggccttcgtgtcccggcattcagccaccttctccagcattgtgaaaggtgacctgccccactctgcctcccttagttctcctgctcctctctgggtgctgagctgctgagtggcagctgtatgccgggcgtggggtgaggcagtgctaaggcctgcacagaggtacctctggcctgtggatgctgccttggttttggacagtagaagaaagtcatatgctctgtccctaacttacagaagggtgtagtgactttagggaggggccctcagggctgagaaccaatagggaagcagagatggggtgcagggcgatttccttgggatcctggggtggccagagcagccctttcatgggtattgcttgtagctcgtccctgcccagtgggttgagtcaccacctacagctgcaggaggggaaggaagtgtccctttgggtcgtagtggcttcctgacccctgatccattggagaaaaagctggaagtgacctactgtgtgaccacagccctctggacgccccttctgggtagtcacatttctctggcctggtcttgcaggggagggctgaagctgctgtctgccatgtagagcctcctgtgtgtcctcctggcttaggtgctgagctgtgctggtgctgatacgcagtctagcacccctggctgatcatctgtgttgtccctgcttgaggcccagggcacccatgggcttcttccattttctttcctgtttgctctcagctggggcaccctgctgtgggttctgcagcttcagtacctgagggtcccctggtggtaggatttgggattaggcagcctgagccggggcctgggcttgtcatcccacagggcagcggagcctgcaccaccgtggagagaccttggagacgctggtcctgctgaacccctcagacaagtccctgtgtgatgaggtaggagcagggccctgtgctgtcctcactcctgacccagcatatgtgcttgacacttctgcacctacttcctcttgtagacttggggcaggaaggctggtcatggaatgcactgatgagctggaggcaggtgggaggaacccatggaacccaatgtcctggcttagcctcta

SEQ ID NO: 2261 - DNA, 1400 bp, mus musculus
tgtgataaaaacaccatgacaaaaaaaaaaaaaaaacaagttggggaggaaagggtttattgagcttacatttccagatcatagtccttcagtggaggaagccaggacaggaacctggaggcaggagctaaggccatggaagggtgctgctcacaggcttgctccctgtggcttgtttagcctaattttttttcattaatttatttattttacatcttgaccacagtttccccctccctcctctccccccagttcctccccacctccttctcttccctactcctacccactcttcctctgtttctcttcagaaaagggcacaccttccgtgcatatcaaccagccatggcatatcaacttgtagtaggactaggcacatcctcttctattaaggctgaacaaggcaacctagtagatggaaagggccccaaagacaggtagcagagtcagagacagcccctgctcctgctgttcacaaaaaactaagcacgtccataacatatgtgcacagaacctaagtcagtcccatggaggctccctgttggtagttcattctctatgagtccatatgggctcagattgatggattctgtgggttttcttctggtgtcttttacccctctgtctcctacaatccttcctcctctgttccacaggattccccaagctctgcctaatgtttgactgtgggtctctgcatttgtttctatcagttgctgggtgaaacctctctgatggcaattgggttggacactaatctaagtatagcagaatatcattaggctttaagttattgacttttttgttgttgatgttttgccagtcttgtttggttctatcctaggtccctgggttatccagcctttagcttctggacatccaggcaataccaggggggtgggatcccggttgtggcatgggtcttgagctggaccagtcattggttagcccctccctcaacctctgttccacctttactcccgaacatcctataagcagtataaattgtaggtcaaaatagtggctgggttgaagtcccagtccttccacttaaaatcttgaccagttcaggttccatgtccctcactgttgggagttttagctagggtcaccctcatagattcttggcagttcccattgctctaagtttctagctcatcccagagatgttccctgattcagttgtctctccagtactctctcactgtcctcctcccacctgatccctcctgttcccatcccccatcaatcagtaatgcctatctattccctttctcagtgagattcacacatgcccctttagccctacttgttgcttagtttctttgagtctgtggactataacttggttatcctttactaatgtccacttagaagtgagtacataccgtgtttgtctt

SEQ ID NO: 2262 - DNA, 1400 bp, mus musculus
cacatgggtgagagtccttggtcaggtccatgactggagcacaggatgtccttctggtagcagattagatgcggctcattaggaaaaagcctatcccatcattcaagtacggtgggccttgatgagcagagacagtctatggttttagagctttattgtagaaaggcagggagaaaggagagaaggtagaaagagagaggctggccatggccatgtggagagagggaagaagggagagagaaaaggagggccagagaataagaaaggtgagagcttaagagagtgaagtggggtctagcagcctctcttatagtgggctgggctatcaggctgttgccaggtaactatggggttatatatggggttatagcatacctggctatagtcaggtaactgtgggggtggagtctagccagaatgccagaagcttgggacattgtgtgacacaatgtgatgtcacagaattatggacaggcacctgattttgggaacgtggctcacctttccatcccttgtagatttctttattgggtcaccagagcaagccccattcaaccaaaataggctgcctatcacagtcccacacacatgtgtgttcttcctagtctcacttctctggcccccgccaaccttcctacacagcctgtactggggggtcaacatgcatacatacaatatgtaacagtaaaataaatcctgaaaaagcgagagcagagaggagtacacagtgagatctgagtcatcccgcagagacaaggtggggcctgggagagagacaggacctgaaaagaaagggctgctcaacacaaaaggctatactgcagagtccaggagtccaagggaaccaccaggaaaggatagtccccttccatacatgccaggaccccaggaaccctgaagctgcagaaaccaacagtccttgttccccttcctccacatagcacagagcctgctggagctagagaaatcagagagattgagggactagaggactaacctttctactcaggcagctgtgccagcaattctttccgtaaatgaatgctgctctcatccttgagcaaggagaccttatttttcagtaagcagcagttcgtgcacagactcatagctggtcaaagatctgaggttaaattgtgccaggagccaccaaggagaagctaaaaattagcaggtgatcttcatgagatggttccaacatggactgccaaaattaatgacagatttgcttctctagacaaggccaagaagagcttcattttaggaatgattcatgctatcaatatgcttttcctgctattattaagtatatataacaatcactaagtattagcccacccttttgagcagatctctgcagaacaatgaagatgtacttattgccttgtagtgatacttta

SEQ ID NO: 2263 - DNA, 1200 bp, mus musculus
tattgctgatgctggcatctatggttccagatttctttcctagggtttctatctccagcgttgcctcactttgggttttctttattttgtctacttccctttttaggtctattatggttttgttcatttccatcacttgtttgaatgtgttttcttgtttttcttaaggacttataactctttagcaatgttctcctgtatttctttacgtgagttagttattaaagtccttcctgatgtcctctaccatcatcatgagatatgcttttaaatctgggtctagactttcgggtgtgttagggtgccctggactgggcgaggtgggagtgctgggttctgatgatggtgagtggtcttgttttctgttagtaagattcttacatttgcctttcaccatctggtaatctctggaggtagttgttatagttgcctctggttagagcttgtgattctgttagcctctattagcagacctgggagactagatctctcctgaatttcagtggttagagcactctctgcaggcaagctctcctcttgcagggaagatttacagatatctagtgtttggacctgcctcctggcagatgatgaaggcccgaaacagggtgtgtcccagaatctgggtagctcgtgtagtctacactctcacctggacagactagtctaggtggaatctggaaaccaagatagcttccccagatgctgtagcaaagttcttccgggcagggcagacacctgtcctctgggagggaaagtgcctggttgtttggagcctgaaacagggtctgcctcagaagctgtatggcttctgcctgtcccagaagctgttagcttctgtagtccacattctcacctgtacagactagtcttgtcgggatctgggaaccaagatggctcccccagatgatatggcaaattcctcccaggcagggtggacacctctcctctggtagggaaggtgcccgaatgtctggagcccgaaacatggtctcttattgagtatttttcatgaatattcatgaaggaaattggtctgaagttctcttcttcgttgggtctttatgtggtttaggtatcagagtaattggggcttcatagaatgaattgggtagagtacctttggtttctattttgtggaacagtttgagaagaattggaattaggtcttctttgaaggtctgatagaactctgcacta

SEQ ID NO: 2264 - DNA, 1200 bp, mus musculus
gtaatatgatagtaatgcttctaatattaattctaaagatgataaattgttttaaaattgggttttgctttcccaaagttatagttataatctaatgctgcaaaagaaacttagtaactctaaaatctgtcctcatggcaagaggaactaagcttggagcagcctcagcgaagtttgtgtgactttcttttgtcttacaaacggtgcctaaaaaaggctctccttgcacctttgcagatctagccagatgctgttttaataaagttcaaattcaaagtttataaagagtcaatcagactgtagaatttataaaggcattacaatctggcttgcctactttttatatagttattatagatccaaaagtttggttttttttttcctttacatcttaatgattgtaaagtttttgcttctagtgagtttgtaaatactgaaaaattttgcctcttggtatggctaaatataggtctacattatgtgagaaatttttatcatttctgcttctatacaagaagccaagagtttaaatctttcagtatatattgtttcctaagtgaaaaatattatgttagctaatgcctctcaagggaaattttcttaaaaccttagctgtcattaaactaaccctaggcagagccgctttatccttactgtaaacatttatctggttcctgttaattcttttgaagtcattcctttgtttcatgtcaggtaacttctaaatattttgcctgctgtgacttcctatcctcttttattatctgtattctttggctccgggccagcgaatgctggcggctacagggcgggggccccttggtcgagcagctttccctgaacgtggtgacacaaaaagctgccaaaaagcgggtagctttgtaacaaactcagggcgtagggccttgcccgccatggcccatgagcctctgcctgtctcctctggggtagccggattccccccacccccaggcccggggtgctccgccaccctggctttgatagcagggcctgcgccgctgccagtgctagggctgcgaagctgctgcttgacatcacggctgagcactgtctgtggcggtggtgggcacgtcaggtgcgcaccgctgatgtggggctcaaaagcgggttaaaatccagagtccttttcagagtgactccacatgccagggtgacaggcagccagggctgaagaggatt

SEQ ID NO: 2265 - DNA, 1200 bp, mus musculus
tagctcttcagaatgtgaaatataattactactgtggaagatggaccatatgagcattgtaccaattcttcaataagaagaggcaaaacacataagtatttacaataggaacaaactgaaaggtcttcagctgtgctcatcagaatacagggagaaatgcatctctcaagttatgttaccatttacataatctaaaacaaaaaacttacaaagagaaaatcaaacacacagagaggttacatctaagtaaatttcaaaaaaacttgtattggaagagagggagaaattccatgacttggaggcagaaggattagatttaagagctagaagagaaaaatcatccaccaatgtaggtgcaaaggagaagtggtcccatgggggtgcttcatagaagataacagggtagcaaagaaaaaatatagatttaggaagtgttaagacaggaatattgtaatgggagtgctaactggggaagtgtagaagtgcccaaccattgagctagtcaaggcatatcaaaattaactggtgtgtgtgtgtgtgtgtgtgtgtgtgtgtgtgtgtgtgtgtgtctgtgtgtctgtgtgtctgtgtgtgtctgtgtgtgtctgtgtgtgtctgtgtgtctgattttctgtctctctgtctgtctttcatttatgaatccagagctcttgggtgggtgcagcatgctcatgacccacaaggagttaaagcagactaactattcgccactacatcatacttcaagccagagtcagatatggactccctctcatggcttgggccttaagttagaccagtgattgtttggctgtccccacaagctctgagttaccattgccaaaggacatctttcattcagtacaggtaatgggttataggatttgtggctgggttagtgtcccagtaccaccatggggagcctagcctggttacagaagatgacaggttcagactccatatcctccattacaaggggttattctcgtacattgtcactcattacagtcatcattcccaataccctctttctccttcactccctccctgacttgatccttcctattcccttacccatctgtccctagtctacccacaaaaatctattctatttcccactcccagggagatctaccctagccctttcctcttcatctaatgtctccagatctgtggattatagtgtgattatcctttact

SEQ ID NO: 2266 - DNA, 1200 bp, mus musculus
tctcttgtattctgttgctgatgctcgcatctatggttccagatttctttcctagggtttctatctccagcgttgcctcactttgggttttctttattctgtctacttccctttttatgtcttggatggttttattcaattccatcacctctttggtcgtgttttcctgcaattctttaaggaatttttgtatttcctctttaaggtcttctacctgtttagctgtgttctcctgtatttttaaagtgagttattaaagtccttcttgatgttctctaccaccatcatgagatatgcttttaaatccggtcttgcttttcgggtgtgttggggtacccaggattaggtggcgtgggagtgctgcgttctgatgatggtgagtggtcttgatttctgttagtaggattcttacgtttgcctttcaccatctggtaatctctgaagctagttgttatagttgtttctggttagagcttgttcctcaggtgactctgttagcctctatcagcagacttgggagactagctctctccttagcttcagtggtcagagtattctctgcaggcaaactctcttcttgcagggaaggtgcccagatatctggtgttcgatccccccatggggggtcctgtgtgggtccttgaggttgtccagagactctgagggcaaggcaccccagtgctggagtggaccggaatgaacttgtgcccctgatcaggccgggttatctgcttccctagttaatgcagtctcaggtcacgtgcgattggattggattggtgtgttccactcaccagaggtcttaggatcctgtgggtaatcctgtttgggtccttgtgggtgtcttgagactccgtgggcaaggcaccccggtgctggagtggaccggaagggcgaggtcccatttattaattatcagtctagtgccagcactgtcaatgttctgttcaagaagttgtctcctgttccaatgtttccaaaattaatccctactttctcttttatcaggtttaatgtatctggttttatattgaggtctttgattcacatgagttttgtgcagggtgaaaaatatgaatccacttgcattcttctacatgcagacatccagttagaccagcactatttgttgaatatgcttttgtttttccattgaggcctctttatccaaaataagcatgtagatatgtgtttgagtct

SEQ ID NO: 2267 - DNA, 1000 bp, mus musculus
tcagcttgttccagtatgactccacccatggcaaattcaacagcacagtcaaggcttagaatgggaagcttgtcatcaatgggaagcccatcaccatcttccaggagcaagatccttctaaaatcaaatggcatggtgctggtgctgagtatgtcgtggagtctactggcgtcttcaccaccatggagaaggccaggacccacttaaaggatggagccaaaagggtcatcacttccgccccttctgccagtgtccccatgtttgtgatgggtgtgaattatgagaaatatgacaactcactcaagattgtcagcaatgcgtcctgcaccaccaattgcttagcccctctggccaagatcatccatgagaactttgtcattgtggaagggctcatgaccatggctcatgccatcactgccactcagataactgtggatggcccctctggaaagctgtggtgtgatggctgtggaactgcctagaacatcatccctgcatccactggtgctgccaaggttgtgtgcaaggtcatcccagagctgaacgggaagctcactgtcatggcctttcctgttcctacccccaatgtatccattgtggatctgatgtgctacctgtggaaacctgccaagtatgaagacatctagaatgtggtgaagcaggcatctgaagacacattgaagggcatcctgggctacactgaggaccagattgtctcctgtaacttcaacagcaacttccactcttccacctttgataccagggctggcattgctctcaatgacaactttgtgaagctcatttccttgtatgacaatcaatatggctacagtaacagggcagtggacatcatggcctacatggcctccaaggagtaagaaaccctggaccacccaccccagcaaggtcactgagagcaagaaagaggcccactgttcctgaggagtccctatcccaactctgccccaacagtgagcatctccctcacaatttccatccc

SEQ ID NO: 2268 - DNA, 1200 bp, mus musculus
aagcatgattataataacaaatctaaattagcaacataataaaactataagacataaaattgatataaatattttccaacatacaggtaaaaaacaatgtggaaatgtgccatattctgtgttagcgaagaaacaaatagttaagatatggaaaaccaggtaggctgccaggaaatcttatcttttctctctattcccccagatccaatcgcccagtatccccagggctgcaacagaacagtttttctccaattcccatatctgtgggtcccacagggtatccccactttaccccctatgaactctgttgctttatcccatttcccatttccagcagataatccctgctaacccacaggccatgcctgccagaaaaccaggaagttatcccgtagacctcttctgtctctgttcctccagatcctctcccccagtctcattcccagctctgcagcacaagacctgagacagctttccctgctttctgctcctggaccccagtcctagtaggcatcccctgctaaaccaagggctccctctcccagggcaacaagttggctgaaggcagacccatacttctcctactgctcctgagatccaaacttcccagtctcatcttcagttccatagaaggaaacctcctgtggtctctactctttgacctcatccctaacagatcagaaggaccttctctcaactcatcccagtatctcagctcccaacaccagcaggcatttcctgtgaagacatcacctgagtaggccaggaagacaggtaacacacagctatcatactctgaaaatccagagaagaaacagaaaccagggagcaaaacattcacccagtaaagacaaacacagaaatcatgcctcgacctataatcatccaaaacctagatgcctacatgccagcaaaaaaaccacaatcagggcactctctgtttccattagagctcagctattctaccatatgaggtcctgagtattccaatatagctaaacacaagggaaaagatcttaaaaccaactatatgaagatgatagaggtcctgaaagagaaaaaaagaagcaatctctttaagaaacccagagaaattcaaacaataggaggaaattaaacacaagtagttgaagggatgaataaagctattcattgttcaagacttgacagtggaaatacaagcaataaggcaaacaaaaa

SEQ ID NO: 2269 - DNA, 1000 bp, mus musculus
tcacctgtttggttatgttttcctgtaattctttagtggatttttatgtttcccttttaaggacttctacctgtttagcaatgttctcctatatctttttaagtgagttattaatgcccttcttaaaattctctaccagcatcatgagatatgattttaaatctgaatcttgtttttttcgggtgtgttggggtatccaggacttgctgtgatgagagtactgagttctgatgatgctgagtcgtcttggtttctgttagtaagattcttacttttgcctttcgccatctggtaatctctggtgttagatattcaggctgtctctggctggaggttgttcctcctgtgattctgttcgcctctgtcagcactcccgggagtccaactctctctcaagtcccagtggtcagagcactctctgcaggcatgctctcctcttgcagggaagttgcaccaaggtctggagctcagcttcctctcctggctgaagatgaaggccaaaagggaagctgtccaagaagctctgttgcttctgcagtctgcacactctcctgcacaaactggactctgagagacctgggatacaagatggagctctccgctagaaatgttaaatagccctaccttgtttcaatattttgtacaacatccattagagatgattcataaacaatttcttcattccattatttatcactatatagatgatatcctaatggctgatgcatatataactatcctaaaaagaatatttgataaagtaaagcaaacaaacaaacaaaatcctttgacttgctggggatgacaaactgtcccttaaaaatacatttaaaaataagattcagttaattttgtagaataagtctacagaagtttaggccacaaaaagtacaaatcaaaagaaaccaattaaagacacttaatgattttcagaagctactaggagctataaactggctatggcctacaaatgacttgtccactcaagagctaaacaatt

SEQ ID NO: 2270 - DNA, 1000 bp, mus musculus
aaatccttctgttatacaacctcgagtttggggttgtgcgtgtgtatgcagatgtgaagaaatgtgccaacatacatgctgagagctgtacatttctgataattgcttttaaattactaaaagaagaatgaaatcacagaggtgtgtagcagaaggacagtctctctttttaatgatgacaaggtcaaaataaatgcccactggaaagatagactcgaactgtcccagaaactatacaatgtaacttgtgagatccagcaagtaagacgtcatgtcaatgatctgatcaaggatacctgccctggtcactctgcggacgttcctgtccacttgttcacattgaggaccaagatagccctttttacagaggcacttgttcggtctgacacagacacctccatgacggcacgctggctcacacttggctgcaagaaagaaaacaacacagcgcacttaatcttcacgcccgaagccatcatgtctgtggtcaagtaaaggtaggcaaagaaggtgggagacagtcacgaaatgactggacagagaatatctaagtacgtaaacggtttgcagacacaaggtattttaagggcagggaccaagctaaacatccagatgtcagcaggctaagaagcagagagcatgagaaactatctctgatgtgcagaccgactctaacacaatgatgtcagctctttcaactcctgcttcacaaggcatttcaacccacaaccaattccattcctgcagggaggagcacacaagatagaggttggccctgagaaagaagcccctagtcagagcaggtccagtgtgacattgaagtaaggtcattttgggagtggaggtgcataagctatcctgtatctggtctccctggggtccccacttccctatgcttttaggaggtgccccaaacacattgctttgtgattatgccccaaagcccatcctgggcctaatgcaagagactggcagatgaagttctgagcaatgctctttg

SEQ ID NO: 2271 - DNA, 1000 bp, mus musculus
ttacaagtaggatagtttttctgaatgggaactttggggatgagcatgtcacaagggcagaccattcataatgaagttaatgcatttataaaagaaacctcggtagctgccttgtcccctttatgtgtgaggtcactgcaggaaagcactacttatgtaacaggaaacagactatcaccaaatactgactctacagatgctttcatcttgcacttccaacctctagagctatgaggagtaagcatgtgttgtttataaggcacttagtctggggctttgtgtcatagcatcctgaacagaccagagatcttcctttgtcactgaaatcaacatgttgcagcctttctcctgttgcctttttattctgacaaaatattgtgaccaaaagaaacttaggtagaaggggacttatttcacttctaggttacagctcatcacttagggaagtcaaacagaacctcacatagaatcttgaagcattgcctgctgctagttctttggcttattcttagctagttttcacacacagctcagaatcacttgcccagggaattcttatacatagttataaatgatatatataagattgtgatgcttaaaattgatcgtcaacttgaaggattttagagtgacctggaagaaaagcttctgagagtacctgcagggagtattcatcaaagtgggaagacacatctcagttgtcagtaacatcatttcctggacaagggatctttgaacaatgtggataaatgaagtcaaactctaggaagcatgcatacatttctctgttcttctgattataggcatgctgtgactgcttcaagctcctactgccttgaccccctgccattatggactataccttgaagccagagaataagccctttctcccttaggttgcttttgtcagaatgtctaattgccataacaggaagagaaggtaagacagggattgcctctgttaaaatccttgttgtggtctctgttttcagttggattg

SEQ ID NO: 2272 - DNA, 1400 bp, mus musculus
ttgtgccgatgttctctatggaatcttctgcacctgagattctctctcccatctcctgtattctgttgctgatgctcgcatctatggttccagatttctttcctagggtttctatctccagcgttgcctcactttgggttttctttattgagtctacttcccttcttaggtcttggatgtttttattcaattccatcacctgtttggtcgtgttttcctgcaattctttaaggaatttgtgtgtttcctctttaaggtcgtctacctgtttagctgtgttttcctgtatttctttaagtgagttattaaagtccttcttgactctaccatcatcatgagatatgcttttaaatccgggtcttgcttttcaggtgtgttgggttgcccaggactaggtggggtgggagtgctgtgttctgatgatggtgagtggtcttgatttctattagtaggattcttacgtttgccttttgccatctggtaatctctgaagctagttgttatagttgtctctggttagagcttgttcctcaggtgactctgttagcctctatcagcagacctgggagactagctctctccttagcttcagtggtcagagtattctctgcgggcaagctctcttcttgcacagaaggtgcccagatatctggtgtttgaacctgcctcctggcagacgttgtgttccactcaccagaggtcttaagatcccatggagggtcctgtgaggaccttgggggtgtctggaaactccgctcgtagggaaccccggtgctggagtaaccggaagggacttgtgcccctgatcaggccaggttatctgtttccctagttaatgcagtttgaggtcccgcacgattggattggagcagacgctgtattccactcaccagaggtcttaggatcctgtgagagatcctgtgtgggtccttgcgggtgtctggagactctgagggcaaggcaccccggtgctggagtggaccggaaggctttctgatgcttttaaagactatctatataaaatatatctgaactgttaaaccttgactactcttagctatttctaattgaataatattaaaaacattttgctataattcagatataaatcagaatctaatataaccatgagtttactatctggcccttaacttgtattacttaatcatcccaaacagcttgtaatagcagctagaagaactgggtcaaagccttgtattcttaaataagttgcataggcacaatgcctatctaagagtaacaatattaatttcaaagattttatcaatatacaaagatttatgccgatgaaaatcttaaatctgtatcaatatataaattctgaaccaatgtaagaaattataacttcaattttgcatcaattacaaagatttctatca

SEQ ID NO: 2273 - DNA, 1000 bp, mus musculus
tttgaaattaaaacatagtttctaaaagagcagaacatcgtaattgatgatactcaatcatcttagctctgagctgcattcactggagtctcatggcacaatgatgtgcatgcacatcaagttgtgcagtgtgtcatggctgagcatacacttcagactcattatgcacttgcctttgaattaagttttttttattagatattttctttatttacatttcaactgttatcccattttctgatttcccctccaaacccccctccccctatcccctcctacctccccctgctcacaagccccacccattcctgcttacctgttctggcatacccctacactgggacagaaccttcacaggaccaagagcctttcctcccattgatgaccaagaaggccatcctctgctacatatacggctggagtcgtagatccctctatgtgtactcctttgttggtgatttagtctctggaagttctggagttggggggtctggttggttgatattgttgttcttcctatggagttgtaaatcccttcagctccttcagttctttctctaactcctgtattggagactctgtgctcagtccaatggttggctgagatcatccacctctgtatttgtcagacactggtagagccccccaggagacagctatatcagactcctgtcagcaagcacttgttggcatccacaatagtgtctgagttggatgactgtatgtgggatggatccccaggtggggcagtctctggatggcctttccttcagtctctgctctatactttgtctctgtaactcctaccatgggtattttgtccccccttataagaaggaatgaagtatccacactttggtcttcctttttcttgagcttcatgtggtctgtgaattgtatcttgggtattctgaacttctgtgctaatatccacttatcagtgagtacataccacgtgtgttcttttgtgattgagttacttctctcaggatgatatttt

SEQ ID NO: 2274 - DNA, 1200 bp, mus musculus
caatgaactccaagttcctgcatatgtcatggactggcagaatctttgaaatcctcacattttctaaaatgtcacagtctacacaggtgggatttataagcctgggcttttagttgaggctgctgaaagaaggtgttccatccccagagctagcagcttcctttccacccgagcttcttgttctgagattatgaaaagagctctcaggcagagatatgcattctgacagctttcagggtaatctgaagcacagtggagtggatcagtcgtgcacagtatgtgtaatgcacagcacagggccaagaaggacactgagtaatgtggtgagcaaagtgagtatcagaggagcaggaaatgactttgaggtctgaccactctttcaagaatcattctgcttaatggggacaaagaaatggcccaacaactgatggagaggtcaagctagggaggcctgaacagtgacagagattgcagcatcttaacagatggttgagttagtaaaacacaaggaaacatttctttagaagttcatgagaattacagcaaagctggagggattctgatcacaaaggagatgaaagagttttagctagggacaaagaggaggaggatgcatgtttgggggttagtgaatgagtagaggacttctctagagtcctgattgttcttctcttcttagaaaaccagaagccattgctgtccactgaacatggcaatggaattccaggagaaagaacggtaaagagaagccacagcacagcatagtgagaggaagcctggtaaaattgggccaaaggcttgaagcccaggagaccttgaagggatggtaggagctttgcctgctcctggcagcaggcctctatcacgtagccacagtcctccaatagatttgtggctgtcagtcacataaaggaaacacctcaagcccttccacatgtagatgagacatccctaacatctcagaccaagacaacaggaaaagagacgtgacctgtggtcacgtaggctcaagacagagatctccatgctaatgatgtgcctagaggctcaaagggcatcgccaataagattcccttcccatatattcctccctgcaaaggtatttaatctcaggcccaccctgagaagtgagatatggttttatacatccattttccattgtgacaataaactgtttagaaccatggactgcctcttttc

SEQ ID NO: 2275 - DNA, 1000 bp, mus musculus
tatgaaacttttcatctctaggatagagtattttcttcttttattggttattttatttatttacatttcaaatgttataccccttcttgatttcccctccacaaactccctacctcatcacacacacacaccccgcttctgtgaggatactcccccacctgcccacccattcccaccccattgccctagcattctcctgtgctgaggcatagagcctccacagaaccaagggcttctcctcccattgatagtaaataagaccatcctgtgctacatatgtggctggagtcatgggtccctccgtgtgtactctggttggtggtttagtccctgggagctctggggagtctggttggttgatactgttgtttttcctatgggttgcaaaccccttcagctccttcagtcctttctctaactcctccattggggttcccaggctcagttcaatggttgactgggagtatccgcatctacattgatcaggcactggtagagcctctcaagtgacagctataacaggctcttatcagcaagcccttctttgcatcagcaatagtgtctgggtttggtatctgcagctgggatggatccctaggttgggaaatgttgaggagggggaagtacagagggtcaggaaatggaaaggagatccgtaaaagtgaaagatggggaactagaggcagccactagaaagtcccagatgcaaggaaatcaagaggctaccaggacccaatggggatgacattagatataataccccacaaaggggacagagaacctgtagagaccatatccagaggttaatcatggctgctggttgagggctggggactactacccatctcaaaaattttaacccagaattactccagtctgaaggaaatacagggataaagagtggagcgcagacggaaagaaaggccatccaaaaactgtcccacctagactagagtattttcttatgtaatatataatcttcaaacattttaataaagat

SEQ ID NO: 2276 - DNA, 1200 bp, mus musculus
gtttctcattggcttataaaaatactctgaggtggttaggatgcgttcatatgcaagagtctgtatttctcttacatgaacttcctcaaaatccttcaggaagcccaccttgggcagtgtggtgtgtaggtccgcaggagtgctgggcaggcaaaacacggagggggcaggagttagaaataaagagttgggtgtccactgacccaagatgagggagctctcaaactcctagacatccaggcgctgttgggtcgtgggaagttgggagcagagttgggggttcatgggcctgtgaagaggccagaccagtgaaaggggaacttcagcttagctcctcattgaaagcccttagcttagtggtggctctccaggagtgcagaggggccttctgcaggagccttaggcagtacagctctgtaggcagaggctttcttcaagctctccttggaagttcttgatgcaagagacagtccttggtcccaaactgtttgttcatcatagaaaacgggtgcataccaccccctcagggtggaccagagattaaatatcttttgcagggaggaatgtccaggaagggatgcttattagctaaaccctcaggacctctagatacctcattagcgtggagaactttgttctgagctatatgaccacgggtcatgtttcctatgtgggaaatgtggtgtggcacgttccaggacaggaatctggaagggatcagtgagccacctaccatctcaggtgggtgcctgggttccggggactctgaaccagctcaaccttgtcaagtttcctgtcaaagtccactgtcgcacagtggtggtcctgctagcaatgttcaaaacggacatgaagcagagacatctacaggaatatctgggaactgaaagagaggcgcctatagcagtcaggactgaatgacttctttggaaatggggtgtttagtttcttaagaagctagaaaacaatgttttattttatgggcttaaatcccaatccaaagtaatatacatttgaggacaagagtcaaaggcttatgagactcactaacattttaaaagttcctggaaccaaaaacatgtaaaaattcacacgttgctcctaaatatatatattatattttgagttttattatatcttttcatggttctatgtattgtggaggtacttagtaagcaaaagccaaagttactgaacaag

SEQ ID NO: 2277 - DNA, 1200 bp, mus musculus
ttcctggatgttttgagttgggatctttttgccttttgtattttctttgattgttgtgctgatgttctctatggaatcttctgcacctgagattctctcttccatctcttgtattctgttgctcatgctcgcatctatggttccagatttctttcctagggtttctatctccagcattgcctcactttgagttttctttattgtgtctacttccctttttaggtctagtatggttttgttcatttccatcatctgtttggatatgttttcccgtttttctataaggacttgcaactctttagcagtgttctcctgtatttctttaagtgaattattaaagaccttcttgatgtcttctaccaccatcatgagatatgcctttagatctgggtctaggttttctgatgtgttggggtgccctggactggctgaggtactgtactgggttctgatgatggtgagtggtcttggtttttgttagtaagattcttatgtctgcctttccctgtctggtaaactctggagtcagttgttatagctgtctctggttagagtttgttcctctcgtgattctgttattctccaccagcagactggggagactagctcactccttagtttcagtggtcatagcactctctgcaggcaagctctcctctttcagggaaggtgcacagatatctggcgttcatacttgcctcttggcagaagatgaaggcccgaaacaggacctgtcccagatagcttctgtagtccacactctcacctgtgaagactagtctccgtggagtctgggatccaagatgtctcccgcagatgctctgccaaagccctcctgggccaggtggacacctatcctctggcagggaaggtgcccggatgtctggagcccaaaaagggggttgcctcagaagctctgtggctcctgcctgtcccagaagctgttagcttctgtagtccacactctcacctgtgcagagtagtcttggttgagtccaggaaccaagatgtctcccacaaatgctcaggcaaattgttttgtttttttaaagcatagctttcaagggtcccatggctcaattggaaaattgttgaaaatagaatatatatatatatatatatatatatatatatatatatatatatatataaactaacaaagaaaataatgacatcattcttagaactaacagttattgc

SEQ ID NO: 2278 - DNA, 1000 bp, mus musculus
caattttgatattcaacccttatgctccaatgaatgcccccctccacacgcacacacaaaaggtaactccgttttgactgtgcagcatgcaaccaacaatgactttgaactttcgatattcccgcctttacctccccagtgtcatgaatgtatgtgccaggcaagcactctgtcacctgaactacatcctcttgagtctgtcacagggaagacccaaccagggacctccagttctgtcctttctgctgtgtcccacgcaagctcataacacctactctactctcccaggaggggtgacattgagttaaaggaagttccctgggactaacgaagcctgcatttaatacaccctagctgaagttttacttctctggtcaaaattaactggagtgccgcaccccttcatgctgcagacaactggggcagaagaggaggcagagctttgagtaagagtgatgggaatattaccaggaggagcctgagcaggtcctgctccaggcaggactccataggcaccacaagcctcttctgtggttttgttttagttccggaatgtctctaacaacccaggttacctgccatcaaatacttccacaggattttagttctgtttaccgtgtagcttcctctcaggctatgactctaagctgctaaccctcctcccaggaccctgccaaagccacatctctgccagaataaaccatattagtcaccaagccttcctccgcagccaacagcaaccctctcccatcagtgtgctggccaggactcagtcagacaattccctggtggcctccctgaccaccaccagctcactgagaagcacggtgttaggctgtggcaaaatttcctctacacattctgcaatcgtgcacaaaagcataacccaggacggccaacctttgccctttgagggaactcaaagctcactccgagcattgcacttgaggacccactcggctgcctctgcaaaggagcgcagcagccaccttctcagaaa

SEQ ID NO: 2279 - DNA, 1000 bp, mus musculus
tctgcactgagagcctggccttcccatacatgggcctctgggagactgtgctgacgacctgacacaagccagagtcattttgggagagggaacctccattgagaaaatgtccccaccagcttcccctgtgggaaagcctgtgctgccttttcttggttgatgattaatgtgggtggacctagcttactgtaggcagtgccactgctgtactggtggttctgggtgctgaaagaaagcaggctaagctagtcctgctcccaggttcctgtcctgcttgagttcctgccctgacttccctcagtgatggacggttacctgagaaaggtaagatgaaactctcctctcaaactgctttggtcatggtgtttggtcacagcgatagaaaccccaagacagggactcttgcacccttttctgttccccaccagcatttcaagagctcagctcacaggtaaaccaacctgtttactccaatcaaagtctcaggcaacggtgtgtgtatgagtgtgcgtgcgcacatatgtgtgcatgtgtgttcaaaggacaacttacaggtctctccttccaccacatgggatcccagcatcaacacaggtcctcgggcttggcagcagaggtaaagttgaggtgcccctcaccagcccctactggtcacctctgcattggctctgacagaatttcagagagagatagcttacaggaggagatcactcctgagggctggagccgtgacttcattggccagaatgcttgcctagaattctcaaggcctcagcttccatccccagctctgcacaaacctggcacagtggtgcttacctgtaacccagcatttagggctcatagcaggagatcagaaactcaagatcatctgctccatggtaataatatgagcttgaggccagcctgtactatggtaagaccatgccttaaactgttctactggctcacagtttaaacatctcaaaccagggctggagagatggctcagtagtgaaga

SEQ ID NO: 2280 - DNA, 1000 bp, mus musculus
taaatgacacagatgttgacaggggccagggtgagaagcctagaggacagagggaaaggtcagacctcaggaggctcccagcgctaacagccaagtggggctcagagctcagccagtccataccccagggacttgacccatagggagagtggcaggcgtggtaagagggagccctgaagaagtccccaagacaaactgatccagtcactgagggaagacatcctcaggacatttctagatggaacaaattgttgccttctaacatcctatagcagctggaaagggtcaaacccttgctatcatcggcagttgtatgggtgcccaagagggtcttcccaggcagctttgccttttgcccagtcaggccaacagaagtttgaagggttctatctgcccctaccctgcacccattagtctgcaggttgagtttctcttcctgttcccaccctatcactccctggctccctctacaggcagggctcccccccaggactggcagccaaactgctgcagcagatcttatgaggcttccgagccaccgtaatgctagtgccctgagaaagactgagtgatggcttccagctccaacgatggtgaggctgagccctgttgttatagcaacttcctagacactgtctgccccttaagtcagggaggggctgtgatgggggctgaggggagcaggtggagagaaggagtctgtggacccttaagtatccctggaaatgcctccattcctaaaatcctgggctagaaaacctgaggaagaagaacagggggatgaatggtccatttcagaccaaagcagatggtctacccggagtagggctccagctgggacaggggatggagtagtcccacccagctttgggattcagaccagaagaaagataggtccaccttagacctgggtacagtagagtttgcttgataccctgaaccctgcctggagatagagggaacctagtgttgggggggtccccctcaaactgggggtata

SEQ ID NO: 2281 - DNA, 1000 bp, mus musculus
ggaatttagtgatatcctgggggcttggggaactttgaggaatgctcaaaagatgggcccagcagagcaggggcaggtccctgaatctcctctggggcaagccatcaaagatgaaggtttgagaggaaacctgacccacacagttaccatgtcctaatacgcccctttctggccttgcgagatgagggcatagagccctctgttggcatctttgtcttgtgggtccctattctagaattatttccgcgatgcctggaacatcttcgactttgtgactgttctgggcagcatcacagacatcctcgtcaccgagtttggggtaagtctcctgccagcttctctctgggtgactcggggctgcactagtgggaggcaacagttgctggcaggcacagtggccagctggtagcatagagggagaacatcagaggcacagcctgagacaggagtgagggtgaagtttttctgggtggtaatttgggggtacgaaaacagtttttaaggtttcagtgaagaggggagagaggtatgtccaaagctgggacatagggccaaggcagagcagtgtgcctctctgcctggtggctggtgaattgtgaatagtgttaccagttcactacattgagagctcatgcctttaaagacaaatagaactgaattcctgatccaaccggaccacgaattgtggtccactgccccctgctggccatggtggggatagcactttcaagaccttaggctagtctctggaataagcagccctccaccagccccaggcaatgcaaataaggaaagtggggagagaggagtacctgagctttcagactacattgtaattatccctttttaggtaaatctaagagtccccagagtcccctcccaaaccttgtccttggccatgagccagtgacccctgacttgggaaccctcaggagactaaggagaccataggagatcctcccaggggaccagaaacaaaaagctactcatcgatgcccag

SEQ ID NO: 2282 - DNA, 1000 bp, mus musculus
ctatcagagctccatcttccttctaggccgcatctatgaagggggaagttccttaattgtttcttgattgggtcaataaagacagcagaagttcatttctgggtgaagataaagaggtgggatttctgggtcccaggaggaagaggaggagatgagatagagaaaggcgttttttttggccaggctttggagagaggagcatggacaccatgtaggtctggggactattagaactggtagtggctgccaccagaagaattctaatataggattgctgatgagcttagaacaatagagtccatgcctagcagttgtgtcatctggccgattttaaaatatactaagattttctagtgtcttccctctgcagtgactcatgtgggcaggagaaagcaggccacagggcagttggtcagtggtatgagcagtagctccaggcattctcagaaaggatggttgttgggtggcttagcaagccagctggaggaacaggtagtgttcttgggaaaatgccagctggaaacatgatggtggctgttctcaaaacatagctggaaaattggggagagatccccagaaagaataagtgtgtttttaaaactacacacaacacatcttcatctgcatccctggatcagcataccaatccctgcctaagcttcgcttgcctctcaggaggtttgcttcaacccaggacatataggtctacctgcctctcagaacctgtttcaactggggatacccaggaactaccagacagccaacatcagagacaaacacatggcaaaaggcaagtacaagaagataatcaacagaagccagtgcaatatgtcaccatcagaaccctgctctcctactacagcaagacctatatatcctaatacacctgaagaacaagactgtgacattaaatgttatctcatgaagatgatagaggcccttaaaaaggctataaataaatatacataaatccattaaagaaatacaggaaaccacaaac

SEQ ID NO: 2283 - DNA, 1000 bp, mus musculus
ggtaccaacccagcctggcatctcagggcactgtagaactaggtacatcttcttccactgaggtccgacaggaagcacagtaagggtaacaggatccacaggtaggcaacagattcagggtaaactgccacttcagttattgggggacctgcatgaagaccaagctgcacatctgctacatatatgaggaggacctaagtccagcccttttatgttctttgtttggtggttcagtttttggaagcccaaggattagctgacttcattggtctttttgtggagactctattcctcctgggttcctcaatccttcctctaactctttcttaacacttcctgaactgggtctaatgcttggctatggatctctatatctgtttcaatctgatgttgggtggagcctctcagaggacagttatgctaggctcctgtaagtgcatccaggttgacagatacaaagataggctgaggctccaaggtagtcaaaagagtaaggcaggtcatcaatgtgtctctattgatcctcctaggacagcttggtacattattccctctgcccccaaccccaaattgtcaggggttgctattgtatttatttatgtccatctcacatagggtacctgtgtatccaggccagcactgacaaatataactgtcaacagtgtcttcatgcccttctggtcagcgccagcactgggtcaccttgggcacagaatcggcggacacccccacagttcctagaggactctccacgcactctgaggatcactggtgagcagaacacagcatcagttccaatccagttgtgatgggcctgtgacagcaggaacaaggactctgaagcccttcctgacctgaggctcactcaggttccttttgatcagttctgtttaccttggtttcaaacagaccagacagctccacggtcctcaaaggagacaccatttccaggcactgtaacacgcccaggatcttagaacaacaggatcccaggataaca

SEQ ID NO: 2284 - DNA, 1000 bp, mus musculus
actagacaggctgcatgaatcctcctatctctgcttccctactatccatcttagagttacaggtacatggtactgtacctggtttttggagatctgacatcatgtctgccttcttgtgtgacagacacttttctgagtgagccatgtctccagctctaaaatcctttttcagaactataaatgttgactttcattgtgttttgcatattgtgaattcattcaattctaagtattttctgtttttacccttaattttgtcctttatttcacacaagtttgaatccatcaaatttccttcagacatgtggtgtttggaatatgcttggcccataggaagtggccctattaggaggtgcagccttcttggagtaaatgtggttttgttaaaggaagtgtgtcactgtgggggtgggctttgaggttctatgcttaaattccacccagtttgaaagagaccctcctagctgcctgaaagacagtctcctcctggcttcctttggatgaagatgtagaactttctgcttctttagcaccaagtctgtctgcatgctgccatccttcccaccatgatgagaatgtactgaacctctgaaattgtaagccagccccaattaaatgctgttatttataagaattgtcttcaatgaggttgtctcttcatatcaatgaaatcctaagacaagttattgctaatttccttccacaacaataagaaaaatactttttatgcattcagtcttttcaaagttatttagacctattaactttatcctaaagaatggtcgatgccagagaccagtccatgcaggagagcacacggactgtagaagcaacagtttcttggacagggtcccttcagccttcatcctcagccaggaggcagagctgagctccagacctcagtgcaccttccctgccagaggagagcttgcccacagagagtgctctgaccactgggactcaggagagagttggactcccaggagtgttgacagaggct

SEQ ID NO: 2285 - DNA, 1400 bp, mus musculus
cctacaattttcattcaaatgctcccacaaaacccagggacattgatggtcaagagaggagtggcctgtgttacagtgtaatggcacacctggggcacatgattgctgccgagttcttcatcttccctgaaacttctaaagttgtctgtaggtttgaaaacactcataggagagtgttgcaatacttgtgcattctgaacgttgctgattagaattttctggatacttgtttctaaaattagaaggtccagaagctttgtgtgaagactcaagattcagcagaactgggcggggcttagtctatctgctttgaaatgcacaccacattgctgcggtgtgtgtgtagaacaacataggagatgtctctttctgccccggtttggggtggaatctctcttgcttctgctgctctcttgctatcttctgtgcattccagacaagctggcctatgagtttctggcgattataaatgtgtgccactacatctgatatctaaaatatttattcattatttttgtgtgtatgagtgttttgcctgtgcatatgtgcacagtgtttgttgcttggagaggccagaagatggcactgaattccatgaaactggtgttgaggatggtcgtaagctactatgtgggtgctgggacctgaacccaggacctctgcaagagcagtaagctctcctacctgctgagccatctctctagccctgcatctgatttttttaaaacacaggttccggtcttttcacaaggaacttgggtggtgtctcaaacttgcaaggtaagtgctgccactgggccatctctcttggctacctgaagttttaatcagctctccagagcaagagtaagtactgtttgggaaacactggttaatttatgtgcagagaatttgatgctgtgtggaagaaaaaagtagaacacaatagaactacgacagtagggacagggacaagtaactagatcccagacaaggtgcgacattggagactcagtcttaacaagatttttaagtgattatgatgttgtataagggtcaagaaactccaagtttggaagcattttcccaaagacagtaatgttttgccagctgaatggtaggttccctggatttcccagaatgtataaaaaactgtaagataggaaaataaattacaccagttactggtgttcttgctcctggggaactgagctcatgacaggtgtgtcccttagttccttttggatgtgaactcaccaaggcaagacaccaaggcaacctataaaggtctaggtgggtaaaaggcttactttacatgtctttgccagccacacaacacagggtattctacacagctctgtaacacagcaggaggagctatgaagatgtgttcacaaaggttctgtcccaggagaaggagg

SEQ ID NO: 2286 - DNA, 1200 bp, mus musculus
attcttcgctaacaacgcgcatgtactggtttgcttcacgttgcacagctcagcatcctctgttcatcataacctgcatgggatccctctgtgacttgccaaggatcctgaaacaagcactagacattggggcagcgacctggggctttctcctaataatgacaaacataggtcacacatcacggagcctcacgcacctccattacctccattcacttcatgcaggaacagacagttaccacacataggggttggtgcggaaagctagccaggatgacttgatgccagaacatatgtggtcaggcttcagataggcctcctcccagaaggaagagatgggtctgatctgcaacaggatgcagtcagactgaggtgtagtccctgcctctggtttccagtcacgagagcttttgagtctttgtgttagagcaatctggagcagaccctgtcacatcagaaaagggaatggcagggctggagagatgactccatgcctaagaggacctgttgttgctcttataatagacccagagggggttcccagcacgcacctgatgtctaaccactgtcaggaactccagatccgggtggatgggatgtcttcttctaacaccttagccaacaccagagtacacatggtgcacatacatacatgtctgcaaaacaatcgtacataaataaaattgataagacctcaaaaaaaaagctacagtaatgtcactttagaagactgccatcattcagaaataacagtattaaaaatgttgaatttagggtagggattgtgagaacccagtttaaacagctctagccaaggcctcaaagctcagcagaggggtttctccaagttcctgtatctcactgtggaggaaatctaaagcacattctggtcccctgagacgaagagacactgctgggagaagatctgctctgcatctcacagacaagcgcaagcatgctgacctgttgctgggagcgggccaacttcctgcctgtgtcctacaaaaaacttgacagacctgggaagtggctgagggccagacactgacatcagggcatgaggcttgctcatggtgggcgtgaccttccccctgatttaaggtaggaatgctgttggctgatgaatccatggtctcacaggttggtgaagtaaaaagagtcatggttcgcagaagcctctagtccaggccagtgggcctg

SEQ ID NO: 2287 - DNA, 1000 bp, mus musculus
agtcagtaggcacagcaagacagcctaggactgactggtccaggagtaaccatgagacccttacagcctctggcttagttactggtacagaaatgggcactgaggctggccttggtgggagctttccattagccactttgtcttgcaatgactaagctgactgtatgttagcctgaggctccgaggctccagaggaggtggtccttcggaagagtcacgttggaaaacagaggcaagagaccttggatcaaacccaacctgaagcttatacacctcttaatcttctcaatccagcgaacccatagattcctcttctaagtttggcccctttgaactggactctcatcctttgcaatggctgagtattgcctgacacaggtgtgccacccccatgtgcacctgtgcacacatatgtacatctttcattctttcacctggggttcactaagtgcatcttctgcctagagagcccagcatgacccataaccagagcctacagtgggactgagacacacagcccctcatctcaggagtgctgagaacagggacaacggaagctacttctctgctcagatgtcttttggaacagtctcaggcagcacatcactggaagccagtgccaaacagaagcacacatcccttgttcaaaatgattgacagtttaacgagggttggtggcacagtaccagggaggctggggcaggaaattcaaggccagacaggctacagagtgacttcaaggccagactgagcaatgtagtaagaccttgtctcaaaatagaaagtagccaggtatgctggtgtatgcctttaatcccagcacctgggagagaaaggtggaggaatctttgtgagttcaaagccagcctgggatacaaagtgagttccaggccagccagagttacagagtgagaccttgttttaaaaatccaaaaagtaccctccccctcaaaaaaggaaggggctggcgagatggcaagcaagaatgcttgctgctctt

SEQ ID NO: 2288 - DNA, 1400 bp, mus musculus
gctgacagcaaattatttgagcttttgtttatctgaaattatatttatcttgttctaataagctgggatcttgctgtatcctgaaatgctcaagttgactctgaactttcaattttcctgtctcggcctccacttctccatatttttctatatacaattctgaatatgcaactgttgtatataattttggagttacatctccctcttccatctccatttttagacatcagttttcttgtcatatctttttttctctgactgctttacagagctgtatctcaccattttttaaatgttagcatatgtctgtgaatacataaacatcagattttaatgttgattacatatacttttgagtaggctcagtttctcaccttttctggttggttttttgttaacctgacacaaatctagacatatttgggaagaggaatcttagttgagaatatacctccatcagattcttctgtggatacgtctatagaaaattttcttgattaatgattggaatggaagggccaagcccatgttggtgctgtcatcctgtggtcctgggtcctataagtaagcaggttgagcaagcaagtaagcaacacccctccatcatctgtttcagtttctgcatccaggttctgacactgacttccttcagtaatggaatatgtcttagttagggcttctattgcagtgtaaagacaccatgaccatggcaactcgtataaaggaaaagacttaattggggcttgcttacagggttagaggtttagtccattatcatcatggtgagaagtatggcagcacacaggcagacatggtgctggaggagagttctacatatggatcagcaggcagcaggaagaaagagagaggcactgggcctggcttgagcatctgaaacctcaaagcccacctccagtgacacacttcctccaacaagaccacaccttagtgccactccctgtgagcctatggggcctttaaggtacattcttctttctggtgcatctctcagttcactctttttcacagcatctaacctgactccaatagtgactatttcacttcagacataataccagttcatgaatttccactttgttctgttgaggtttagatgctgttatgtattgtagtggtacatactctccctcaagatctggttgccccaggagaggagctcttcagggaaaaggggatcctcacttataccaagtgatgttatgtaactttgctccttactttaaaactactggtcgagtgatgcctcccaggcgctcagctgtgtcgagatgaagctgaacatctccttccccgccaccggctgtcagaagctcatcgaggtggactacgagcgtaagctccgcaccttctatgagaaacgcatggccacggaagtagcc

SEQ ID NO: 2289 - DNA, 1000 bp, mus musculus
tttctcagctaaagaagagaaccaacattgccacatgccactgaagctccttgggcgctgtgcacatgataagcatcactcctcgccagccttactctggcctgagcatcccttcctgtttcccttctaaggtaacagggctctcgtgacagtggatcagcggctccctggtcacctcctcttccttcccgtccagaattctcacccacctcctgcctctcatagcatccttctgacagagtgtcttctccttgtgccccgccagccgtcagttcacatgattccttatccttaccccctccaacccaccagaccctccccttctgctgtgacaagcagcatgtcccctttccctccttggagcaggcagagtcactgacacactcctaccttgcattacctaaccacctcagaccctgtgacaggcagggctgcaggcctgccctgggcaaggctctccctcccctctcatctctctctctcctgcctgccagcactgacctcctggtacaagcctgtggggcttggcacctgtggtgagctttgacaagacaaagactctgtgtcacttccattaattatgtttgcgtgtggctatgaattttctgatggtaaaaatggatgtcacaaaatttacaattttagcttctattgaggtggctctcttgcctgaacccggggagtcgtctgtactgggtatgtgttctgtgtcagagctgtgttgctacctgcttgaagcgatgatgtttttctaattttttttttggtgttttgaaagagggtctccccccaactccccgagctaggattaggggtatgtatcaccataccccacttcagcaaccgagtgttttttccatgtatttattttccatttgaattacatatttagagacatggcagttcatatcctttgctcctgttttatggtgtgtgtgtgcgtgtgtgtgttatgcatacatgtgtgggtgtgtgcacatgtttgtgtgtatgtgcatgc

SEQ ID NO: 2290 - DNA, 1000 bp, mus musculus
ggggtttcttccagaaagtatgtttgaacgtattctcactggtcccgttgtgagagaggaagtaagcaggcgggggagaaggcctaaaagtggaattgccaaggctaccacagcagcagcggttcctgctggcagtgtgccaggcaaccctttgctggccaatggattgcttccaggcgtggatctcacagctcttcaggccttacaacaaaatctgcagaacctgcagtcgctgcaagtgactgcagggctgatgggcatgcctgccggcctctcttctggaggagaaactaaaaacatggctgctatgttccccatgctgttctcaggaatggccgggttaccaaatctgctaggcatgggaggactcctgtcaaagactgcagagtctggggcggaagaaaagcgaggaaatgactcgaaggagctagaaggaaaaaaagaaaggacagagagccaaagtccggagaatggaggagaacgctgtgtgccaggttctccttcgacttcctccacggctgcattgagttcagctgcagctgccaagcccatagctcttaacccactgttgctgtctaacatactttacccagggatgctgctcactccaggccttaatcttcatcttccaaccttgtctcagtccaatgcttttgatgtacagaaaaacaaaagtgatgacttagattcatctaagtcagtggaaataaaggaagagaattccagagttagagatcaggaagagaaagggggaactgagcctagtcctctcaacgagaacagcacagacgagggttcagagagggcgtcctccgggtctgatagctcatcttcatcctccgaggactcagactcgagcaatgaagactgactggggctctgcaacctcctcctgaactggttttgccttctctttaattactaactgtaaatatcccagtgttgagtgcatcaataacttactgacagaacatttcagttgtttgtttagaagtgcaaa

SEQ ID NO: 2291 - DNA, 1200 bp, mus musculus
agagagggagggagagagagaaggagggagagaggaagaaagaaaggaaggaagggaaggagggaaagaaggaaggaaagaaggagggaaggaaaggagggaggaagggaaggagggagaggggagaactagggtttgtctggaggtttctttttggatttttttattgttgtttggttggtttggtttaatttttgtttctgttttaagcaacctaatttaggtgtaaaaatccaacttccgtctgaacaacgtggcaacaagctagaagctgtgagtggcagtgctaaagcagagaggctgtaaggaaaagcttttaccaaagcccaagggggaagctgactgcagtcctgcaggactcccctgagccagttagaggcccagcaagctgaagaacctgttaattgcctgatctgaagccatggaggacgctcacttgttctcttcgccctctaccctcccacttcccgctcccacccttcctccttcaccccccaccccccagagaaaggatctaccttctctggtaaactccagttcttcagccatcaccttcttttggagacattgactctagcaccactatctgctgcatctttgactcctcctggattgccagagcatcattacccagtatcctcagctctccctgcagccataggactgtgttctaggtcaggtcagtcagggctgcctctggaatgttctccctgaccatcagtagtaacaaaagccctgtttttcctgaagtgaaagtgccacaccggaggggtgagatgcatgtggccaccttgccagccccgaaggcaacaaaaatgggagagatggaaataatgagactgaatcctgaggacattgttaagtccacagatgaagccaggcctgcctgatgctcactctgagccaatcaagcccccgttctcataaacacccatttgaattgggcattccattacttattagggaaagagtctcacccagttcatacaatctatccctaaaacactgaatcttgtctttgaataatcaaattatagttgtcctactcatcctaaaccagacaagggttcagatgccacagcccatcagacccatctttcacctttctgtgttctgagcaaaaacaaacttgctttgtttctttgagtttctggtcaggttttagtaatattaaaaaatgatattgtgccatatattctt

SEQ ID NO: 2292 - DNA, 1000 bp, mus musculus
gtgtgtgtgtgtgtgtgtttggttgttttttaagtgtgtgagtgagtgtgtgagtgtgtgtgtgtgtgtgtgtgtgtgtgtgtgtgtgtgtgtgtgtgtgtgtggtgtcacagaataaaagtacaagtaaggtgatttgctgcaagtggttctctcgtacttcatggaccttcagagataaaactcaagttgttaggcttagaatcaagcaacttcacccacagaaatgtaattttggcccaagatgccttgttttgttttgtgtgtttaacttggcacttgctacccaggcagttctggcctctagaaaacgatgattgatccttatatctcaatgtggatagaagggctagtaggttatattggcataaattttttgcaacctattttaatatgagttcaacttctcctcttgcccaccaccaatgggggaagtagacctgtttagcaatagttctttggggacaaattcaatcttctttggcagcagttcagtccaatagcaaacagcaaatactactcagcagctgcagaccagtcctctatgcagacacatgaaccagcaacttcaatccagtcccttcagcaggcagataccgggcacacatcagcagctgtagttcaatcctgaaaaataccaaaaagctcaccaacccacctgaggtgaggctgcagaagtctcaaggtgctgcaggaacctcacaagcagtactttgacaagtttctctcagtggtggcattatcacaaatgaagctcaacaacactatgtaagattgaccaatacatgcatgtcattagcaaagaatagcaaggtggggtaaaccaaaccaatgctcagtacaaatttccctaatttctttctcagcctgtttatcctttgtgtagagaaaggccactgatttgtttgagttaattttatatccagcaactacactgaagctgtttatcaggtttaggagttctctggtggaatttttaggctcacttatatatactatc

SEQ ID NO: 2293 - DNA, 1000 bp, mus musculus
aagggtgaggagcagaatccacgttaccctctcactcaggctcacactaaagccctgtggtgccacaaccctcctgtaagcatcccggagctactgaactctggacaccaagaacaccagcccaagctgtgccttgtggggtccagtgaggactgacgaagtgggaatggcatcttggaactcggccacagtcattgtagtcgcagactctgacagaggggcacgtggccacacaagctgcatggcagttacagcatcctcacagacctgccatgcaagggactgtaacaggaatcccagctacctgggaccagagccaaataataccacaaatgaccacacaaaggcagaaggtaagaacggactctgacctccacttgcatccggtggcttctatgaccaccccatgcccacacacatcatccctacaacacacacattaatagaaaaaacaattaaagtaacggcaaagtacaaatccccaacatcgcccacagggagaaaaacggcttctgtgaatgcttcagctgggtgccttctgcacagccaagaccaggcagtctatggggaagcacagacacacaaccgaatctctcgaaacatgcaaaaggaggtttgaataagagtagcagcctgaacttcctcagtctggaaactgcttgctcccagaagagccgtttctatcagggtgaaggtcaacacctctctggtgtgacgcccactcctgtcacagggctccttatagctggaatggaagggctcagtcgacaggacagggagaagggaaatacaagggcaggaaccctaagtggcccacagtttcctcctcttttgtaggaatgaaacttggagtatgagcaaatatttaaacagtgagggggagagcactagcgattagtgatgaatcatttagaaagggactctctaggggtcggagaaatggctctgtggttaaaggcacttgcttctctcccagaagataggagcttagttttagttc

SEQ ID NO: 2294 - DNA, 1000 bp, mus musculus
aaacaaattagatattgggggttgatgaaagaagagaactggggggaagaaggaatggggaagagggaaagggaagatcatacatagggagaacagggaaaaaagaagggatattggtggttaaggggcatccatctctaagatgtgccagaaatatggaattcagggagactccagatggtctctggaggtgactccagctaagaattcttgcagtggggcatatggatcctgaagtggccacttgctgtaaccagtcaagactcccagtggagggataaggacaacaacccaaccacaaaaccttctacccaagttgtgtcctgtgtagaagatgtgcagagacaacgctagagcagagtaggtgaaaatggccaatcaaagacaagccccaaataagacccatcatatgggcaagagccaatccatgacactatgatcctctgatatgcttcagacaggaacttaggataactgtcttctgtgaggctcccctaacagccacttgtaaatgatacagagattcacacacaaacattagatgggggctcagggagtcttatggaagagttgagagaagcaccgagaggcccaaagaggatggggactccacaggaagatcaacggagtcttggatttttcacaggaagaccaacagagtcaactaacctggacttttgggggctgccaaagactgaattaccaaccaaagagcaagcacaagctgaacctagatccctgcacatatgtagcagatgagcatcttggtctcaactaatcctcattaactgaaacagcctgtccttgagcctgttgtctgcctgcatgtagatcccatacccctaaatggattgctttgtttcgcttcaatgggagaggatgtgcctagttttgtagagatttgatgttctgttatgtgtgtggggcggcaggcaggggtgaagacagggatagagggtatagatatagagggtaggggctgttagtggaggagttgaca

SEQ ID NO: 2295 - DNA, 1400 bp, mus musculus
ctaagtttttgctcaacatgggttaaatgaatgggtgggtggatggatgtctgagggatggacaaatggatgagtggatagatggatcgataaatgaatagacagatggatggatggatgcatagatggatggatggatagatggatggatggatgatggatagatagatggatagatggatgaatgggtgggtgaatggttggatggataaatgggtagatgggtgggtggttatatgggtggatgaatggatggatgaatgggtgggtaggtggatgggtggatggatggatagatggatggatggatggatggatggatagatggatggatgaatgggtaggtgaatgggtgggtgaatgggtagatggatgagtgggtgggtggacggtgagatgaatagatgggtgggtagatagatggatggatgactggatgaatgggtgggggatagaagggtggatggatgaatgggtagttgaatgggtagttgaacgggtgggtgaatgggtagatgatgaatgggtgggtgtatggatggatggatagatggatggatggatgagcacaatctaacttgggaaatctcagaggagacaattccagcttggctggaaatgagccataatttaatatttgtgtttgagagaattaaatataatattaaaaaatacagagggcattcccaaatagcacaatgagggagcaaaattcccatgagagtggacagacctgtgagcataggtaaaacaaacactgctgctcagaggaacccaccccagaacccacaggacacgggacggaggggtggcctcagacaggagccttctggtttccatcggcacctggagcagatacttttccacagggctccatatccaaatagtgccaagagggagtgagcctcccaggagcatggacaggactatgagtacaagtagggcaaccacttctgttcaattcctggcccaagagggaccctcacagactcatcaggacacagggacaaaggattagctggggcaaggatccttctggccgctgtctacaccccagagctgaccctgtaccacagctctccatacctaaattccctcggagagaactgttctcccaggagtactgacatacaggcttacaggacagacaagccatagtcagagacagcaagaccagctaacatgagagatgtccagatttatgaaaggcaagcacaagaacataagcaacagaaaccaaggctacttgacatcatcagaatcctgttatcccactgctgagaagctgggttacccaatcacaccagaaaagcaagactctgatttaaaatcacatcctctgatgatgatataggaatttaagagggtcataaatagctcccttaaggaaatacaagaga

SEQ ID NO: 2296 - DNA, 1000 bp, mus musculus
tacagtagccattagttgtattaattgaaggtgagtgatgaactagctcagtagtaaatggtgtttaccacaatttgatatcctactttacaatgtgaaagaagagaataaactctagaatttccacaggtccaacatgcacatacacacactgcacaccacacattgcacaccacaacacaacttgtcagagattgattccatgtgtgtgtgtgtgtgtgtgtgtgtgtgtgtgtgtgtgtgtgtgtatgatcaaacacgcataggtatgtgtatgatcaaaagttagagaagtatgtttctttgtttgttttgtcagtgcccaggatggaaacctgggcctgaaatgtccactaagctaggatggaaacctggacttgaaatgtccactaagctactttcccagttatagaagaaattctgaaacttggtatattgtgaactggtcacataagagatgaattaaacaatagcctacaaactagtttaatgtgttgaagagtaaaaagaatgtggccatgacacaggaccactactctaaatggacaaggaaggaaatgttgcttctattgttgggataacaggacacacaaaaaaagatgtagcccacttactagctcctatcttaattcactcagagattacccagtgccaataatgcatatatctcagttccatcaacccctgcaataagtgttataaatggctactgaaataggcatcagcttggaagcatctcttcttggaaccattccactcttgggaatatttcctactcttctttaataattctatactcactttgcattctacattccattatacattttgggcctgacacaagtttagaagcttctggttaatgttggttttttatgaacgttgatcctgtgacattctagatctccaaggtaagcctacaaagagataagaaagattctttcatcctcaaaaaaaaaaaaaatcacaagcaatgctacaggtgtgccaggcttagagg

SEQ ID NO: 2297 - DNA, 1000 bp, mus musculus
agggggaggaaaagttttatttcatgttatacatccaagtaacaggtcatcatggagggaaggcagggacagagctcaaaacatgactgtggaagagggaatgcagtagagaccttgaagaaatgctactaactcattcctgtgagtttgccagtttacttctaaatatcagagccatgtggtgagggactgcactacccacagtgggctgaggagtccaacactaattattatttaaaaatttaatttaatttaatttaatttaattttttacttgttcactttacatcccacacactgcttctctcctgatcacccccctcccacactcattcccccatctcctgagggatgccctggttatatcctggtcgtgtcacttcaaggttaggtgcttcctctcacactaaggctggacaaggcagcccagctagaagaacatatctcacatacaggcaaaaaactttgggacagcccctgttccagtttgggacccacatgaagaccaagcttcacataggctacacatatgtggggaggcctagtaccagactgtgcgtgttatttgattggtggttcagactctgatagcctcaaggatcctggttagttgactctgttggtcttcctgtggagttcctatcccctttgggaccacaatccttcctcatattcttctgtaagagtccccaagctctttctactgtttggctgtgggtatctgtatctgagtcagctgttgcgtagagcctctcagaagacaacatgctctggtctataaggataataaagtattattaacagccaactccagttattaatcaaggaaatccccccaaacagcacccacaggccgatctaagaagacatttcttcatcttaagttctctcttcccaaatgagtatagtttacatcacactgacaagcactagacagaacaagatgtctgtgctcacgatattggttcttcctcttcgaagctactttaaatagtagtgt

SEQ ID NO: 2298 - DNA, 1000 bp, mus musculus
atcccctacccacccactgcccctttttggccctggcgttctcctgtactggggcatataaagtttgcaagtccaatgggcctctctttgcagtgatgaccgactaggccatctcttacagtaggttgaataatgctgtgactaataattccttgattaaaatcactagaacatgattatataaatgtgagtgtgtttgtgtgtatatatattacataatatcaacattgattgtcactgaatttgtatttttaaatgtctatcaatataattatgatatcaaattgaaagaatcatattaactatgctatgaattttaatgcaaggataagtgacactcaaagagaaaaatgaggcagattcaatggtaaaagaagggaacccatagaagaaataggcagaattgtgagaaatcaaaaaggaaaaaagtatgaaacacagcatagttaggaaagaactcttaaagacctgtaaagagaattcagttttctgttgatatctttgtctttcatttctgactttcagaacaatgggagaatgcagttctaatgctttatgctactaaattgctgtcattttaatagagcagccccaggaagcaagggaaagaattaatgtcattcaacacatatggaagaaaaatgagaggtaaaatgtgtcacccaaggttaggaagtcaggaagagacaaagctttgattgagaccaaagcctgagaaattcaaagacttttgctgcatactggttttactttcctacttgatgtgattaaggtttgattgacattagaaccttttgctttaacttgtggattcaaattcctggcagcactgctacaagaagagcagagtctgccacctttgttacataaagagctacatgtggattatagtgacttgaagcaccagtttcattctgttccattgtttcatggtgaagggatttgggtacttattgaatggacagtttttcctcctaatttagcaatgacctagaagcaa

SEQ ID NO: 2299 - DNA, 1600 bp, mus musculus
tcaggttctctggcgcaccctctcacctgttcagactaatttcctaagttaggcgggtctcggaccaagatggcgaccgctgctgctgtggcttaggccgcctccccagccgggcgggcacctgtcctccggtccagacggtggctggctgtccccggcccacaaagggtgctgcctcagtgcctctgtgcttccgcctgttccagaagctgtcaggttctctggcgcaccctctcacctgttcagactaatttcctaagttcggcgggtcccggaccaagatggcgaccgctgctgctgtggcttaggccgcctccccagctgggtgggcacctgtcctctggtccggaaggtggccggctgtccccggcccacacagggtgctgcctcagcgcctctgtgcttctgcctgttccagaagctgtcaggttctctggggcaccctctcacctgttcagactaatttcctaagttcggcgggtctcggaccaagatggcgaccgctgctgctcaagactctgatttcaaatgaggtcatcttcacagtagcagtaaggaactggagtgtgtgcatgtgtacgtatgtgtgtgtctatgtgtgtgtatgtctgtctgtgtgtgtgcgcgcatgcgcataacagatgtagtgataattaattccattgcattaccattaccactagaaccgttttgaagcaaggacttgaattaagtctgtacgacctaactttcatgtgacccggatgtattggaatgcctgtgtcctgactaattggaatttaaggtttgccataccttgtaatgcgttagcctacctcccactgctttctggcagctttggcagcagacatctagctttttcttgccccctatctcccctcctgctgctctggttctcaaaggctgtttaatgggtactaaatcctccatgccctccagtcactaaatcaggatcttaatagcatcctattaattgtataaaataaggatttgaaacataccatatagtttttttttgcattttaattaaattccattgatttggaaaaactgatttattgagaccttaacaaccatgcaacacacataactgagttcttaagtctcaataaatattttggtgggaatcaattgacttttgattaacaacaaatatctgcttttataaatctcagtgaaataagctgtggagtgtagatagacattttaattaagctggactttttattcttatacctaactgcctcaacccagaattgcttatctaagccttttacttgggaaaaaatcagaacaaaagaaaatctatttattggcattaatggaataagtgttcatgttcattgtgagtgtgtatgaagactggatgaaagcctcttagaaattgagcctcttaggattttcttatttttaactaggtttaccatgaacatccttttgggattattttagcaatacagctaatacatgttttcttacacaactccaaatcctgtcatgcaataatgagctttctcttatctcaggacaatgatccaattgtgatatctactgcaagagaaacatcattcatgatactctctttgtgtttctggaatca

SEQ ID NO: 2300 - DNA, 1200 bp, mus musculus
tcataaacgcatattggtgtgaattacttcaacattaccattatatattgactagatttatttattttctattattgttgttgttgttgttgttaacttttgcttactgtgagtgagaattcgcttgcatgtatgactatataccacttacaggctagagaaggacaacagaactcctgggactggtgttgcagacacttgtggtctgccatgtgggtagtggcagctagtgctcttagcagtggaaacatctccctaaccccttgaatctttattttgatctctagcttgaccatgattttaattttcctaaatatatcaatattgtttgttgctgatgagaatcaaaataaacactaaaaatatcattcagtgaatgaaaactcaatgaagggatagccacaaaagtataagtggatctaacacaaaaatgtataaagaaacacctagcttgcatctcagcaaaacatataccctcttctcctttttacaggggtagaagtaaattggtataacaaaggccaacaaaacctggaaaaaaaatctgtctatctatctcttgttttctggttataaattgacagcttttctacatgctaggcaagtaatctaccactgaagatctagcattttccttttttcaaaattatttattctctctatagcccaatgtcagccattcctctcctcccagcactccctcatgcaaatccttacccccattccaccagaaaaggagacaccctctgggtgtcaccaccccaagacaacacacatcaagatgctaaacgggactaggcacagtccctcccactgacgccagacaaggcagtccatttaggggcatgggatacacaggcaggcagcaggctgaggagcaacccctgctccagatgttgatggacctacatgaagaccaagctgtccatctgctacatatgtgcagcggacctagttccaactagtgctcactcttttgttgatgattcagtctctgggagccacagggttagttgactctctttgtctttctgtggagttcctgtcctctttgggtctcttaattcttctcccaactcttcagtaagattgctgagctccatctactgtggggttgtgaccttctgcatcactttcctttggctgatgggtggagctgcaaagaggacagttattctagattcctgtcaagcatgtcct

SEQ ID NO: 2301 - DNA, 1000 bp, mus musculus
tggggcctaaaaaaaattcttgacgcttctgcaagtagaagggttgaaaccatgaaccataaattatacccaaagaagagaggcaaaacaatcattaataaaacagaaatggatgccagtagaaatggacattcaccaaagaagatgtgagggaaatgtatgatagaaaagacagcaacttaagaagtttaaaataaatattctggaaatgattttcctgtaggcaagcctgtggtgtaatttcttggttgatgattaatggggagggtccatctcactgtgggtggtgccatccctggattggtagtcctgggtgctataagaaagcaagggagcaagccgcgaggagtaagccaataaaaatcatgcctccatggcccgtgcttcagtttttggcttcacattccttctctgcttgaggtcctgccctgatatcccttagtgatgaactgttatctggtggtgtaagcttaaataaacactttcctttcaagatcttagttagaatgcaggtaagtaatgaacaatatcaagataggcatgttaatggtgatattaagagccatttcttaatagtttattgttatgcgtgttacttctgtataagacaaatgtgttgtcatgaagttaaacagagcctttcttccaggtacttactgagacattccactttctgctgcgcctagagcaagcaggtattcaccagaattctaatgttttattatagtattttgagagggtgctaataagcaatcacttcatttcatacatgaaactgaagcctatcagcatagtactttccaattaaattggagtttattcaaatggacattagcatctcaggaagaaatccttcctacacagcttatctattgaccaggttattgcctcaaaagaagagatgattatttactcaataagttgaagattttagcccttgctctcttgctccctcttgccctcttgttcttctctctccccattcccttcccccttctct

SEQ ID NO: 2302 - DNA, 1000 bp, mus musculus; identical to SEQ ID NO: 2301

SEQ ID NO: 2303 - DNA, 1000 bp, mus musculus
ctggccatgattttctgttctatcgaagacccaacaaaaccttttcatttgcttgtgtccaccagcaatgagattttcagagccaaatatattctatttctgtggcattagataaataaacagaatgcagaagacttagggacttttataaaagtgagggaacatttctttcttgctcaatggtaattggaatatcttatgtgcctaagaaaatggaagagtataatgttagttattgggcatgtggactataccaccagaggaactggcatggaacaggcaaagtgaagcatgtgccaaccccagaaatctcaaaaactgagataagaatgccattcagagaccagcaagattagggctaaacccctccctatttctatggctgccagtgaatgtaagcaggtcaccccaaccaggagacagaaccccaggtgggttgtcacaagcagtcaatcaggtagcacagcacctagaattttttccatgcaaatgaagcatctcagcaggcttagcattcagtcgatgtcctttttccctccctggatattctcacacacgaccctaaaactttataaccattggttcatctggaataaagtatgtccattcaaacccatcctccaataaagaaatactaacaagctaatatcacctcagagagtactgcttcattaaagatcgttggagaaagctttcacctaaaaaagccttaacactaagattcttgaagaagaccttgttctccccgcccccctctcccccccacccccccacccccagacagggaggtagatcctattaattcaagacttcccctgtcctctccgagctgatgtatgagtggcattcagacacccttaagaagagagacagaatgaggaaccagtattgcacttcttcatgttctacaaataccagtcaccatatatctactgtttaccatggctatccctttccacaactatccacaagccactttcttcaatacatttatgcttgt

SEQ ID NO: 2304 - DNA, 1800 bp, mus musculus
aaaatgccattggatttgtaatttttacaaattttgtaatttgtaattggctttgtaatattgtaatttgtctcaaatttgaaaaataactaagttaacatttaatcattccttacttttaaattggaatattgaattttacaaaacaaagtagccttcccactaacatatggctctttataacaactcaattttaatttttttttgcatttttttttagttttgtttaaatgtgtataggagggaaggctactacatataactattcactaatgcaaatatttgtgaaaaacagttcttcaaacaatataaatttcattattaccctcttgagaaaaaaaaattgaagaatttattgaaaggatgttgctaatccccaaatcttgagattatatattatgcttattggtatgattcatgataaacattatctcacatcgttcttacaattcttacatcccaaatgccgctagatatcgtggaagacctgagaacaaagtgggggggccagaagagggtagcttggacagcccgggggcccaagggagaaggggcagggggagaaggcactgggtggttcctgtgcaggtgagggtctttgattcagtctggcagctggaaactctgggtggcctccgggtgggaggttagaagagtggctcattagagggaagcctgctccttttctccagtaccctgggtcctgataagcagagacaggccatggttttaggtcatttatttgtagaaaggcagagagagagagagaaaagaatagagaaggagaagccagccatagccaggtggagagagggaggaaggaaggggggcgggagggcgggggggggaagtgaaagatgagaagagaggcaagagcttaagaaagagaggaggctacaagcaggcccttttatagtgggctgggctaccttgtggttgccagataactgtgagggtggagtctagccagagtaccaggagcttggggcattgcctaagtgactgatagccacagaatgataagagttgagggcttctggtgtcaggagcctaatgtctaggagtacagcttatgtcccttgtagaattttctactgggtctccggagtaagccttgctcaacccgacagaacacagactgccttatatggtctaacaaggaagtaaattgtcataaataatcgtcatccaggagtgtttctcaactctgctactggtggttagggcctgggtgttactcattgtcttatgtgaagatcaacatatgtggtccctgttctataatatgtctagaatcttgctactcaagtgcaatcgtttagtcatatttacagtgccattaaaccatttattttatattttaagacattcctaagagattgcatgatgtatatctgactcaacacaaaacatactgtcaaatatgatattttgcttgggtttacaagaaattgaattaggaagcaaaattccaagtattatgatttgaatttgcacaggaaaatgttattgtaagtgttacaaccctgcagtggaatatatcaaatttcaaataacaaatagtatttgttgcagtttctcttcttgtcaatgttgtggtgtgtatatttttcaccaatataattagtcattcatcctaaaaacagggaaattttactgcactacattctgccagaagttttgttgttgttgataaggcaaagcttaccataggaaaaaggcgtgggggtgggggcgtggagacaaagtctaatttgcttgaagagaacagaatataaaaataacattatccattcagtt

SEQ ID NO: 2305 - DNA, 1000 bp, mus musculus
tttaaggtcttggattgagacaatagggacgctaattttcataaagggaaatttgcctttcagctgtctggttttcttctatgtctttgtcttctaatctgtttactggatatgtgatattatatgagttccccatatcatccgaagtatatacattaatctttagaaagaacaaaagtgtcacctctgtaagattcgaaatattatataataacaaatacagtcagtatctcagacactatatgcaaatttgataccagattgcataagagataatttaatgatacacagttggatgtaactaaccagagctcctgtagatttcttgattatccggtgtcttcaactgatgcagacagccaaatcaaagtttcaggccaaataaattttatttagaagcctcactgattcactgaaattaagaggattaaccagataatcggcaaagctatgtttctgtttgtgtgttatgaaatggctttgggtgacactgttttcccaggtgtatatcagacacagctgggctgccatctgtggaacacgttgctttgttattcgtgttacagaagcaccaactttctttgcttttattatttttcttctttttgaagatgtataacatttttaataataaaagcatacatgtattcctactgtccattaaaaatctcagattttggaaaatattgctaacattttttatttttactatctttttttcttttttttttaaattgggtatttatttcttttacatttccaatgctaaaaaagtccccaatatcccaaaagtcccccacacactcctccactcactccccttcagatcccttcagctccttgggtactttctctagctcctccattaggggccctgtgatccatccaatagctgaccgtgagcatccacttctgtgtttgccaggccccggcatagtctcacaagagacagccatatctgggtcctttcagcaaaatcttgctagtgtatgcaatggtg

SEQ ID NO: 2306 - DNA, 1000 bp, mus musculus
ttaaaacgccaggcaaggtgatgcggctgtgaaattgccaggcttggaagattgtcacagatagatccccagagctactgctctgtcaggccagcaggattctagagaaactacagaccctgactcaaaaatatggctgtcactagaggttttcttctgcactaaatacacacacacacacacacacacacacacacacacacacacacacacacttacacacacacagatttcttcttacaactctcaattgatttttcacatgctatgctgtagcaactttactaagattcctttgtcctgggtattagtactcttttaagcatgagttgttcatggattcagagatagtaaatagttacatttatctaatacatgcatttttgtagccctgattttgcaagatatgatcatggcagagaagataaagctacaaatgaaccaagattaaatcactgccattgttgaattttccttctgaaaggaagcaagataaatgtatatacagttaataggtatcatatcaaggtatgactcactatttgaggaaagctaaatgttcacaatagatttgttatgtgtcagacagaagagtacatatgagtcttagtgtggtgggggatatttgggattatatttgtactggcttgttttgtgcgtcaacttgttacaagctggagttatcacagagaaaagagcctcccttgaggaaatgccttcaggagatccagctgtaagacatcttcttaattagtgatcaagggtggaagggcccagcccattgtgggtggtaccattcctgggcttgtagtcttgggttccctatggaagcaagctgagcaagccaagggaagcaagccactaagtaacatccctccatggcctctgcatcaattccagcttcctgatctgcttgagttccagtcctgacttcctttggtaatgaacagcaatgtggaactataagctgaataaaccctttcctctccaacttgcttct

SEQ ID NO: 2307 - DNA, 1400 bp, mus musculus
tgtctagaaaatgatctatttcatctagattttccagttttgttgagtataggctcttttagtagggtctgatgattttttttaaaattttttcagtttctgttgttatgtgtcccttttcatttctaattttgttaatttggatactatctctgtgtcctttagttagtttggctaggagtttatcttgttgattttctcagagaaacagctcttggttttgttgactattttttttttttggatatttctcttttgttgctgttgttgttgttgttgttgttgttgttgctgttgatttcagccctgaatttgactattccctgccctctactcctcatgggtgtgtttgcttccttttgttctagggctttcaggtgtcatgttaagttgatagggcacttcgagctatgaattttcctctaagtgttgctgttattgtgtcccaatcaaaaatttgggtatagagaattctcaacagaagaatctcaaatggccaagaaatacttaaagaaatgttccaactccttagttatcagagaaatacaaatcaaagcgactcagagtttccacctctcaccaaccagaatggctaagataaaaacctcaagggacagcatatgctgacaaggaagtggagaaagaggaacacttctccattgatggtgggattacaaactggtacaacactctgaaaatcaatctggtggttcatgaggtaataaatagttctgtgtgaatatgcagctataccactcttgagcatataaccaaaagtttacctaccataatacatgggcacatactccactatgttcatagtggccttatttataatagccagtagctggaagcaatgcaagaaggaagaatagatatagagaatgtggttcacttacataatggaatactatgcaactattaagtatgaggacatcagctgggtgtggtggtgcatgcctttaatcccagcactcaggatttatgagttcgaggcgagcctggtctacaaagtgagtcccaggacagccagtgctatacagataaaccctgtctcaaaaaaaaaaaaaaaaaaaaaaaaaagaatgaagatatcatgagatttgcagacaaatggaaggaactaaaaattattacctgagcgaggtaactcacacccaaaagtacatgcatagtatatactcactaacaagtggatattagccaaaaatgtacagaatacctaggatcaaatccacagaacttaagaagattaacagcagaagggccaaagtaaagatatttcaatcccacttggaagggagaagaaaataatcacaggtggcaaagagagggagcgactatatcatatattatttcttgatatattatatataataatataagttataagaatggtt

SEQ ID NO: 2308 - DNA, 1000 bp, mus musculus
cactcagcgtggcgccaatatcaggtgctgctatgtacatatcaagcaaggtctggagaatcattaacttaggtctagatttgatatatatgacgtattctgagccgagttgctgcaatgatgattagaaggttaagaatggccagggcttacagaggatgtgtaggtctcttcaagtcttcagagacattcacggagataatgggagattgtactgccctgagaatgtaccagagatctgggaggtgagagactctcaggactcaaagtgagggaccatagatgaaatgcccaacattggggagaaggaacttgtagagcccacctccaccagaaagacagggcatcaagtgaaggatggggttgccatcccacagtcaaaactctgacccataattgtttctgtctgaaagaacttcaggaatggaaatggagagggccctgaggataagaagtgccaatcacagacccaaagtgggatccagctcaaggggaggccctaagacctgacactattacagaagctgtggagcactcacaaaaagggacctaccatgactgtcttctgaaagaacaaacaagcagttgatagagtcagatgcagttatttccacccaaccaatgggcagagaccactatagttcatttaggggaaagctggacagagctgaggaggagggtgatcctgtaggaggaccagcaatctcaattaacttggacccccaagatctatcagacactgaaccaccaaccaggcagcatacgccagctgatatgaggcccccaacacatacatagcagagaactgctgggtctaggttcagtcagagaagatgcacctattcctcaagagactggaggtcccagggagtttagaggtatggtggggttagggtgtgatttggtgacatcctcatggagaaagtcttttatcctctttaagcctcagtttcctcacaaatcaaatatgttctttcatagaatagcacacgattttcag

SEQ ID NO: 2309 - DNA, 1400 bp, mus musculus
tttagatgaggaatttttttctatgattttaatgaaaataatttctgggttttgatgtgggattcttcccctttctttattcctattattcttaggttgtgtctttttgtggtatcccaaatttctgagatgttttgtgtctctaactctttatacttatggtttcctttgaccaaagtatccacttcttactctgtcttcggggcttgagattttctctctcacattccttacatcctgttgctaaagtttgcctctgttgtttgtattcaagtgcctaatttttcttttctaagatgtcctcagtttgtgttttctttatcccttctgtttcaatgtttagatcttgaatagttttgtttccttcaactatttcttttttctttgtattctttaaggggtttattcatttgctctgtaagaacctaacccatcttcaaatagttggtatgacggttttttttcgtgggattcgtctatgttgaaatattaagtagcggctctggttagatagctgggtacttttggaaacattgcaatgggtgctcctaagctagcatccaggcagatgggattgcctgctggtattggaagctaggatgaagagacgattatggagaggcaatcaggagggaatgatctgtggcagacataagaagtgtgactagggaaaagtcaagtggatagccctgagtattagatttgggggaccagagggagtggagaatattcataggcagcttacctgatcgtcattgttcttcacagcacattgaaatctgggatataccatactcacactgtgataatcagtcaaagtaataagcattgttttctgagtactgtgcatggggtatcttggaatcaaggggcgttctctttgccatcacttctgcattttatcttgataatgaaataaaatacatataatatttaaaatatgtatttacgcctcatgttttacttctctttacaatacgtaaaaatgggcttttccatcatgagaaggaaacatccttgggcttagcaaacattatttaatatactctttgtattgcaatacttgtttatatttgtgcttttcacttttaatttatatgaaatgtttagatagcaaattaaagtgtgatattttcccttaagatacttaaaacaaaatcttaatacatttattatttgtttactccagaaatgaagcaaatatgttcacagataacattgtataaaaaaaagcacttaatagcagctgtaagccaaagccttggtacaagatacatgtcgtaaattttggtgttttcattctttgggcattaaatacttttcttttacaacataaaactgtctttattttattttgcactaaattagtctaactgtgtttttcattttataagatttta

SEQ ID NO: 2310 - DNA, 1200 bp, mus musculus
tctaatccatgtattcctccaagaaacatacttgttttttttcttaataatcaaagatccacgtataagatgctagtcattttacatggcacaagggaacctgtgacataaatttgatccttgacttgacagtggtgcacaatagtagtactagtgcttgaaaggcaaagccatttctgtccctgtagttctttcagacaggaatagttatgggtcagagttgtgactgtgggatggcaacccactccctcatttgatgctctatcttcctgctggaggtttgctctataagttccctttccatactgtctggcatttcatctaaggtcccaccctttgagtcctgagagtctttcacctccaaggtctttggtgcattctggagggttctccaaacccctatacctcccaaggttggctgtttccattctttctgctggacttcagggtttcagtcctttccctcacccaatacccagatcaggtcccctctcccctcacaacctccacccctgtccactgttcctcccaggtccctcccttcttccccacttgtgactgctttcttctcactcgcaagtgggactgtggtgtcctcacttgggcccttgatggaaatggagtggagcctgaggaaaagaaggtccatggacaggcccaaagtgggatccagctcaaaggaaggtcacaagccctgacactattactgaggctatggagcactcacaaaaggaacctagcatgactacactcctgaagacccaacaagcagctgaaagagtcagatgcaaatatttgtacccaaccaatggacagaggctgctgaaccctgtggtttagttagggaaatgctgaaagaagctgaggaggaacatgaccctgtaggaggaccagcagcctcaattaatctggatcccagagatttctcatacactggaccaccaaatgggcagcatacaccagctaatatgaggctcccaacacatacagcagagaactttctggtctgtgtccaatcagatatgatgaacctaaccttgaagagattggaggccccagggagctttgaggtcagatggggtgggggtggggggcagtgacattctcctggagacaggggtttgggagggaggtatgggatatggaacagtcagaggatggaccaagaggggttggcgaataaaatctggagtgtataat

SEQ ID NO: 2311 - DNA, 2000 bp, mus musculus
taaagcagaaaagaaaaacggtgcaacaataaggctttttaatgttgggcactaaagcaatgcagctgattagattctttgctaattaccttctgttacttagatggaatgtattttggcaggagagaagcatctatttgtgaatagtcgctttcttagtagtgagataaagacatttggttttggagtttgaaaagtgcctctctcatggtccagtccctcagatctcaacttgaccacaaatgaagtcacacacaacccagacttcatctctccttgtttctattcagttctaggtgctttggaggttaaaagactaatgtttgagcagattcttaaatagtaaaatctgtctgtgcaagaggcaacactgcaaaaactttaagacaaagacgagatttacaaagaaataatagagaaatgagtgtcaggtaagaggtggtatggatgatttgtgggcaaacataatgggttttaaggctcatttgcaagtttaatggatttaatcagagcaatggtaacaagaactaagtcttaaaccacctgaaaactaaccagactagaagttacataggtaagacttgaacttgcttgcactctaagttagctagcaagagatactttttttcttaaaatgtatatattgaagccttaaatagaaatgtaactatcattagaaatagagacttttagaaaacactgagtttcaatttgttcttaaaagagatgatggattaaaccaccaaccagataatacatatgcagggatccatccaaatgcatatgtagcagaggatggccttgtctggcatcaacgaaaggggagacacttggtcctgtgaaggctgtaggacccagcatagtgaaatgctagggcagtggggcaggagtgggcaggtgggtggggaaacacccttgtggatacaggaggaagggatgggatgaggatttttagagaggaaaccaggaaggggaataacatttgaaatgtaaacaaaaatataaccaatacaaaattaaaatgaaagagagatgatggatgaatagcttatgttttcagtataatttgaagcactgagtcacctgatataattataatctcagaggcttactgctgaatacgcttaccctctgcagttctttctaaactgtttagctggttcaactccactgttcaaattcaaactcttcgccaactaactgattcaatctggcttctctcagcttcttaatgaatggctctgcttagtctcaaattaactctggcatgttgttctcatcttctgactccttattctctggcttgaactatgtctgctgatctgccctgaactgcaactcaactactttgcattgcacgctctgcactgattcctaattgactggcaaagctgactaaaatgaactttctctccctatgttgctcctaaataccttttcttttttggtgtatgccatctctgatttattctgtcaaacatttgtttgtgacacacacacacacacacacacacacacacacacacacacacacacacacaggagagtacatgccaacagctgtgcaatcacagaaccttcatatgtgaagccttgtagaaatctattggctgaagacaagcagaattggagagttcatgtatgagaagtcgatgtctcagaggaaaatgaaaaggtctgactaattgactagaaaagttgaagaagtgatctaagagaatcatacagaatacggaatactgaaatgaaagaaatggaatcaagagatatgaatggtatgtttactaaaacagaaaaacaaaaccccgcaaactctcctgcacagtgaaatcccattatagcaaattaatttatttcagcatttctgaatacctagagtcatgtcatatattttaaaatgaaaagccattaattacaataatggcctaatagatggaacttctcaagtaatatgagacttatgaaggcctaccccattgtagaagggggtggagcagaga

SEQ ID NO: 2312 - DNA, 1200 bp, mus musculus
agaaagtgctgtatgtagggtattttcttaatttatgatagatggaggagcaaccaacccatcattggtgatgccaacagtaggcttgtggccctgggggctataaaatataggatgagcaagtcaataaacaacattcctctctgtcaggttcctattccacatgcttgacctgcttaagttcctgccctgactacctttgataatgaacagtggtggaagattataagaaaaaaaaaacctctttccttccaagcatgcttttggtatttcatcacagcaatagtaaccataagacagaaacattctgaattgaaccctacctttttcctatgtcagctctgaccatagtaatagatcattagaagctatataatttaaaatataatactaataacatagataaacacacaggaaattatttgtcatggttaacttagaagccagtctgcaacacagtgagtatttgaactctatgtaaccaaatgctaaccttctgcttccttgcatcttaagagaatcctgttgaatcttagtactatggagtatctacaaaagatcacacttaaattagtaccattaacttcatccagccgtgtagctcctcccagtacattacactttgccaattatggaactcatctgttcctctttgccatttagttattgagcttttcttggccaggcatgccaccgagggccagcctgggcatgaagttgactatctggccatcattattggaatctaatccattccctgggaaaacacccctcaagccataaaatgcatctgtgtgttgattttattaggtcatctgattgagcagatgctgatggctctagaaagagacgtgtttccccctgccaaccacaatttgtactgctggagttacaggcagaacccatcaacagagctatttcaacattttaacatggcatttcagatcacataacaatttctgcatcagggaacctgagagcacagagcaatttttactctgttgttcttagttactatgccccctttttagattctatagacaatacattgatatatttggcctatgccttatttcagtgtcgtctcagaacctttttaagtagaaatttctacacgttaccactggctcattcccgggcttcttctgaagtagttttccagtccttgagacaattggtttcagagttttgatagtaaca

SEQ ID NO: 2313 - DNA, 1000 bp, mus musculus
taaagcatccattatagattttttttccttccttggttaggtttattcctattcatgcttttgatgccaccattaataagagtgtgtccatgatatctttttctgaatgtgtattgttttacagcaaagctattgacttataaatgtccattctctcttgtgagactaggccggggcctagcaaacacagaagtggatgctcacagtcagctattggatggagcacagggcccccaatggaggagctagagaaagtatccaaggagctaaagagatctgcaaccctgtaggtgcaacattatgaactaaccagtaccccggagctcttgactctagctgcatatgtatcaaaagatggcctagtcggccatcgctggaaagagaggcccactggacatgcaaactttatatgccccagtacagaggaacgccagggacaaaatatgggaatgcgtgggtagggaaatgggggggggagcgtatgggggacttttgggacagcattggaaatgtaattgaggaaaatacgtaataaaaaatatttaaaaggaaaaaaaataaagtatttggtatgtgtatacattctcatgcaaaaaaaaaaatatccattctctatcttggcacattgctgaatttgctcaaaatttctagaactttcctggtagagttttcagatctctaatgtgtagtatcataccttctgaaaatggaataatcttccttttttctctttaatttccttcacattcctttattgcttcagctggtatttttcaagcacaatattgaaaggcattggggataacgcttattcctgtcacaatactgacttcagtgagattatttctaatttcctctattgaggataatgttggctgtgggttcttaataaacaattttattaaactgaataaatgtcctgcttttttgtagaaactatataatagtatacatgtttaagtattactatcataaagtcatactagattttatctgagaa

SEQ ID NO: 2314 - DNA, 1000 bp, mus musculus
tgtaacattattgttaagagtcatcatcaaaagtgtctttggagccatacaagtctgccagtttcttaaaacgaggtccccagttctgtagatagtcgtagtccaggtctgagtctgtcgtggcagactccaaggagctcagggacccagccacggaaccccggccctcataaccatagatttggatggagtcatagggaggggctgtgggatcattatctgcctcctgtattcttgtgttgatgaagtcgtccacatccacactgttgggtgctggtcgcagcccaggtctaggcatatactgatactcaggtttgatatctttgcgagggataaatccattgatgccgtcaggattctgcagggtggctatgtcgaaggcttcagtgtcttcctcaccacccccttcatcatcataggttatgatgttctcacggacatcctcctcttcaaatacaatgagtggttctttcttttgcctcctcagggtaacaaacagcacaacgatgactgtagaagaagaaacagaatgtcagccaacccagtgctaagctcatcccccccggcttactcatgccagaggggctttgtttcagaacctggagtggtgagaaaaaggatagcttttccagaactctcaaagagctacatgctgccctgtctctgtctgtacagcctgccctgagagcatcacaccctgtaaactgacaggtcggaactatcttcagcattttgcaaattaatcccaatgctacttggcagtcctctgaagaatcagcaaggattactgttgcctaaaagaggcaaatgcctatttctctttgcaaaggagtgtaaccgacttccccacatgtaagattaaaatgttcactcaggactgaggtgaaaataggcagctcctgtccaaaggccctactctgtaggacagaaggaaaccttatcataaaggtgtgggggaagagcaactataaaaaccctcagacgaaagatacactgccta

SEQ ID NO: 2315 - DNA, 1000 bp, mus musculus
tccatccattagctgactgtgagcatggatgatattcttatagtagaaaaaaacccaaaggatttaactgaattaattctgaaaaatatgattgaggtattgatccagcatggactaattgtcgcccctcataaaattcaacataccaagccaacaaattatttgggggaaaacaattcatagtgaatatattatatctcaaaaattacaatttaggattgataaattaaagacaataattttcaaaaactgttgggaaatattaactggattacgcctttttaaaaagataaacaaatgtatttaatagtaataaagaatacattctgtgcatcaaataacacacctcctggtcaaatgtagcccataaaccttgctttagtgacccatagactggccagcatgcaaggtcccttcctgctgtgagacaggttgtctctgccagtatcctgtgcactgtttgtttgtaagggatgcaaggcagcttcataagtattccaaagtggttctcacacacagatgtgagctgtgtcttcaagaaaaatcctgacttgctgagggcaggcaccaggtccctggttctcactgggactgatcccccagcacaaggcgaagcccctctgagtaagggctccttgtagctgggggcagaaagccaggcagaatgactgtccccagtcagtgtcttgggagagctgggaaattttatcactaggaggcctgagctctgcatcttgggaaagcagcttccatcactccaggtgttccagggatctgaggggagagaatcaaggttaatgactttcacttacagaggtgtgccaggcttataaatgaggtctccctttcccctttgggagcctgtctgctgcagggcagatgtggttgcttatgcaagaggctacatgcttccttcaaattatctccattgaacaggtaggtctctgggtgtcctccctgtggagactccatcctgtcaaaactgtgttctggagctgat

SEQ ID NO: 2316 - DNA, 1400 bp, mus musculus
gtttagtttttgagcactgcttatgtcagactagctggtttatgagcttctagaactatatatacatataacaaataaaacattttacatgaacttccttctctaaagacattgagttcatccccatcgtgttatggttccaaaccctagaattatagaattacgttgtcataatcatcttgtaagctatataataatgcttgctttaaccctttacttttcagttttgatgaagcaagaacaaagagaagacacagatttgccttcagttccatctttgcctgtgcctcattctgcccaggcccagaggccctcctcagagacagggcacccccatgaccgtgcgatgtcagcaccgggaagcctgctttgtcaagtgcagccagcatatacatctatggtagcctccacccatttgccacagttgcagtgtagggatgaaggtgctggtaaagagcagcacatagcaacatcttcagtcatgcaccagcctttccaagttacaccaacatctcctatagggtcttcctatcagtctatacaaactagtatgtataacggtccaacctgtcttcctgtgaatcctgcctctagtcaagaatttgacccagttttgtttcagcaagatgcagctctttctagtttagtaaatcttggctgtcaaccactgtcaccaataccatttcattcttcaaattcagatgcgacaggacatctcttagcacattcacctcattctgtgcaaaccccacctcatctgcagtcaatgggataccattgttcaaatgcaggacaaacagctctttcttctccagtggcagaccagatcacaggtcagccttcttctcatttacagcctattacatattgtccttcacacccaggatctgctacagcagcttccccagcagcctctcatcctctggctagttcaccgatttctgggccatcatcccctcagctgcagcctatgccttatcaatctcctagctcaggaactgcctcatcaccatctccaactaccagaatgcattctggacagcactcaactcaagcacaaagtacaggccaaggaggcctttctgttccttcatccttagtatgtcacagtttgtgtgacccagcgtcatttccgcctggtggtgcaactgtgagcattaaacctgaacctgaagatcaagaacctaactttgcaaccattggtctacaggatatcaccttagatgatggtaagtcccagctcctccccacctcgccctacttaccctaccttgtgaatgtgtgtgtttatgtattttgagttaggctggccttgaacttactgtatagtggagagtgaccttaaatttctgattctcccaagtgttaagatgacaggtatgtacctccagacccagata

SEQ ID NO: 2317 - DNA, 1200 bp, mus musculus
gccagattatagttcctatgattttttttttttcctatacaattttcttctttatcatcattctgacactgtggccaaatacttgagataacttaacagagttaaaaggtttcttttgacccatggtttcagaggtccattatccctttgtctatcgttttatccaaatgctggagcaaagccactcatctcttggtagccaggaaacatggaggtaagggaagccaggcgcaaaatatcctctcccgagacacgattccatgatttccaccctccagctacactccaccctctaatggtttcacccgactcgacagccccaccttccgaaaactgaatcgtcgacacagaaatcctttgaggacattccaggcacaaaccataatagctctgttcccagtatcccatgttgccatcttttgggttctatttggttaccatggacatatctgtacttctccctggatttaaatgccactactttatatgtgtgcttttgccatatgtggattttattttattttttttattattattaatctcatctctcaagagttttcctatggttttccgaaacgctcttgttggagccggacacaccctcagcctgaagctcagctacagccgtgagatgttcccttcaagcatcctgggtgtttccttttcctcttgggcgtgctaaaggccctgtttcccacctcccactcccgtgattcacacctactagcgagcactatttatgctactctgcacataagccaaacgaagacgcggggcatttttttgtaaattagtctcaagtaacgtttttttttttttttttttttttttggtacaactgacacagaaaggcctcaagtccagaatccatctaacactgaggcaaggttctggttacttgctgggtggtcaccgtagaaccctaacggccctggccaaggagatgtctcagcctggagcacctccagggagcatctccaggtgctccatgccttatgtgggctttgctcgtgtccagttcatccatggcaggattcttatcttaaagcatttttttttttttagcccctgactcaccatccctcatggcagtttcttatttctgggattagctggtttaaaaaaaaaaattgcttctgggcatgtgactattctcagaactttaatgtcagaaataatgatcctgttaaattggagctc

SEQ ID NO: 2318 - DNA, 1000 bp, mus musculus
ggtccaaatggcaacaacaatcacctggcacatttgccagaagcccagccaatggaaaactgatttttcccaaccacgtcttcccactatcaccctgcaacagcgaggcagcttctggagacaggcaagaggactagcagctactagcaggaggcacgttgtggaattgctttaaatagatgggatgacttggagccagcacaaagactccaatgcaaaggatatatgttggctttcactgtttgggtctggtgtggatttggtttgggttttctttttcctcagtgtgtggcacagctgtgtaagccggcatgccatgactctctcctgaatcttgtcctcttgtgcccacaacaatattcccagactcggctttggaactccagcgggttcccatgttcccatcgggagcttcccaagtcatgggtgtttcctccgaattgcagacttgatttgccttgattattattattttttggctctggtccaagatgtcttcctgtcatcctctcactgtctttttccagtaatcccctttttaaatatcaccaacaattagtcgatttatctccatcagcaaggaccactgcccaccccccatttccacatccccatgcagacatacactcggctgagcgagcccccatccctgtcttgttttgccttgaagtataagaaatcacagctcctcattagctggagagcacgtttggaacggctttgtgtttactcacttagtaagtgatgctggcctttttaattatcctccttccgcatgccatttagagcagcaagctgttcaaatcaaaccgaacgggtgcgcatcgtcggcaaggcggttggaaaggactgggttgcttttttttttttttttttccttcctcttcttttacctcactgctgctgcgtccttccttgtctgtcagcaagccaaggaatccccccaccaaaagctcttacgtaggaagacaccaaaaccgtgagtcacttttcactccca

SEQ ID NO: 2319 - DNA, 1000 bp, mus musculus
aggaagaaactgaaataaaaatcaaatgaaaattaagacaaccagaaactgcaacacaacagaggcagttttaaagtttatagcttctagcacctacattaaaaacagctaaaaagatattctgcaacccagtgatacacttcaaattcatagccaagccccaaattagtagatgtaggcatatagttttcttaacctactttaaaagggttcaaccttctctctagctcccaccataggtagtagaaaagaaaagttattagcataccggggttccaatcttcactgtccatactccagtccactagcaaacaccaaacataaatcagcagctgcagtgcagtccactttgcagacaccacacgggaaccagcagctgcagttcaatccagaaaaaactgtgatgccaactggcctgtctgcagaagttgcaagaagccccaggaacctcaggagaagttctttagggcatttctctcagtgatgtcaccacaagtgaagcttagcaatacaatgcaaggcgaaccaatacatgcctgtcgtcagcaaacctagcaaggcagagcaatgcaaaccaatgcttgaactcctcctgtctgtggggtcatgtttatatcccctctaggcatcatgcatcctttcacatgtctgatatagcaaaacatccttttctttcacctgtatgcccagcaaaacatcatttgacatagctgacttgccaaagaaaccagaagttttcacttcaaggagctgtaaagcaataatcaagatcacaatggaaatgaatgtaatgaaaactgtaaaacaatgcagagaatactaccaagtgttaaagaaacaagattgccaaacccttagctgaactaaccaaaggggcagggggtggggtggggagagaggatctgaattaataaaattagacataaaatggagatatgactgttatcactgaaatgtgataaatcacgaggaagatttttgaaaataaaaaaaaaaacta

SEQ ID NO: 2320 - DNA, 1200 bp, mus musculus
aaataagtgtgtaaggttagacacggctcaccgacagagaaattttgtggtatttttgaggacccccagcagcaaggcaggaaaaagaagcaaatcagagtagaatgtgtgatgtacatttctgagagctagtgttcctcaacaggtttgttccgcagcttccaactgctcttcttgtgctactcaatgccccgttattatcaggtcacaaggtttcctcttcctggctgtgctttaagtcctgaaggacacagaggaatgtgtttacatttgcagtattttctttgcaggtgggaccgccaccaggcagagaggcttcctagggtgcatcaggtccctgcagttgaatgggatggccctggatctggaagaaagagccacagtaacccctggggtgcagccaggttgcagaggacactgtgggagctatggaaagttatgtcgccatggagggaagtgcagggaaaagcccagcggcttcttctgtgattgctcttcctctgcctatgcaggaccattctgctccaaaggtaggtgtgagccaaacctgtatccccgtgagtaagacacttggcaggccttgtgtgtgattgcatggacaagcacaagtgcgagcatgcgcgtgcatgtgtgtgtgtgtgtgtgtgcatgtgcgtgtgcgtgcatgcgtgagtgcatgcgtgcgtgcctgcgtgcgtgcgtgcgtgcctgcgtgcctgcgtgcgtgcatgtgtgcgtgcgtgcgtgcgtgcgtgcgtgcgtgcgtgtgtgtgtgtgtgtgtgtgtgtgtgtgtgtgtgtgtgtgtatgtctgctgtgtagctgtttgaaacaaaagtagctacatttaaaatattcttttgaaaagtggttattgtatgccaatcatattttaattcttgggtctttgaactcaattcaggaaaaaatgcttgtctattgctgaataggcacaaatggtagtctttagatgtcgtcaatgttatccatcaatctacttttactctgtctgctactaatgtgtttaaagaatagagctgtcaacaacctatcctatggggcagccctttgtttaaaaaagtcattccagggtgtattgttatttttgttgaacaggttcagcattgcaaaggactgtagaaaaatgtatgtacttttatatcattcaaattaatattttctaataactgccgatgcaaaa

SEQ ID NO: 2321 - DNA, 1000 bp, mus musculus
acatgtaatggtgaacaaagccctagaaactaagcattagatcaagttaaaatggcactttgagcatcagtagcaatcataactctaaacaagctgacaaacacaaatagaagcatttcgtttggaatcttagtgaagggctagaggaggaataggtagaccagaagtcctatgctccagtggatgggctggaagttttatcaatggcttgagatggcacaatctacaaggatcctttcctgtccctttcctgggacagaaaaaaaatgcttccaaattaaccaggagaatggacagggtagaagcctgttgtctgcctggatgccacaggtcaatataaactaataaaagagacaaaactaacataaatgaggctgacagaagttctgatggacagaaacagttgatcactacagacacagagaggacgatggcctcaaatggagatgagtagtgtatgttaagcagttcactgtcaacagaaggatccatctgctatgcacatcaattattagctgggctaacgacttcacacttgggtaaagcagagtcaaattttgatcatatttatgcagcaaacttagggagaatatgccaaatgctgttcccaaatcttcattcacataaaaatcactttcaaaaacaaacagagagacttaactgtatataaacaaatcagtaataagttttgagtagttatttttgataagcttatatgcataatgttatttgaataggaatggctaccatagagtcatgcatttgaatgattgaactatagggagtgtcactattagaaagtgtggccttggagtagttgtggccttgttggagtagttgtggccttgttggaatagttgtggccttgctggaaaaagtatgtcacttaagggcagactttgaggtctcagaagttcaaatcagttgccttctgctgcctgcagatcaagatgtagaactctcagctcttttccatcctcatgtctgccatgtttctccc

SEQ ID NO: 2322 - DNA, 1000 bp, mus musculus
cagccaagctccctgccagacccgagcaagcaaaacttctgagattcataaacttgtggtttggggcccgagtgccattgaagctgggcctccgtggggagagggtgacacagacagtccttctcttgggtgacctctttcaaccaaagtggggggcctctggcaggactgcaggaggagcaggtggggcccgggacacagcctaagatgatttcctgcatctctgggtctagtttccaagaaatggacactccttgcggctcctaattgagtcagcttggaggaggaggctctgcttctccaagacaatgcctttgactggggagtgtgctgtgcgctcggggtaactgaatctgatgctcatcttctgccaacggagcctttatgacagtgccatagcatgcggctggggccaggttctctgggtctctgtctcccctgtgatcacctgcagaaaggcggctggcaggtggagagaagccagctagggaaacagccgcctctgacctcaaatggtgagcacagcttggagatctatctagcttggagcttgtctctttgcaaagaccctaagtagtcacctggctcagaacatcttgaaaatgaactccagggaagggaaactgctagctcagaactaaggaaatggtccctgtgaggcccacatgcgactctggtaagaggcatgattaggtcctgcttgtgtgcactcctgctgagaccacccaggacggccaccttgctcaatgcagacacaaactctctagactctaaacagctgtccagaagtgactgtcagaagtcatctccccctgccttagaggatctcactcaaagtcagcatctggggggtgtggaggggggctgcacatgctctgtgagcagcagatgcccagagctagctgtggtcagcagacagttacctaggatcaagcctgtggtcgaggctgtggggggtgggcagctggctgaggcttgatctcttgcctggacataagaa

SEQ ID NO: 2323 - DNA, 1400 bp, mus musculus
ccacagtgaggaatgtgtccacaattgtcccttgccgctctgggtcactggggggctgtttctcacggttctgctccgcccttgttttcgtccaggatggtgaacgtaggcagctggctcgagatagtgggtgcagacctggtgaaaacacagaaaggtacagtcaagaattcagtaagatgggggactgagtctccaccttgtggctctgccagtctcagttgcgtggtttctgggtgcacataggcctgggtgtctgccactgcactgtttataggatatgcagggacttttctgatgtccctaggagtcactgggctttttttttttttccctctcattgttttttgagacagggtcttgctatccagctttggtggcctggagcttactacaaagactggactggcctcaaaatcagagatccagaaatgctgaaattaaggccatgcaccactatgtctggctcaagtcttgagactgtctgccctatcccccacattgacaggccactaccaaatccctgacttcctaagtagcttaatatatcttgcggccctgtaaggctgacagtgtctgtcccatcatgagacctcagctgctgtccagggtgcaggcagtatggggctaggataacagttgggctggagttgggcttccactctgcctgcctggccacagatgtcacgggccatctcctgactcagcatacacatgcaggctggaggggaaggcagagctaacaaggggtgtcaccagataaggttagactccattctgcaggagagctgggccgggaacccacgagagggagccggggtccaccttcatgctgctgtcttatctcagagcccacagctccctggatacatggagtccactccaccaacctccagaagcacgtgagctggcagagtcctcactgggactggtggtgcctttcataagaatgttgatttcctagcaattgggaggcagaggcaggcagatctgaatttcaggccaacctggtctacagagcgagttccaggccagcccgactgcatggtaagaccgtgtctcagaagagaaaggaactgtgactttcttcgggcccttggcatacggtataggccctaatcccggtcatgtgcgcctgtcttgacttggggctggggcttagctcctttgcttttcctaccgtgtagcacaaagtgggggtctgaagatccatcactgatggaagaccaggtgtggggactctgatcccagcacttgggaggcagagacagttggatctccgagtttgaggccactttggtctataaagagaagtcaaccaggggctacatactgagatttttttttagacagaatttcactgtgtagccttggctatcctgaaactcactctatagtac

SEQ ID NO: 2324 - DNA, 1400 bp, mus musculus; identical to SEQ ID NO: 2323

SEQ ID NO: 2325 - DNA, 1400 bp, mus musculus
ggactctgggtgttcccgaatgctggccccctctgccccccactctcagcttgccctggctcttgttcctcttcacagtctgttctctctctgccctgctgaggccttcctgttcctctaggagttgctcatgacttcaggccagccagcagagtcctctgaactgcactgtggccatgctctatccagtggttctcaatcggtgggtcgggactccctctggttggggtcaaacaatcccttcacggaggttgcctaagaccattgggaaagacatttacattacagttcataacagtagcaaaatcacagttatggggtagcaatgaaatatttgtatggttgggggaggggcaccacagcacgaggacatgcattaaagggttgtagcattaggtctattcatttagaacctcagcctcatacctacactaacattgaggttgtgggaaatcctggccttgaaccaacactaacctgttcctttaaagcctggatgcctttgtctctctccccgagtggagaagccatcaagcctcagctgtcagccttagaggctgtctgtcatctgtaccactgatgcctatccacagctgaccaacatcaggaagcgtttatctatgggccagggccccgaaacacagccctccatggtgcctgccacatgcccctggcaatggtgcccaaaaattgggtccccctgccctccagtcaccacatccagccttccggtctcttgcacacagcctctccttgtggactctttcagaactggatctgtgtgtgtggtccctgaaaatacgcatctgtttcccagtcagggagccagttctctgcatttggccctacagaccatggtgaaccctgagtttcctcttgtcctgctaatgtggaagtgtaagacctgatgcagggcagaggggtacagagaagtcagagcttcctcagcttctagaaagcctgtggctgagtccatagctcatacagggcccatctcagtagcaaagcccaggctactttatgggctgtgggcagagtcaccctccttcttgtcaaacacagctgcgttttggggaaagggaacacaaagccaatatgacatcagagggggtggcacttagattcaccctcaggtggctcagggcagaggatgtggggtgggggtggggtgcaggaggagaaagaagcctagtgtgggaggggacatagcagacttctgctcaggagaggacagcagataaagatggcactgtgccatactgaacagagaggacaacacagccaccctgttctgctgcctcactgtcagccctgatcatggtgggtggggtcagttaatggttagactctaaggcttctggagctgagggcggtacaagaagttgtgcagtgcttgtgtg

SEQ ID NO: 2326 - DNA, 1000 bp, mus musculus
cagaaatccacctgcctctgcctcccgagtgctgggattaaaggcgtgcgccatcatgcccagcaatgtgaacttttaaaatagaaaagtttaatctcataaaccagacatcttcccagctttctatctcatggctactgtggtttcagtagaattaagcacccaagaacataatcctctggctctcttcctcttcctcttccctcctccctctctcctcttcccttttcttccctctcttccttcttttccctgccttccttttctctgttgaatgtgtgcacgcagcagtgagctttatggcagccttgggttttgctgtgaggaagggataatggcagcctgcttatttcagaggtctttcgggaaaaagccgccatctctccactcctactttgttttctgttggtgcgataaaagactgagcaaatccaactctctctctctctctctctctctctctctctctctctctctctctctctctgtgtgtgtgtgtgtgtgtgtgtgtatacttataacttcatcttacactttctagtccctcattggcagaggtcagggtgggacccccaggcaaaacctggaagcaggaactgaagcagagactgtgcaggaatgagcctcactggcttacttcccattccttacaagaccctggagtggcaccacctacaacaggctgggcctccccacatcaatcatcagtcaagtgagtatccaacagccttgtctgcaggccagtctgatagaggctccctctccccaggtgtctctagttgtatccatttgacaaacaggcaagcagcacattcccctcactgagggttttatgaactctgtgagccttggcttcttcaatgccgttcaagctgtcaccctagtctcaggctcccaggggagaagtgtcaccccagattagcaggttgcctgtctctcacactcaaaggctcacttgatcttgacccagatgtgggcactgagtgttgagtgattagtg

SEQ ID NO: 2327 - DNA, 1200 bp, mus musculus
gaccattgtgtctttaagaccgatggactgccaaagatgcagaggagctcagagtctcagtgaggctctggaagggaacccgaggctctgtaaagccgagtccctcgggaggtccactgaagaagcagatgtgaaagcagactggtttttccaattaggaaagtggcatggagctctcagaaggctgagtgagaaaccagagggataagacttcaataactagttgtctgtgaaccaagtcaatgctgcagtacagatttgaatcaagtaccccacaggcagtatccagacagggagcgacatggttgcccactgcaccctgagctagctgtgagctcagggtccttcttcatcttccttgggagggaggaggatgcctcttctgtggggtagctgccaccttcaaggtgctctgtcctgagccccaagtcctcaggcatcttgtaaaagagcaatccgatgtcctgtttgctcctccccctcgccttcagaactgtctgaagcctgactattggctgagcaatccgatgccctgtctgtttgctcctccacctggcctgactattggctccttggcctctgtccatccctcaggcagtcaatagcttttcagggccactgccctgttggctctctcatgtgcattgtctatttccttggcttgctgtttcagctgatattcacctgtgaacccttgaataattaattaacttacaggctcctggaggggtgggcgcccttgcagtcagaggcacagtgactcatgcttgctcacagaaatggctaagccatctgacctgccaaggtcacttggctaccagaaggatgggacaatctaacaagagctctgcttgctctctaggtactcaagtcacttctatagggaccataagacatagagggacatggcctgttccgtgctaaggcctggcctggaatgacttccccattctcctccactttctgttaggctccacactgacccttgaaggcagtgcacgaagacacatctgctgtgacgctcggtcgtgttaattggagctgctctgtgtcctgccacagttactctggtcaacctccacgtctgcagagcgaaagcacattgtgccatggacatagtactcagccatattgctagagcagctggcctttctctaactgatatacccacaatggacatctcaggggtcatctctcatg

SEQ ID NO: 2328 - DNA, 1200 bp, mus musculus
cacatagtagtacttcatctttctcccattccttaaagtaaataatattgtctctgatttaccagtgaggtaactgaggctcaggagggccagttctcctagttcatatagtttatacgccgagtctcacctcaagtccttggcctgtacttcagcagctgtctcccatcccacacatcaaagactcgatgatttggggaagggagaggtaaaggctgaagaaggctaaccctgggtgggtgagcaagatctttgtgggagggaaaggcctcctgtgccagcttgctctcaggtccctgctgacctgcctgcctgactctagggtctgtcagggggcaggtgccagcttgctacacagaacacagagtagaatgctctctggggactaccaagggcacctgtctctgtcacttgctctgttctttacaaggctgggacaatgccactgtcatctctggctgagagcaggccaccacccagagaaggacaaaggccactgtagaaacatgtgtcctagctgatctctgacgtcaatgtacccttctcgcccatgaagtcactggacttctccaggtttggaatttatcaggcttatggtgaaatgtaaaaattgggctttcctcctacttaaatactcctttctaccaggcatgctagatcacacttgccatggagagataggagctgaggcagggggatcacaagtttgagccatcctgggctacataagaagaccctgcctgaaaataactcaagaagcacacacagctctgagctccttctatttcttagcctctctgttttcaatctctcagcctcacagagacaagataccatctctggtgtgttagctgcagagctcccatgaatggtacaacgggcatcataggagacagattgaactgaagctaagataacttcagcatctgaaaggggaaaaaaaataagcactttctggagccccttgcccagaggcaggtccacagtcacaaaacctccagagacagaagactcacagcctgcctccattgccaggctcactgaaaggacagcgactccttctgcaatcccttgtcttagtcactcacagaactcatgatgtttcaaagaagttcacagagctggggaggtagctcagttggcagagtgctgaccaagcattcacaaagctctgggttcaatcctcatgatggtgggtgg

SEQ ID NO: 2329 - DNA, 1000 bp, mus musculus
acagaacagaaatcggagtacagctgaaaggactatttttgatcacagataatccactgtgttgggagttacacatttagtgatttaccaccacaacaaagtgatggcaatgtaatgcacagggccatgccttacgatttcttaactggtgctttttccagtcagcagaagcttatgtgcaactttccatcatcatggatagttttgacaataatatgacctttaagcatatattaaaacccattgaacgctgtaggcaatctattttgtgaggtggaaacataacttttttttccagtgtcagatcactgaccatagtcatcataactcttacatatagcccttattgtttaattcatccaagtgtatttcagtggtctttttatgatatatagctctaaatataataaggttgttgatggaaattaatagtaggcagtaccaaggaacaaatgcctcttatatatcatcttagtatggagatttagcacctcagtgagagagaaagataccaattgaaacaagtattggaattaagactgtgtcttttgcatttaatttttagtaatttgtactttttcttatatttagatatgagtatctaggtgcagtcaaacaaacaaacctaaaatgaataatcaaaagaacttgcacttccaatgaggcagttaaaatatcaactgggtagtctatcatgcctaaatctttttgtgtaaacattagttgcagcaggacacataatggaagttgaaaatgtttccagatcctgacacagagtgttgaccttgcttgggagagcttagctgcactgtacacatctttattagtgtgcattcagtgtaaagagtgaagggattcatagcaggatttctttgttcaagtacacatgtacttagattatattcacttcccatgattctcttctgttccctttcccctgtcctcttccttttcccatagtataaagaagactgctagctagtgaaagaactgctgggca

SEQ ID NO: 2330 - DNA, 1000 bp, mus musculus
gcccttcacttggaagggggaatggaatggtgatggaaggcagatggggggaggtatgtgggtgggagtaagggtgggtcagtgtctgatgtagggaggggcagggggatggccagatggctaggagaatgaatgggaatctgcaactgatggggtcgtgggaggtagtgagcatctccatgaagaactgggataggggaggcacctgagaatcaatgggagtgcccatagctgtgactcacatcactgggaataaagagcttgtggatgctgtccccagtggagcaatagggataccaatccatccataaaacttttgaatagaaacttatcctgtctacaagaaatgcagggacaggagatggaacaaagactgagggaatggccaatcaataactagcccaactgagagccaacctatgggcaagcactaatacctgacactctgttatgatattttgtttatgcttgcagacagaagtctagcatggctgtcctctgagagtaatgacccaccaactgactaaggcagaggcacacatacccacagccaaacagtggatggaagaataggaggaaggacagaaagaccatcagaatcaactaatctggatccttgggttctcagagtctgaaacactaaccaaagaacatatacaggttggacctaaggcctccctgaacatatgtaacagatgtgcaagttggtcttcatatggatcttgaacaacttgaggggggacagctattccaaaagctgttgcctgtctgtgggatatgttcttctagctggcctgccttgtctggcttcagtgcctagcctagcagtgacttaaagtgccaaaggggaggaggaggaaggatgtaggaaggattgtgggattgggtgaccaagagggggcagtgagagggatgtaaagtgaaaaagcttaaaagaaaaataaaaaagaacaacaacaagaaaccccagagatctaaaattaattataatacaattcaa

SEQ ID NO: 2331 - DNA, 1000 bp, mus musculus
agaaactgctagtatattatcatttggtgtagtgctaacagcacaaccctgagagtgagacagcctgctccaaacctgtaattatgtggcctagagccaccttttgtgcctctctcagctccaggttctttatctgttaaaacttacatatactaatgcctttatcataaagtagttacaggtctcccaggagttactagaaaaataccttgtgatctgtgccctgaagctaaggttgtcccatagccctctgtacctaaatcctgcctgaagaaagctagtctcccaagagtgttatcactcctaagttgccaggtgagactaccacttttgttccactaactgtccaaagaggaacccaccaggagcccacagggcacaggaacctcaaaacatccagggacaggatctcttcagtttccatcaatgccccagagctagccctgtggcacagatctccacaaccagagagaactggtcacccaggggtactgacacacctaagatcacagctctctgcaccccactaccaccaggagagagctagtctcccagtagtgctaacagacctaagattatgggcacacaggcccacaggagggacaaactacagttagagacaccaagaaaactaacaccagagataaccaggtggcaagaggcaagcacaagaacctaagcaatagaaaccaaagctacttggcatcatcagaacccagttctcccaccatagcaagtcctggataacccacactggaaaagccagacttggatttaaaattgcatatcatgatgatgatagaggactttaagacagtcataaataactcccttaaagaattacaggagaatacaaccaaacaggtgaaggaattgatgaagaccatccaggatctaaaaatggtaatagacacaataaagaaatcacaaagggagacaacgctggagataaaaagcttaggaaagagatcaggagggagggtgggatagggggtttctg

SEQ ID NO: 2332 - DNA, 1000 bp, mus musculus
taataaatgaatatgagccaaaaaaattacagagtacccaagatacagtccacagaactcaaaaagatcaataagctgaagtggccaagtgaggacacctcagtcccacttgggagagtgaagaaagcaatcacaagtggagagggagggagggacctgggagggaaagtggatgtcacagagtagtggggggtagaggggaacctgatctggtattgggtgagggaaaaggactgaagccctgagggtcagtagaaagaatggaaacaggcaacctcaggaaataggaggttgggggaatcctccagaatgcaccagagacctgggagataagagactctcaggaatcaaagggagggaccttggatgaaatgcccaacagtcaggagagggaaggtatagagccacctccagcaggaagacagggcatcaagtgagagatggtgttccatcccacagtcacatctctgacccataattgttcctgtctgaaagaataaaaggaatgaaaatggagaagagcctgaggaaaagaaggtccagcaacaggtccaaagtaggatccagctcaagaggaggtcccaaaacttgacactattactgaggctatggagtgctcacaaaaagggacctaacatgactgccttccgaaagacccaacaatcagctaaaagaagtcagatgcagatatttgcaccctaccaatggatagaagcagctgactcctgttgttgatttaggaaggctgaaaaaagctaaggagaagggcaatcctgtaggaggaccagcagtctcaattattctggacccccgagatctctcaaaccctgggccaccaaataggcagcatccaccagctgatctgaggcccccaacacacatacagtagaggacttccgtgtctgtgttcattcagagatgatgtacctaatcctcaagagactggaggccccagggaggttagaggtcaggtaggcggtgggggcatccaggtggagac

SEQ ID NO: 2333 - DNA, 1800 bp, mus musculus
tttgcaaaataggatatctgataatttatgtactttaaagtttctggttcaattcagttaaaacattaaaagcaaattgactacagtcataaaattgatacaatatattcatacttatatattttcttagagaaatgtgttagcatgtttgatggtttgtatgtgcttggcccaggagtggcactgttaggaggtgtagccgtgttggagtaagtgtggccttgttggggtagagtatcaatgtgggcatgggctttaatacccttgtcctagcttcctggaagtcagtcttctcctagcagccttcagatgaagatacagaactctcagatccactttcactgcctgtctgaatgctgccatgctcctccattgatgatattgaaccacaaaacctgtaagccagttccaattaagtattttccttaaaagagttgtcttggtcatggcatcagttcacagcagtaaaaccccaagatattattatatgtttgtatattttttaaaccttcattaactcgctaagatgttccaaggtgtgatccataaatttcaatcaagtgtaaatgctttgaaaaatgtgaaaatttcttttttccccgttttattaatattgcttattagaaaaatttatagaataaattcctttaaatgaaaaggtaaaaatctcattattttgtttatatagccaaaaggttagtctgaaaatttaaaattgcatctccttttgatcttcctagctttggctcataagtgtacataagcctataaaagcattgtacttttctgtgcggcaatgggctacgcacagacaccctggtctccagtcaagcttaggtcttgaacccctgttcacctagtgggtggtaatttccacctacatgggatcatgcctcctggacccctggctcctgtccaagttaccacccccacagccctcacaggagaggcatgtgtctcagtcaagaaggggcaacaccaagccttcccacatgcaaataaggtttctccaaaactctcagtccaagccaatgagaggtacctgctggtgaaccctgaatcacccccaaaactgtatataaatccattcagggaattaaaggtgcacaagagctactccttcctctgagtctttttgttccgagagctttatgtatcacttgggaagagatctctcctgaagagccacctgaggtcctgctgcactcctcactggatattctcatcggcccagcccgacccaacttcagagcagctcggagttaccgagttcatctccctgcctgcacttgccccttcgctgctacccacgcaccagggcaccaggcctggacaaagatctccgtggaaaacctctggtacccaggcccacactttacaacatttctatcaaatcagtaattgctgtatagaaattcataaaacacctttaggagtcatgcattgataggacaatcttgtgtgatacaatttgaatatttcacagaaaatgaattaattttataaaaagtgaaactacttatttttattttgttgagaatttaaaagattactcatccaatcctttcaaactaatcaatatatgtgttcaaagcatatatgggagggtgggaaataatacaataaagatcagcttaaatccgttgtatttggctgcatgttgctatgttcaatggctaaaagctcagttgcaggcttttactttaaagatacagttgaacagtgagaaaaaacaccatcgattcttagttgataaagagatgatgcaattatttattcagttttagtgtacagtttgtc

SEQ ID NO: 2334 - DNA, 1200 bp, mus musculus
ctggtaaaacctcatggaatttccccatccagttgacaggactgttggtgttgtcactgtgcttgtcttggtaaggtaaacacagatctgtattttttgtgtgtagcttccctgtaataatataaggtactatctcacagcatacttgctgctcatttgtttcttataacctttccaaacttattttgttatgcttcctgagcctcgggtatagatgtcatgttacagatgcatcagttgggtctggagaatttagagataattatctgcagtttagtccagttgtgcctttccatacggtctccatctgttaaaaaatgaggcttctgtgacaagactaaagaagcctacctgaagatagaagagtaagtatttcaaatatgcttaaaatcatagctgttgaaaaaattggaaatgtgatctctgggacggtttgtataagcttgggccagggagtggcactattagagggtgtggtcttcttggagtaggtgtgtcactgtgggtatgagctttaatatactagtcatagctgcctggaagtcaatcttccactagcagccttcatatgaagatgtagaactctcagctctgtctgcaccatgcctgcctagatgttgccacgccctccacttgataacagactagaattccgacttggtgtgccagccccaattaaagttgtcctttataagacttgtcttggccatgctgtccacagcagtaaaaccctaactacatcatcctctatgatgtatgacttcatgaggcatgagtagtaagttgggtttacactatcaggcttagtatggagcatgtcttaagtctaatcacatagtatgtggttaccaccataattttagtgtctctgctacacacttaagtacattttgccatgcatgcagtcatgctggattgtaagctctgtagctgactaagaactattgattacttttctcccttggcaggttccatagcatcttagatatattagatatagtcctaaaagagctgatacaagcttcaattaaatacacttctggtgagccaccgaaatgctaaaaattctcattagcagtattttacatagcaggcattctgaattggttttttttttaaataatgttcattaaatagcaaattacggatgtttgttaatatatgttttcatagatttaataattataatgataataaaag

SEQ ID NO: 2335 - DNA, 1400 bp, mus musculus
ttgtcaactgcatgtttctcattttccatgattttcagttttcttgccatattccatgtcctactgtggacatttctaaattttccaactttttcagttttcctcgccatatttcatgtcctaaagtgtgtatttctcattttcagtgattttctgttttctcgccatattccaggtcctacagtgtgcatttctaatttttcacgtttttcagtgatttcgtcatttttcaagttgtcaagtggatgtttctcattttccatgattttcagttttcttgccatattccatgtcctacagtggacatttctaaattttccaactttttccattttcctcaccatatttcacgtcctaaagtgagtttttctcattttttgtgattttcagttttctcgacatattccaggtcctacagtgtgcatttctaattttttcttttttcagtgatttcgtcatttttcaagtggtcaagtgcatgtttctcattttccatgattttcagttttcttgccatattccatgtcctacaatggacatttctaaattttccaactttttcagttttcctcgccatatttcacgtcctaaagtgtgtatttctcattttccgtgattttcagttttctcgccatattccaggtcctacagtgtgcatttctcatttttcacgtttttcagtgatttcgtcatttttcaagttgtcaactgcatgtttctcattttccatgattttcagttttcttgccatattccatgtcttacagtggacatttttaaatttttcacatttttttaagttttcctccccatatttcacgttttaaagtgtgcatttctcattttcggtgattttcagttttctcgccagattccatgtcttacagtgtgcatttctcattttttcacgtttttcagtgatttcgtcatttttcaagtcgtcaagtggatgtttctcattttccatgattttcagttttcttgccatattccatgtcctacagtggaaatttctaaattttccacctttttcagttttccttgccatatttcaggtcctaaagtgtgtatttctcattttctgtgattttcagttttctcgccatattccaggtcctacagttgacatttctaaaatttccacattttttaagttttcctcgccatatttcacttcctaaagtgtgtatttctcattttccgtgattttcagttttctcgccatattccagatcctacagtgtacatttttcatttttcacgtttttcagtgattttgtcattttttagttgtcaactgcctgtttctcattttccatgattttcagttttcttgctatattccatgtcctacagtggaaatttctaaattttccacctttttcagttttcctcgccat

SEQ ID NO: 2336 - DNA, 1000 bp, mus musculus
ccattttcctcaccatatttcacgtcctaaagtgtgtttttctcattttttgtgattttcagttttctcgacatattccaggtcctacagtgtgcatttctaattttttcttttttcagtgatttcgtcatttttcaagttgtcaactgcatgtttctcattttccatgattttcagttttcttgccatattccatgtcttacagtggacatttttaaatttttcacatttttttaagttttcctccccatatttcacgttttaaagtgtgcatttctcattttcggtgattttcagttttctcgccagattccaggtcttacagtgtgcatttctcattttttcacgtttttcagtgatttcgtcatttttcaagtcgtcaagtggatgtttctcattttccatgattttcagttttcttgccatattccatgtcctacagtggaaatttctaaattttccacctttttcagttttccttgccatatttcaggtcctaaagtgtgtatttctcattttctgtgattttcagttttctcgccatattccaggtcctacagttgacatttctaaaatttccacattttttaagttttcctcgccatatttcacttcctaaagtgtgtatttctcattttccgtgattttcagttttctcgccatattccagatcctacagtgtgcatttttcatttttcacgtttttcagtgattttgtcattttttagttgtcaactgtctgtttctcattttccatgattttcagttttcttgccatattccatgtcctacactggacatttctaaattttccacctttttctgttttcctcgccatatttcacgtcctaaagtgtgtatttctcattttccgtgattttcagttttcttgccatattccaggtcctacagtgtgcatttctcatttttcacgtttttcagtgattttgtcatttttcaagttgtcaactgcatgtttctcattttccatgattttcag

SEQ ID NO: 2337 - DNA, 1000 bp, mus musculus
tttttcaagtcgtcaagtggatgtttctcattttccatgattttcagttttctcgccatattccaggtcctacagttgacatttctaaattttccacattttttaagtttcctcgcgatatttcacatcctaaagtgtgtatttctcattttccgtgattttcagttttcttgccatattccaggtcctacagggtgcatttctcatttttcacgtttttcagtgatttcatcaatttcaagtcgtcaactgtatgtttctcattttcaatgattttcatttttcttgccatattccatgtcctacagtggacatttctaaatttttcacctttttcagttttccttgccatatttcatgtcctaaagtgtgtatttctcattttcagtgattttcagttttctcgccatattccaggtcctacagtgtgcatttctcattttttcaggtttttcagtgatttcgtcatttttcacgttgtcaagtggatgtttctcattttccatgattttcacttttcttgccatatttcatgtcctaaagtgtgtatttctcattttcagtgattttcagttttctcgccatattccaggtcctacagtgtgcatttctcatttttcacgtttttcagtgatttcgtcatttttcaagttgtcaagtggatgtttctcattttccatgattttcacttttcttgccatattccatgtcccacagtggacatttctaaattttccacctttttctgttttcctcgccatatttcatgtcctaaagtgtgtatttctcattttccgtgattttcagttttcttgctatattccaagtcctacagtgtgcatttctcatttttcacgtttttcagtgattttgtcatttttcaatttgtcaactgcatgtttctcattttccatgattttcagttttcttgccatattccatgttctacagtggaaatttctatattttccaactttttcagttttcctcgccatatttc

SEQ ID NO: 2338 - DNA, 1000 bp, mus musculus
catttttcacgtttttcagtgatttcgtcatttttcaagttgtcaagtggaagtttctcattttccatgattttcagctttctagccatattccaagtcctacagtggacatttcctaattttcgacctttatcagttttcctcgccatatttcacgtcccaaaatgtgtattccttattttccatgattttcagtttcctcgccatattccaggtcctacagtgtgcatttatcatttttcacgtttttcagtgatttcgtcttttttcaagacgtcaagtggatgtttctcatttttcatgattttcagttttcttgccatattccatgtcctacagtggacatttctaaattttccacctttttctgttttcctcgccatatttcacgtcctaaagtgtgtatttctcattttccgtgattttcagttttcttgccatattcctggtcctacagtgtgcatttctcatttttcacgtttttcagtgattttgtcatttttcaagttgtcaagtggatgtttctcattttccttgattttcacttttcttgccatattccatgtcctacagtggacatttctatattttccacctttttccgttttccttgccatatttcacgtcctaaagtgtgtatttctcattttccgtgattttcaggtttctcgccatattccaggtcctacagtgtgcatttctcatttttcacgtttttcagtgattttgtcatttttcaagttgtcaagtggatgtttctcattttccttgattttcacttttcttgccatattccatgtcctacagtggacatttctaaattttccacctttttcagttttcctcgccatatttcatgtcctaaagtgtgtatttctcattttcagtgattttcagttttcttgccatattccaggtcctacagtgtgcatttctcatttttcacgtttttcagtgattttgtcatttttcaagttgtcaactgcatgtttctcatttt

SEQ ID NO: 2339 - DNA, 1000 bp, mus musculus
ttttcctttttttgtcttttatttatttatttacactccagattttattccccacccttccaccttcccactgttccacatcccacacttcctccccacaaccctgtctccacgagtatccccccaaccctcacccagccagacctctagactccctggggccttcagtctcttgagggttaggtgcatcatctctgactgaacccagacctggcagccctctgctgtatatgtgttgaggacctcatataagctggcatatgctacctggttggtggttcagtgactgagagatctcaggggtcaagttaattgagactgctggtccttctacagggttgccctccttttccagcctttccctaattcaaccacaggagtcagcagcttctgaccattggttgggtgcaaatatctgcatcatcttttagctgattgttgggcattctggagtggggtcatactaggtccctttttgtgagtgttccatagcctcagtaatagtgtcaagccttgggaccgccccttgagctttattccactgtgggcctctccctggatcttcttttcctcaggctcctcaccatttccatccctgcagttcttttagacacgaacaaacatgggttagagttttgactgtgggatggcaataccccccttacttgaaccctgtattcctgctagaggtaggcactataagttccctctgggatgtcttaggatatggtgtcaactgctctgagtgcagcagattgtctagcatggctcaggatatggtgtcttcacaggagcagaccagctagcagtctgccccaggaaaaaggacagccagcagaaaggatcaggaggggcagaaaggagtggtggtggtggtggggctggtgggtgacgggtcctgcatccaccaggctcccagtgggcagctctgggactgggggcgggtgttcttaccaactccactgggtacatgagatcctctaggatgggtcacgatatg

SEQ ID NO: 2340 - DNA, 1200 bp, mus musculus
caataaaagactggtaatttgaatttatttaaattaatgactgtcaatagagatattagactaggcaggctgagaggaactttggagagtggcactacaatggaagctttttctattattattaaacaaataatatttattttaaaatatacaacttgatattgaaaatttttaagtcatcaaaatactttataacagttaaatgccccttaaatatacatatcttctgatgctaaaagtaatatgctttcaaccagttttttaaatctatttggaacactagacgtgatagaagtacaaaaaatgcccagcaccatcttcagagccattgccgtggagggccccagagaactctcccggagtcctgccaggactgggagatcactggcgagtggaatacaacatcagttccaaaaaacccagagggtcttgtgctagcaggaacagggacaaagaacgcctgctagaccagcagttggggttcggtctggaccgcgccagccctgtaccatcttcagtgcaatctcaactgagggctcaaaggtctccagaggactctcctcactacaggcaccatagcacaccagggatcttgaaatcattgccaggagacagagctgagacacagaccactgaacaccttccctgccaaaggagagtcagacaccagggagagggcgaacaccaggaatcaggaggggatctgagctccagacttctgtgcaccttcattgcaagaggagaacttgcctggagagaatgtattgaccacagggactcaggagagagttggtctcccaggagtgctgacagaggctaaagaatcacaggaggaacaagctccagccagagacaactacaaaatctaacaacagaaattaccagatagcaaaaggcaaacgaatgaatcttactaacagaaaccaagaacactggacatcatcagaacccagtacacccaccacagcaagtcccaacacatccgaaaagcaagatttggatctaaaatcatatctcaggatggtggtagaggattttaagaagggcattaataactcacttaaagaaatacaggagaacactgctaaacaggtagaagccattaaagaggaagcacaaaaattcctcaagcaattacaggaaaacactgctaaaaaggtagaagaccttaaagaggtaacacaaaaataccttagacaa

SEQ ID NO: 2341 - DNA, 1000 bp, mus musculus
caacaatgccttttctagacaccatgaattatcaaacaaaaaacccagtgctatcctgcctaccaactcccctgaaaacacccacaacactgataaactgcacaccatactctctgctccatttcctgcctactttccaagaagccttacctgtaccagtaataccaggtatgccccagcccaacctcttcctggcaactcccctgaaaacagaccaaacagcagcaaactgcaccccttaccctgcccccatttcgaaccatacaactctgccagttttcccaaggtatcctagcaccagggacaatgggtaagttccacccatactaagcccttgtctagccataaattacacccaatagcagtaagttgtaccacataatttgcactccatttcctgagctgtaactgcctgcattctcaggggcctgccagtaccagagacaaccagataagaacccaacccatgaccttgccttccatatttccctaaaacatacccatcatgcttaaaacatcatttttcactccacaaactgactgctgtcctgcaagtctgttgacaccagggaatgcaggcaagactgatactacaaaccccagaggcaatattagcacacagaacctcagagacctcacaagacaccaaactaagactagccaatcaccagaagacagaagcaaacaaacaaacaaacaaacaatcaaacaaacataaaacagaaaacaagaggaagaaattcccaaaacatccatacaacagaggcaaacttaaaaataagcatctaatactataataacagcaaaatctagatgcctaaagcagagtataaaaacacaatcaacaccagcacagcaatatggcattattatcagagcccacctatttcatcaaaacctggatattctaacatacttgaagtactagaaaacaaccttagatccaatctcacgaagatgatagtggcctttaaataaataaatcccttaaaaatacaag

SEQ ID NO: 2342 - DNA, 1200 bp, mus musculus
ttcccctttactgagacatagattcttcacaggaccaagggcctctcttcccattgatgaccgactaggccatcctctgctacatatattgctagagccacaagttccaccatgtgttttctttgatttgtggtatagttctaaggagctctgtcggtactggttagttcgtattgatgatcgttctatggggcttctgtacccttcagctccctgggtatttctctggctccagctggaataggattcttgcattcctgactctaccagagttctgcagaccccaatcatcccagactctgtttcattcttcctgccttggcctgcagagcacaggccacagaagcaacagagcttctggggcaaggtcctatgggcctacatctgcagccagcaggtggagctgatcctcagtcctctgtgcaccttccctgccagaggagaatttacctccagggagtgctcagaccacaggactaagaggagaccatcattttctctcaggtgtctctctaagatgggtccacacaggagagcacaggctgcggaggcagcagagtttctgggacagggccctatgggccaacatctgcagccaggaggtggacctaattatcagtcctctttatagcttgtctgccagagaagagtttgcctccagggagagctctgaccccaggacttaggtgagatcaccattttctctctggtgtctctctaaggcaggtccactcaggagtaaataggctggagaagcagcagagcagctgagacagggttctacaggcctccatatgcaaccaggaggtggggctgttcacaatccctctgtgcactggtcttaccaggagagagcagatctcccaggagtgctgacacaggctaatagactcacaggaggaacaagctccagccagagacagcaggaagatgtaataccatagattaccagatagtggaaggtaaacacaagagtcttaccaacagaaaccaagactacttggcatcatcagaacccagaagccctatcagagtgaggcctagataccccaacacaacggaaaagcaagatttggatttaaaatcatatctcatgatgctggtagaggattttaaggaggttaataaccctcttaaagcaacaagcatttgagataagttggcaggagccaagtgtaagaacagaagcaacagaagcca

SEQ ID NO: 2343 - DNA, 1400 bp, mus musculus
taaatttgggtatcttctctctcatctcttcctattattcataggtatgctgtcttcatcatgtcctgcatttcctgaaagttttgggttaggagcttcttgcacattgtattttctttgattgctttctcaatattgtctatggtatcttctacacctgagattctctcttctatctcttgtattctgttggtgatatttgcatctctaactcctgatctctttcctagattattcatctccaaggttgcctccctttttgatttctctattacttatttctatttccatttttagatcctagacagttttgttcagttccttcatctgtttggttgtgttttcctgtatttacttaagggattcatgtgtttcttctttaagagattctacatttatatctgggttctactgtgtttctttaaggtagttatttatgccctccttaaggtcctctatcatattcatgagatgggattttaggttgtagtctttcagggatgttagggtatcctgggcttgctgtggtgggagaacttggttctgaaggctccaagtgacaggggtttctgttgcatatgttcttgaacttgcctattgccatctggttatctccggtgttaattggccttgctgtttctgactggctcctgtctcacttgtgagcctgtaagcctgatggtgatggaccacttaggagtcaagctgtctctgggtacagaggtgtatctggagcactggctctgccctggagttgagttttgagtcagaagaatggtgtgtttccagcagggcagggaggatagagcctgcctccactgggccatgtgcaggtctaagttagaccaggtattggggcagagggtatttcacttctgatctggttcaaaaccttgttgtgtctgggtgtgggagggttttgggtaatcagatctgccccaggccatgttgtgacatcccctactccttgcccatctgttagaaaccctgattcccaaggattgaagggagctacctgagcccggtccatggcacttagacattaactctggtgataaatttaaattatgtatctcgactagggttacactcattcattctttctacctctccctctccctctttctttttcttttatcttacctctctcctgctctctcactctgactctctcttccattataatctttctaattaacagatgacaagagactggtgtcagaggattccatggtaataaagccacatcctcatatttccttcaaatgacactgaaaaattgtctcaggtgagagtaataaccttttgtggatatctcatactgaaatttaaatcctaacataaaagtccagagcaggaagggagagtttgtagcttccaggaacttagcttgtccttct

SEQ ID NO: 2344 - DNA, 1000 bp, mus musculus
ttattacctaagcagtgtaaatagctgtccaggaggtggaattgtccttatgatagagaacttgccaaggttttaacacatactaatactgtagtatgtaactgacccgtccagcaggtccagttattcgagggtctcgaggggacctcctcctaagaaccaaatggggagtagagagggacgagggccttgtgcgaataatgacacggagacgttctggaatgcatcaaagccccaaaatgtattagccaggcccaaggtttaaatacacaagcaaaaggggaagtgcctttcagcaggaggaatggggcagaggaaatgcacctcagcaggagggatggggcagcagaaagagaggaagtacttctcaacagaagggatggggcagcggaaatttttcttttggcgactacaaggggaagcaggaacttggtggtatcagggtacatcttgaggtcaggacatccagcgctgactttcttggagtggtgcatccggtggcccacttttgacccccttttcttctcgggaggagaggcccaattcagagatcaggacaatagtgttgtcttaatagctcccaacatgtaacaatgtgctccttttctgtaaaattttatgttttcaaaattgtagtgttaaaataaatctcttttctctagtcaaaattttgtacaacttgaaaaggacttagattacttctattttaagggaaaatatcaatcatctgacacagaaatattcaagacaacacccatcaagtattgtgcttttctacattttatttggtgtgtggtatgagtgtgtgtgtgtgtgtgtgtgtgtgtgtgtgtgtgtgtgtgtgtgtatgtgaatgtgtgtgcccacttcaatgccacaatgctcctgtgaatttcagaatacacatttccaatgttatccttctctttccaggggtggaactcaagtgatcaggctggatggcttctagttgaattgtctgtgcactccgctatctcaa

SEQ ID NO: 2345 - DNA, 1200 bp, mus musculus
ttgagagagtttggttctgatgatgtgaaggaactttggttactgttgcttctgggtttttttttttttttttttgagacaggacttctctgtttagtcctggctgtcctagaactcactctgtagaccttgcctcctgccatctgtttatctcaagtgcttgcttccctcaatatatctgactggagcctgtccttctctaatcccggttgtttcagagctcctcagaatccagctttcactatgatcctatgattaggggttcctgtgaacctgagattttgggagtgccagagttcttggcagtcaagcttcctctgagaccctgagatcctggtgtgaccaagctcctgggatcctggggtcctggggtcttgaattcctaagatcctgggcatgctacagtgcatggaagtggtgtctcctctggggactgtggggttatcttgtgtatttgaaaccaaggtataccagcactgatcagaaggaacctgagctactggtcaggcatggctcctgtgtccttgctcctgatgtctcaggccagtcaggattggtttagaacagatgttttgttccacccacccagtgatcctaagatcctggccatgttagggtgcctgagttgtggagggtcctctggggaccttgccaccctccgccgagttcctgccaatggtggccaggatctggtgctgaccagaagggacctgcgcccctggtcaggcaggtatcctgcgtccctgctgctggcagaggcctgttacaattggtttggaactgatgttgtgttcaactcaccagtgatcctaagatcctgggtgtgctagggcatctgcagtgtggagggtcctctaggtaccttgggacagtccaccaaggtctcgccccaaggccccactcttaagttatgtgaaagacagccaagagttcccagacagctttaagaatgcactggtcactgataacgaaatgaatcatttcttcccaagtcaaagtggttcttttccagatgtatggtccctctttgatatctggataaacgttatcagttttgaaggatagcattcttttttcccctcaacctaatcatgttatgccaaggctcgaaagtcccagtttatgcatttcccatatatgaacctgagcccctagaccagggcattcctaccctctcaagcagggggagttgtgtcccga

SEQ ID NO: 2346 - DNA, 1000 bp, mus musculus
tgatgcccagtggtcttgttttctgttggtaaggttcttacattttcttttcccatctggttatctctgatgttagatgttctagctgtctctggctggagcttgtccctcctgtgattctgttagcctctgtcagcccacctgggagtccaactccctcctgtgtcacagtggtcaaagcactctcttgcatgcaagctctcctcttacagggaaggtgcacagaagtatggaggtcagatccacctcctgagtcccagggtcagagcgctccctggaggccaattctcttctggtgtggaaggtgcccaaggatttgggtctcagctctgcctacaccctgaggatgaaggcccaaagtgaccctgtccaagcagctttgttgcttctgcagcccatgtgctcctctttgtagactggtctcagtcttcccaagatcctgagtgtgctaggtcctgccaattcttgcccaagatggcgtggagctgctgctgactggaatgaatctcagccaaagctctgtgggtttcctttgtctctgtccctgctgacacaagacctccattttgtttttgtttgtttgtttgtttatttgttttgaatatattttgatttccactcaccagtgatctcaagatcctggctgtgctagggtacctgcggtgtggagagttctctgggcaccttgggaccctctgccaagttcacgcccaaaatgccatgggctggtcccgaactgaatgaaccccaaccgttggttgtgtgggtttctcttgtcccttttcctactggcacaagaccctctgggttttttgggacagatgttagtgtccactcaccagtgattaagatcctgggtgtgctaggacacctgcaaggtggagaatcctctcatttacattttaaacgatacctccttcctggttacacctccaccaacccaccaccctttctcctaagcttcttcacctttgtctccatgagtatgctcctccaccca

SEQ ID NO: 2347 - DNA, 1000 bp, mus musculus
cgcagttctgaatcctccctgtaacagggggtcttcgctccttcctgaagatgttacttcccgggtttctggcacaatttgtgggattcctgacttgcctgcaagtaagacgccacaacaggatacttctgcaacacgtttattggaagagcatggactgcataggcgaaagaccccgagccccagaaatggcactgcttatataggcctaggagtgatgtgtctatacctgattggttatgctaccagtacctcattaatatgtgtcgggccaggcagtgactcggcaaaaaactcttatgcacatgtgcacattggttgtttacccataatcatgggtggtggccagtggtagccagcgccatcctgtaatggcgtttgcagcttcccgcaaagaagaagctacatagcttctgggatagactccgtttcaggctccagacatccaggcaccttccctgccagagaagaggtgtctgccccacctgggagggttctgctggggagcacctgggtgagacatcctggatcccgaatccctcagtgaatagtctgcataggtgagtgtgcagactacagaagctacacagcttctgggacaggcagaagcaacacagcttctggaacagaaccctttttgttctccagacatccaggccatccaggcaggcaccttccctgccagaggagaggcgttcacccaggagggctctgccagagcaccttggggagccatcttgggtcccggatccctcagagactagtctgcacaggtgagagtgtggactacagaagctacacagcttctaggacaggcagaagtgacacagcttctgggacaggcccttttttgggccttcgttttcagtaggaggtctgaacaccaggtatctgtgtaccttccctgcaagaggagagcttggctgcagaaagtactctgatcactgaaactcagaaggagatgcactcccaggtctgctgacagaggctaacagaatca

SEQ ID NO: 2348 - DNA, 1000 bp, mus musculus
acaaagagaatactcctccattgctggtagtagtgcaaacaagtacaaccactttggaaataaattttgcaggttttcagaaaattgagaattgttgtaaatctaacatccagctacactatttatgggcatgtatctaaatgataccctactgtaccacaagtgtcgggaatcaaaagggaggtccctggggaagagagtgaaggggaaagcccacaccccaccagggttccacctatgttttggtcagtcaggtgtggaagggctgctatctaccttccactcatccccggttcagtatctaagcctctgacccattcttcatggggtggcaaggggcagccctacctgggtgcccagggctactttgctaaagccccggtgagcaccagtgcttctttgctaaagccactgggggttttgggagagagggatgagggaagaggtttgcaacacctgtgagagtgagcacagcagatcttgatgagcagagattctatggttttagagctttattatagaaaggcagggaaaaagagagaagatagaaaagagagggggggaaaggctagaaagaaaaaaagagtaagagggagagaggagaggagaggagaggaggggaggggaggggaggggaggagaggagaggagaggagagaggggttgagagttaggggtaagagggagacaagtaagagagtaagcagaggctgaacagccctttttatggtctttactgttgctaggtaacaggagaggagtttagcctgaagatcagaaacttgggccattgcccatgtgacttctagcctatgcttctcttgtgggggctgtgagaggtggtaacttaggcaggagccagagttccaggagcataagggaatgccaaccgagtcttgtaggtgaattatcaccattttcggggttcagacctcagcttgactggagaccatcctgtctatgcatagcccaatgctccacacacaaggacacttggtca

SEQ ID NO: 2349 - DNA, 1000 bp, mus musculus
aaggaaatctcaatcctaaaggtttgccttggcagataaaatatatttatgcatgatacctaagaatagacacaaagaagaaatgttacaaagaatagaaaaatactgtggtgtggctcaagaagccataattcatggcacaatagaaatgagccaactctgggaaagctctccaaaaagatgagacagcaccatgctatcctagagtatggagttcatcaagttaacatcttcagaagagacacatcaggcagcgtgcactatgtaagtgttgggtaagaggccggatggcatgcttgagaagatgcaaactggagttttagatgtggggaaaggagaggacaggccagaatattgcattcgtaaagcttggtggtggcaaattggataaactctgaatgtcacaacaaatagctttatggacttttcatccatgcacttttctgtatgtttgttgtacaaacccacatgtgaaaaaaaaaaaaaaacatagatcaggccaaatgatcttaagcagcctagagaaatggctcagtggctaaaactgctttctgcataagcatgaatactagagtccctttcataataccactataaaaattagtcatgtgtggccctgcacactatcttgtaaccgtagagccatggagggaagaagcaagaggatcttagtggttatcagtgtaactccaggttcactggttcactgagactccttcataaatgaataaggctaccttcaaatactcagttatatgtacacctgtactcatataacacaaacaagcacacacacacacacacaccaatataaggaagcaatgtcagacagcagcttggaacattgatttatcatgggcagtgacaaataccaggttaactttctgttgtttctgtctccttagtcccaagtcttcttactctaattcacttcatttttgtttctatttaggtgacatttttcttttttctttttccttttttcttttttctttttttt

SEQ ID NO: 2350 - DNA, 1000 bp, mus musculus
ttttttgtttgttctccctctgaaaattccctattacccccctcctgctgctcactaacccacgcactcctgcttcatggctctggcattcccctatactagggcatagaaacttcacaggaccaagggcctctcctcccattaataatcaactaggccatcctctgctacacatgcagctagagctgagagtcccaccgtgttttctttggttggtggtttagtccctgggagctctgagggtactggttagttcatattgttgttcctcctatggggctgcaaaacctttcacctccctgggtactttctctagctcctctattgaccctgttctctgaccaatggatgatagtgagcatccacttctgtatttgtcaggcattggcagagcctctcaggagagagctcctgtcagcaagctcttgttggcacccaaaatagtgttggggtttggtggctgtatatgggatggatccccaggtttctgcatggtcatttcttcagtctcagcttcacccttttcttatgtaaacagtttatcaagggttatttacttattaagaaaaattaagtatccctctgcagcagccaaagcagtagccactgttgccttgcagccaaccaccaccatggtgaagatcctgacagtgaagatgcaggcatacccagatcagtcgctgggcaccagcaggttgcagaagtgagtgaaggtgttccagagcaacgccaactatgtggaaattttcatccagagcattatcttcaccgtagatccagggctgaggcaggaggccaagctggttgtgggtgggatggctgcttctacatgacagaggcacatccaactcatcatacttaccactgcagccaacgggattggttgcctggttattggacagaatggaatcctctccacctctgctgtatcctgcatcatcaagaaaaccaaagccattgctgggataattctgacagccagccgcaatccagaagggcc

SEQ ID NO: 2351 - DNA, 1000 bp, mus musculus
acaggggtctccagcttctgtccattggttgggtgtaaatatctgcatctgacactttcagctgcttgtttggacttttggagggcagtcatgataggtccctgtttataaagcacaccacagcatcagtaatagtgtcaggccttagagcctccccctgagctggatcccaatttgggcctatcactagatctccttttcctcaggctcttctccatttttgtccctgcagttctttcagacagaacaattctgggtcagatcttttgactgtagggtggtgtcttagtcagggttactattcctgcacaaaatatcatgactaagaagcaaggtgaggaggaaagggtttatttagcttacacttccacattgctatccatcatcaaaggagatcaggattggaaattaaccaggttaggaagcaggagctgatgcaaaggccatggagggatgttatatactggcttgattcttctgccttgctcaacttgccttcttaaagaacccagaactaatagcctagggatggcaccacccacaatgggccttcccacccttgattactaattgagaaaatgccttatagctggatgttacctccttccagcctagctaggctggctcagctggctcagaccatccaccactgaggcagagccacctgctgtgctgcttctcatcactctcctttgatgtgccactacctgctacctgcctgaggcctaaccagctctccaagatcttctggagttagctgcaaactgtgattttagcaggttcctactaaaaggctgatctgacaacttcaaagaaactttgcttgactaggaatgagcctcccctcttcttttttttttttttttattttattttatttttattaggtattttcctcgtttacattttcaatgctatctcaaaagtccaccatacccaccaccccccaatccactacccacccactcccccgttttggccctggggttcccctgtactg

SEQ ID NO: 2352 - DNA, 1000 bp, mus musculus
ggtgaacaaaatattcacaggagtaaatatggagacaaagtgtggagcagagactgaaggaaagaccatccagagactgtcctgttgtgtccggccagcagatcacaggtttgggttccagcctggaaaggcattttggaaacctggaagagaagaggggctgggctgcacgagataaggaaggaaccaagacaaagctctctgctcaaggttcaattttaatatcagcaaacacgctttataaagaaaaggggaagcccgtccctggccaagcaaagttcctttgaagtagataggtcatccttttagtgggaactcccgaagattgcagttcggtgttaactccagaagattcctggaagagaacctgttcagcctctggcaggttgggcctcaggcaggtagtggcacatcaaaagagcagtacagcaggtggctccgctcaagcagcagtggatggtcacagccagccttgctaggctggaaggaggtaacactgccccacctggggatccatcccatatacagtcaccaaacctgaacactattgcagatgaagatgccaggaagtgcttgctgatgagagcctgatatggctgtctcctcagaggctctgccagagcctaacaaatacagaggtggatgcaggcagccaaactttggactgagcacgggtgcctgatagaggagttggagaagggattgaaggagctgaggggctttgcaggcacatgggagatcaacagtgtcaacaggccagacactgcctccccccaccgagctcctggggacatgaccaccaaccaaagagtgcacatggagggacctgtggttctggtcgcatatgtgggagaggatggccttgtacataagtgggaggagtggcccttggacctgaggggattctgacgccccagtgtaggggatgccagggcagaaaggaatgagtgcgtgggtgggtggggtgccctcatagagacagggtgaggagggatgggat

SEQ ID NO: 2353 - DNA, 1600 bp, mus musculus
agggtggaccatgtagagactgccttatccagggatccaccccataatcagcatccaaacgctgacaccattgcatacactagcaagattttatcgaaaggacccagatgtagctgtctcttgtgagactatgccggggcctagcaaacacagaagtggatgcccacagtcagctaatggatggatcacagggctcccaatggatgagctagagaaagtacccaaggagctaaagggatctgcaaccctataggtggatcaacattatgaactaaccagtaccccggagctcttgactctagctgcatatgtatcaaaagatggcctagtcggccatcactggaaagagaggcccattggacacacaaactttatatgccccagaacaggggaacgccagggccaaaaagggggagtgggcaggtaggggagtgggggtgggtgggtatgggggacttttggtatagcattggaaatgtaaatgagctaaatacctaataaaaaatggaaaaaaaaaaaaaaaaaaaacctaggatagccaaaactcttctcaatgttaaaagcatctctgaagaccaaagtgtggacactttgccccttcttagaattgggacaaaagacccatggaaggagttacagagccaaagtttggagctgagatgaaaggatggaccatgtagagactgctgcacccagggatccatcccataatcagcctccaaatgctgacaccattgcatacactagcaagattttgctgaaaggactttgatatagctgtctcttgtgagactatgccagggcctagcaaacacagaagtggatgctcacagttagctattggatggatcacagggccccgaatggaggatctagagaaagtacccaaggagctaaagggatctgcaaccctataggtggaacaacaatatgaactaaccagtaccccctggagctcatgtctctagctgcataagtatcagaagatggccttgttggccttcagtggaaagagaggctcattggtcgtgcaaactttatatgcctcagtacaggggaatgccagggccaaaaagtgggagtgggggggggtaggggagtgggggggagtatggaggacttttgggataacactggaaatgtaaatgaagaaaatacctaaaagaaaaaaaaaagcatctctggtggaattgcagtgtagtggtgcatctacactgcaattgtgttaaaaacttcatggtactggtatagcaacagataggtagaccatatgactaaaattgaagacccagtaatataccaatacacatatggtcacttgatctataaccatccagtggaaaaaagagcattttcaacaaatggtgctggtataacagtaggttattacatagaagaatgtgaattgattcattgttatctccttgtactaaggtcaagtctaagtggattaaggaactctacataaaaccagagacactgaaagttatggaggagaaagtggtgaaaagccttgaagagatgggcacaggggaaaaattcatgaatagaacatcaatggcttatgctataaggtttagaattgacaaatgggacctca

SEQ ID NO: 2354 - DNA, 1200 bp, mus musculus
tgcaactttggcccttcagaattgagaagaaaatatgatcctctggttgtacaagctcactcctgagtatgtactgaagacacaggttttgtaaaaatttcattgcttttttagtgaaaacatgatgctttatctttcttgtgttgcaaggtcaagagagatgaaataccaagagcaccaagagggaaataaaacaaccagtgtgtgggattgatattggggttcactcattcgctctgttaaagatggatccaggagcagcaggtgtcagacaaggagaacagagagcatggaatggagttctgggacccttgtcaagatctagtcagtgacaggggtcagagcacatctattcacatgttttgagaagatatactatgaaggcccaggctttgcctttgtatggtgagtatattccctgcggcgttggagatctgaggttcttataaaaatttaaaggtctgaagatcattatcttcatggtacaagaaaagcattaattgagttcaacatgagagccagcttaaaacataatgagtcttaatttaatcttagttttaatatttgcaatatatatccatatacacaggtgtaaagtgaccatcacagataagagatggttaaaagttgaaccttatttacatttaccagcataacatgcttaaaagaacagggaaacactgctgcccatagcctgagcccatctcagcactcccatgcctttacatcagattgttgtggtagctcatgctcttcaagtctttttaataactatgcctctggctaatggcagcttcctggccattttggatgcttagtggtctatatttgggagaaagtcattgggaggaagtagcctcagatcctgtacacaaaggcccctggagagtaatttgtggtttaggcataggtacacagtctacagtttagaatgttggaatggaaatgatcataatggtgaagggcagagccgtgatggtgaaggactccaagtaggtacattcaaatgaacctctgcagttttcttgcagtgtgagaaaggaaaccagtggacagaagccagaagcacatgggatattatcaactggaggcacaagtctaagttcacctggatctatggccaagcaatgactcaggagaacacctgtcattttgtaactgttgactaggaactatctggacattagaaatgccatggtg

SEQ ID NO: 2355 - DNA, 1200 bp, mus musculus
attagcttattacttggagatgaaaatagcacatttaagctttattttatgcgtatttcttttttaaaagatttattttctgttttatttgtatgagtattcacttacatgtatgtatgtgcatcgttgaaggcattgaatactttggaactggagttatagattattgttagtcacaatgtgggtgctggtaactgaccctggtcctccggaagagcagctagtggccctcagcaccaagcatgcttcccatcccttcccaaccttatttctttctctacagtcctcagtatgagagtactacttttacaatgactttaaggttactctttagagcagtagttctcaacctgtgggtaatgatcccttaggggagtcaaaagtccatttataggagtcacctaagactattaaaaaacacatttacactacaattcataacagtagcaatattacagttatgaagtagcaatgaaaataattttatggttgggggacataaataattcatggtttcagttccaaaacaggaggaactatattgaagagtcatagcattaggaaggttgagaaccactgttgtagagaaagtaacacctgtgctatcctaaagataatcaacttaacaaggagacatctattgagtaccattgcatttggtgagggagacaatattagttttcagcacgcagtgtgttaaaaagcagtggcaaaggcaagcttttcacacaaaggtatactaggaagtcaccattttcaagtgctccaagagtgcattttgtctccatgtacacctacatgccagaagaggttatcagatcccattacagatagtggtgagccaccacgtgttggctgggaattgaattcatgcctcagtaacagcagccagtgttcttaaccactgagccatctctccagcgccatggtctaaaccaccaactgaagagtatacatggaaaagccatgactccagatacatattccagagaaagggcttatctgattgatatgggaggggaggtaggcttgatgcccaggtagggagatgctagaggattgaggcaggagtgtgtgagttggtggaggagcaccttcatagagacaaaggggaaggggaagagaggggatgggaggagtaaccgggaagggggatatcccttgaaatataaacaaataaaattatttttttttaaagtg

SEQ ID NO: 2356 - DNA, 1200 bp, mus musculus; identical to SEQ ID NO: 2355

SEQ ID NO: 2357 - DNA, 1000 bp, mus musculus
ttagctcattctgattggtaaataaagatgctgatagccaatggttgagcatggcagacaaaggtgggacttttaggattccaggctgaggagagagaggaaggaggaagaaggaagtccactatgtagggaaaaggagagggtgaggagagactccgtgcctgagaacagtggaaagtagaggcatagctaccgtagttgggcagccctctaggtccagagcagaaagatagattttagtaaataataacttgggattattggaagtaggtggattaactgcatggaggttaggaagtagccaaactattgcactaagtatatcaaagtataaagtctatgtgtgtatgtttcattcaggaacataaaccattggaggctagcaggaacccaccattgagatttatagataaaaaatattgctacagaaaatggcagacagaggtgggacatttagcattctcaagctgaggatagagaggaaggaagaaggagttatgccatgctgggaggtgaggagagactccatgcctgagaatagtgcaaagcagaggcgcagctgccatagttgggcacacagtatccaatgtgtgggacccacccacagtcttctgggctcctccaaattttgggaagaaagttttgtgggtggtttggtgaccctatccctccactgagggtcctgcctggctattggaggtggcctctacaggttccatactcccattgttaggtatctatgctaaggtcaccagcattgacttctgggctcctctcctatcccaggtctctgggaatgcctagagattctcccctccctgccacccttggcagctgcagatttccattcattctcttggccctctggaccccagtcctattttccccatctaatcctgcctccccagtccccccaccctctctccacttcagttccctccctccctgtgcctcctatgacattttgtttccccttctaagttaagtaccctttgttggg

SEQ ID NO: 2358 - DNA, 1000 bp, mus musculus; identical to SEQ ID NO: 2357

SEQ ID NO: 2359 - DNA, 1000 bp, mus musculus
taaatgtgaataagttcagtaggaatttcagctgaaaacattacccaaaatgggaaatgaaatatatttttaagccaacgatgccaattatttgaaaaaaacactcccacaaattctgaatgtaatttagggatggaaacttagttatcttgagataacaactggagcagggtggggcaggggcttctgtcactaaagttgttgcctgtctttgcaatctgttctccatctgggtggttgtttggcctcagtgggagaggatgcccctaaccctggagagacttgatgtgcagggtgagcgatttgtaggtggtgtcctcacatgtgagaggagaaggggaggaggaatgaggggagggactctgtgagtgaggaactgggaggtgggggcagaagtagggatggaaagtgaatgaatgaatgaatgaatgaatggatggagaaaaataagtactgtgatagcaaggctatttccttatttgattatatgtcattaagtagaaatttaaaagcaatcaccactacagtggagactcatacatagctaatgccatagggtttgtacttatttatttgtttgtttgttttgttgttggccttttctgtagcaggcaaattggcctcaaggttcagcttagcagttcagagtgtatattggtctcacagagtaccaagttcagtacccagtacctatgtcagctggctcacaactgctggtaattcaccaccaggaggtcacccattctgaccacagaggtgcctgcactcagaagcacaaacctacatccagagggatgtgctagtaacagtaacagtaacccaggcagtgcttcagcactagggacagcaccaggcagtgcactctgtcctgagctcaaagccttggagtctaaaaatacttaaactgatactatccacaagagaaaatagatgggaaattataaatagctgtgttaaaaatagcacacattttccaactcaaaaactagatctctgacta

SEQ ID NO: 2360 - DNA, 1000 bp, mus musculus; identical to SEQ ID NO: 2359

SEQ ID NO: 2361 - DNA, 1000 bp, mus musculus
gaaatagttaagcatgaaaattggtgtatctgaagcatttttatagtaagagagatgccatcattagtaaactattggtgtcatacctctgatggggctggattgagacactatcatgtgatccttttgaataatgtgtctttatttacaacacagaacagacgcaggctacagtgagctctctacttccctcttactcaacatccctccaaattagtaacacagcatggatctttaaatgccaacacttccttttttgctgtgcaatggagacatgtttgaatagttcagctgtaggaggaaatcactatgactaagagaattatggaagagtgagtttatttttgtttcacgttcaagaggcttggggtttatcatggcaaagaagcatggcagcaagcagtttgttcccagagcagctgagcaggtgtctaagaacgcacagccccaattacaggtgcaaggcacaaagagtgatctggaagtgacgtaaagctttaacttacgtccacctccagtgatattcttcctgcaccaaggctactactacaacctccccatacagcagatatactccaagtgttcagatactcaaatgtatggttgacccttattatccaagtcatcagagcatataaaagtggtcagatggagtaagcactgttccataagaggaaactgggatatggttaataagtcaaaatgaccagatgagaaaatgtttgaagacaaagtgtctcaatatataatttgatggttttagcacattaataatcacaatgagagtgaatacattcaaagagactaaagtatttcaaacatgtagaatgaagaagaaattgaaggaaagaaaatgtttccaaatgatgagcaatgattttgtggtgagaaggaaggaatgaaggaaggacatcaagtacataatccctagtgtgtgcatagtagactgttaataaaataattctccttctgcacagacctgagagttctccagtgtgta

SEQ ID NO: 2362 - DNA, 1000 bp, mus musculus; identical to SEQ ID NO: 2361

SEQ ID NO: 2363 - DNA, 1000 bp, mus musculus
ctgtgagcactacataggcatatagtatataaactccctgtttatatataaatgagaaacaaatatgtttccttggagctggagaggagactcagtgtttgaaaatgcttaacagccttccagaggcctcatattcaattatcagtagctagacaaggctcatcacagcatgtacacctccttgagatctggtacactcctctggcctgcacaggaattccccacatacatgtgggacatacacacagagaaacacacgtacacacaaaccttagaaatctttaaatatacgtatcataacatattgaagaccatcaaaattatactacttatttttaaaaagttattttctcttagagtataacagtggattaatacagaggaatagatgcaatcatatgtataatcattgcattcattacaaggaacacatattaaagagaagtatatgtacaaccatatataatttgtttgttcacatatatgtgtgtgaacatgtgtgtgtgcatgcatgtgtatatatatatatttattgatattaggtgacatatatgtataatatataagcaaaaggtatgcatatgtattcatatatatgtatatatatatatgggctaattatatttgatgttaattctgttctcctgtgaagggttgtgaacaaggaatgagtcaacaactcaggtgatttcctgtgaacctgcatcccaccttaatttgtaaaataaaggagtgctgatgattgggcagataaatgggaaggtggagccgaaggtggggtggaagttggggagagagaagaaggagaaaatggaagagggagagaacgcagagaaggaggaagaagaagaaaagtggagcagaagcacatggcctggagaaaccgcaagttctaggagttctcatagatgtggaagatggtagtgtagcagtagatctgcccaatctagatgcacagcatttattcatattaactgagttgtgttttcattgcccaggc

SEQ ID NO: 2364 - DNA, 1000 bp, mus musculus; identical to SEQ ID NO: 2363

SEQ ID NO: 2365 - DNA, 1000 bp, mus musculus
atcaaatttctatgtatctgtaattattaaaaataaatttataacattaccaattagatgaaaggattcaagaataagtgcagaaaggtcaagagtttgatctgacaaagtaaatgagataatggtaacttagaacagctcatcagctttttatgttatggacaatttgacacaaaatggggaaccagaagagacaaaagagtaactgtggagttatcatgcacagctgatcatttggttgaaagcatagaggcaaggaacgtggtacagttcctggcccagtgttgagggaagagtactcatcagtggtagttaatacaagaagctccagaagtcataaaatatcatttgatttgcagagctactagacaggtgagagcagctaatgggttaatcttggccaaggcagggctgcactttgatgagctgacaagcttcaggtattggacccagaggttacccagaagaccatagagctcaaggaagagtgccaggattttgcggacaacattggccagtttcagaaaactgtttttgatctaactgagcatattaatcagtttgacaaagaagcagagaatgagaaggtgaaggccattggtgctcagaacttgctgaaatctatagtgaagcagagagaaggccaactgcagcaactgcgagcactgttagcagaaaagatgcagctagaaaggtatcaggtggaatatgaagctttgtgtaaagtagaagcagaacaaagtgaatttattgaccaatttatttttcagaaatgaactgaaaatttcagttgtatagtaggaaggcaaaaaagcaccccaaccataaaaaaccccaaccttttaccattaaggtgggtgtgactgatgtatgtcatgcagtgtgttaagggggcagctggggaacagtgcacagccttggctactagccaggcagcacaggacctcacctcttgacctctcagaacaaattcattgtttgtaaatgttgatctatctat

SEQ ID NO: 2366 - DNA, 1200 bp, mus musculus
agcactctctgctggcaagctctcttacagggaaggtgcgcagatatcttgtttttggacctcctcctggtcgaagaagaaggcccaaaacagggcctctctcagaagctgtgttgctttggcagttcccagaagctgtcagcttatgtggtgcagactctcacctgtgcagacaaaattcctaagttccagggagtcctggaaccaagatggcgaccgctgctcctgaggctgaggctgcctcccaagccaggcggacacctgtcctctggtccggatggtggccggctgtctgcggcccgccaagggtgctgcctcagcggctatgtgcttctgcctgtcccagaagctgtccggctctctggcacactctctaacctgttcagactcggcatgattcttgaaatgataaacttttattattttaataaatgcagtaatgctttagaaattaaaattttctctctgacatgttcacaatttaagtaattcttgaaatgagctaagtgtttcttttgctacaaaaaaagtaaattgttctgtgttccactgtccttaaaggcaaatctatccccattactaaatagacactttccacctgaatgagctgaaaacattctcctgatgtcgaagggaatttatgttaccaggaggaagaatatgatcttgccaccaaattcaaattgatctcttccagagttggcaggtcctcctccccatgactctaattttaccagttagttcaggttcaggaatttgtgaagacccttttgtataccttcactgttgcgatttatcctcactaggatatgcttcacctcattcttttgatacaatgcaccagtgtcccaagaactaactcagtctattgttgcaatctgcattccctaatagtcaatctgagtgctattttattgtcagaaggtttagcatacaagatataattctaatcataactttttttggaaaagttaaggaaatggacctatttgacaggtaaggtccatcttgcttccagtgatgattcattttattatcaactaagctaggctactgtgcccagatgtgtcagtcactagtattctactgactccatcaacctatttttaaaacataacatttaaatttgtttattttaataaaatagctttcctctcattctataggtagatcctatccaatcaattgatggcacaaata

SEQ ID NO: 2367 - DNA, 1600 bp, mus musculus
gacctaagcttttcctcaggttcaagacccgtggaaaggcctgtatacttattttgtgtaccatatttcctctttgctcctactctctctccttgctttacttctgatagattgccctgaatttcatccagaattttcagccctgccttaaccacttgataacatgtgaaaaggaacaaaaaggctcctaacactagagaaagttcaaggccaaacatatcttgtaaagctatttcccactttacttctgatagactgtcttgaatttcgttagaaagttcaagaccagacttaccttgtaaagctatttcccactttacttctgatagactgtcttgaattttgttataaagttcaaggccagacgtaccttgtaaagctatacttacgggtaccctgttccccagctgaagagttctgaattcacgcagttgaatccttctcaacagtctgtgttgcgggaacacttcattaccaccattccccagctgaggagttctgaatccaggctggatccttctcaacagtctgttttacgggaacctttatgaccgtgacccgcagttctggttccggaatgagggatcttccttgcgccagtgatggtaaccgtcccggattttctcgtcccaggtcttctcgtcccgggtcttctcttcccgggtcttctcgtcccaggtcttctcgtcccgggtcttctcgtcccgggtcttctcgtcccaggtcttctcttcccgggtcttctcgtcccaggatttctcgtcccaggtcttctcgtcccgtcccgggtttcagcaccaactcttacacgcgttctcgaccggccaggaaagacgcaataaaccggaaccttctgcggcaaagctttattgcttacatcttcaggagccagagagcaagagagcaagagctctattgcttacatctttaggagccagagcgaaagagtgcaagagcgagggcaagagcaagagagagcaagaaagcaagaaaaagaacgagaaagcaagagtgcaagagcaagagagagaaaaagaacaagaacaagaaagcaagaaaaagaacaagaacaagaaagcaagagagagcaagaaagcaagaaaaagaacaagaacaagaaagcaagagagagaatggcaaaaccccgtcccttttaaggagaattatcctccgcctaggacgtattactccctgattggctgcagcccatcggcccagttgtcatcacgagaaaggcagaacacatggcgggaaacctgcccctgcacgtgtgcagattatgtttactacttagaacacagctgtcagcgccatcttataatggcaaatgtgagggcggcttcctacacctgccgtctactcctcttgggtgaatatgcttcctttttttctagagcctttacatgtgttgtcaagctgctagtatgtgctctctcccgtttcttcttggaggcactcagagctatgagtttccctcttagaaatgcgttcattgtgtcccataggtttgggtacgttgttgtttcattttcattaaactctaaaaagtctttaatttctttatttattccttccttgaccaaggtatcattgagaagag

SEQ ID NO: 2368 - DNA, 1000 bp, mus musculus
cataaagactaatttgcttaagtaatcaatgttggaatcagttcttgaccccagatccatggctagtttcctgggatcaagcagagtgacttacatttgtacgatgttttcctgttctttcttacattttttttttctgttgtaattgtgctatgaatgaggaaatggttttctcaactaagttcttgcagaggagtttccagcccagttgtgggcaggggcgagggggcgttgggtggttcccatgcaggtgagagtctttggtctggtctgtggctggagtgcagaaaggccttctggcaggaggatagaaatgggtcttcaggggaaagcctattccatcgttcaagcacagtgggccttgctgagcagagagagtcaatggttttagagctttattgtaaaaaggcagatagaaataaagaaggtaaaagaaagaggccatccatggccatgtggcaagaaaggttggggagggagtgaaaggaggggataaggagagctagagatgagattaagaaaggtgagagcttaagacagagagaagggagcaagcagccccttttatagtgggctggcctatctttcagttgcagggtagctgtgggaaggatcatacctggctattgtcatgtaactgtgagggtggagtctagctagaatgccaggagcttggggctttgtctaaatcactgatagtcataggattatgaagtttggggctatgtggtgtcagacacctgtctctgggaacgtggctcactgttctgtcccttgtagagttttctactggatctccagaccttgctcaaccaaaacaggctgcctttcacagtcccacatgcaaactcacaacctgagccaatgcagcacagatatccacatttgtgtgttggtagtgtgtgtgggggtgattttctcttaaaggaacagataaattattatccacaaaaggacttttaagtaatctcttctttaaagtgaaggtaaattattcctt

SEQ ID NO: 2369 - DNA, 1000 bp, mus musculus
ctgtatattgcttttactatgtttaggtatgagccttgaattcctgatcattccaatccttttatcatgaattggtgttggatttttttcaaatgctttctcagcatctaatgagatgatcatgtgcagggctgtgggtgtggggaaagagaggagtgggagagagcctgcatcctgtgagagttctagtgctctgggcagatagatgtgggaggactgtgcatgctttccatgcagcccccagtggccatctggctgtgttaagtggacaagtggcagccctaggtaccaggttctcagcatccagcatcctatgctggatatggcagagaagctgagaacagaataggatgccctacgatggcacttggccttggagaggaagggaacagaggtcaaggggagaggggactctgggtggttcccacgaaggagagagtccttactcttgtccatagctgcagcataggaagagcttctgtgtggttagatgcagctccttagaagaaagcctatctcatccttcaagcaaggcagtggttacagaccgtctatggtcttaaagctttattgtagaaaagcaggaggaaagagaaaagttagaaagagagaggagaggtcagccatggccatgtagagagaagagggaagagagagagagaaggaaggaaggctagagagcaagataggtaaaagcttagagagagagtgagatggagccaagcagcccctcttctagtgggctgggatatcttgctgttgctaggtaactgtggggaggagtctagccagaatgccagaagcttgggacattgtctacatgactgatggccacatgcctctcctgtgggggctgtgggggtggtaacttcgacaggagccaggggtccaggatatatgattgaatgccttccatcccatgtaggtggaaattgccacccaccgggcttcaagacctaagctccactggagacaaggctgtctgtgcatagcccattgc

SEQ ID NO: 2370 - DNA, 1000 bp, mus musculus
ttatacatatatctgtatagatagctatagatattcctacatatataagtataacctgcttagtctgtatagtgttacctgtgtgtatgtttttagggttggccatttgttattagataaccatgctttttcctgagatacagtctcatagcaaagtccttgggttcttgctccaccttctacaatgacccctgagccttcggtgcagcaggtatgttatagatatagccaatgtggctgggctccacaactctgcattttggttgtttgtggttttctgtaatggtctctgttgtgaagagaagtttctttgatgtggaatgaggattgcactgacctatggatataaggacaaatattcctaataaagttagggattatactggttttaaaaaatagtaattgtagattcccatctaagatccatgacttcaccagccctgggtggttggctagcttcctagtagtaccaagcaaaatttccctcctgttgagtggttcttaagtccaattagagagctggtggttaccaccaacgtatgtgtgccactactgcacgcttagggctatcatgtcatgtgatcattgtcatggttcgtaagtgttatagctacacaggagtgttcattgcttcccttctttgtaatcttgcattgcaacttctgataccttgaaagttagtctttagggaggcggctttcaggtaatgtctggctgagggctgattggcactgtgtctgaagtgcatgttgtcatcaagagggacttctcttccacctctgagaaaccactaagagcagaagaaacagcctgtcatgtttgtggagtctcttggatgaccctgaacaactcaaaatgagatcttctcatgcctggggttgggagttttgttagatggttcttgcctcttggataaaacgttgttagttcagatggaaaggtttcatttactctatatatgtgtatttatgcactgaatacatctgttataggtattttt

SEQ ID NO: 2371 - DNA, 1600 bp, mus musculus
tggtatgagaactttctaatttattcttggtggcatttagtgctttgcactttcctttttagctctgcttccatggtgttccatgaatttctgtttgttttgcttttattttcattgaattatagaaaatctttaattcattcctttatttcttccctgacccagagaccactgagtagagagatgctcagtttctatgactgtgtaggctttttgaagtttctatttttgagttccagctttaatccatgatggtctggtaagaaacaaggcattatttcaattttcttgtatctgttgaggcttactctaaggtcagttttggagaaggaaccatgatgtgctgaaaagttatacatttttgtgtttcaatgaaatgttctgtaaatatcagttaagtccttttgattcatattgttggttagcttcattatttctctgtttagtttctgtcttgatgacctgtcagttggggagactgtggtattgacatttctcactattttttttttcattttggcttttttaattagatattttctttatttacatttcaaaaattataccctttccttgtttccgctctgaaaatcccctattcccttccccctccccctgctccccaacccacccactcccattcccagccctgacatttcctattactggggcatagaaccttcacaggacgtagggcctctcctcccattgatgactgactaggccatcctcagctacatataccgctagagccacattcttagacgaatggatggaactggaggatatcatcttgagtgaggtaacccaatcacaaaagaacatacatgatatgcactcgctgataagtggatattagcccagaagctcacaatccttcttagaaggggaaacaaaatacccatagaaggagttacagagacaaagatctgagcagagactgaagataggaccatgcagagactgcccagcttggggatccatcccataaacagccaccaaatccagtcactatggcagatgccaacaagagcttgcagacaggagcctaatatagttgtatcctgagggcttttgttagttcctggcaaatacagaagtggatgctcacaatcatccattggatggagcacaaggtccccagtgaaggagctagagaaagtacccaaggagctgaaggggtctgaaaccccataggaggaacatcaatatgaacaaaccagtacccccagagctccttgtaactaaaccaccaatcaaagaaaacacatggtgtgacatttcccactattaatgagtggggtttaatgtatgacttaaactttagttatgcttcttttataaatctggttgcccatgtgtttgaggcataaatgtttagaattgagatatcttcttggtagatttttcctttaatgaatatgaaatgttctttgctgtctcttgtgattaattttggttgaaattatattgtattagatattagaatagctacttcagcttgcttcttggctccctttgcttagaaaacattttttatagccctttactctgagttatgcatattttttttttttgctggggtgtatttcttgtatgt

SEQ ID NO: 2372 - DNA, 1200 bp, mus musculus
gattatgaatgctactatcttaaagattgtattatataatctggagggtttttttttaatacagattcacactgtgttaagcaacagactatagcatcgtgtgtcttctcctctgctcattccccagtttctttctacattcttcacattagagagatgtgtgctaacacttctacactccattccacatctttatggctctgacctccaggtggctcttagccaacactattaacagcatggcctctgctgttaagagctggtgtatttgcctgtcaacttcctgtttcttaggatgaacagctaggtaaaatgagacagagcaggcttttagaaggctcttgacagatggacttcgcctgcttgtagcccaggtagaatcaataaaaacttgtcacacatacacacacaaaatcctgcctaaagtaatgagcactgacttatacaattttatttgtacttctacaaaatgtttccaggcagagttcagtatttatggggcaagtgcttgcctctggtgcttattttgtgagattatgaaaatgcaggttaaaatattgccaattgggtactttttcctcactttctgccttttactcgcagactctcttctcactatctaccttttacttacaaatgtgagagagtatgtgggcatatgcaccggcccacaaacacacatgcataaataagaacattagaatactctcttttgaaaatagatgataacgatcacacaatctttatgaataggtcagttccacctactgtgtgacttctttttttaattggatattttatttgcatttcgaatgctatcctctttcctggttttccctctgcaaacaccctccccatcctccccccatttctatgaggtgttccctcacccacccactcactcccacctccccaccctggaattcccctacactagggcatctagacttcacaggaccaagggcctctcctcccattggtgctcaacaaggccatcctctgctgcacatgtgcctggagacatgggtctatccatgtgtactctttgtttggtactgtgtgcttctaaccatcccagctatctcagttgtaaaatggaatgggtatcattaattgtgtagtatgttaatctttttgcaaatctatctccacatttagaaggaacactgtgtagatatatgcactattttaaacctacat

SEQ ID NO: 2373 - DNA, 1000 bp, mus musculus
gtaagcaagttatttgactcatgatgccccaaagtttcttgatccccaggttgagaacttgtgcatttaacaagtacattatttgaataattctgatgccatttctgagtattcattctcacgacgtttacagagaaaaacccttgtcaaaggcaatgttttccgtgcccggggccacagcgagcctggtaaatggcccttgtgtcttcatccctcccttcttcagtatattcctcactttttttattagatattttctttatttacatttcaaatgttatcccctttcctagtttcccctccaaaaatcccctattccctaccccctcttcctgctccccaacctacccactctcattactcgtacccaaggagctgaagaggtttgaagccccataggaggaacatcaattttcctcacttttatttccatccaattccacagctggagaaaaatctgaacagcaaattctcaaaagaaaaaattaaaatgtcttttaaagtgttcaacacaatttttgtgagtgctccataggctcagtaatagtgtcagtccttgggaccgccccttgagctggatcccactttgggcctgttgctggaccttcttttcctcaggctcctctccatttccatccctgtaattctttcagatgagaacaattatgggttagaggtgtgattgtggcatggcaacccatccctcacttgatgttctgtgttcctgctggaggtggactctataagttccttctccctacttttgggcatttcatctaagatccctcactttgagtcctgaaaatctctcacctcccaggtctctggtgcattctgggccccccccccatgtcctatttcctgaggttacctgtttatattctttctgctggccctcagggcttcagtccttttccctcacccaataccagatcaggtacccctgcaatgccacaagcaactgaaagagtcatatgcacatattttcacccaaccaacg

SEQ ID NO: 2374 - DNA, 1600 bp, mus musculus
aaccaggtgaaatcttcaaactccaagccccaatcccctgcctggtgtgtcctccagtaagtccagcaaccctgaggtctgtattgtcccctctgcgctccatattacaagtccacacttctaccttcaatccaagatgtctatagccatcagggaccgcccagtgagatctctgccaccattatctaattatctgtgcactgaccgatttgggaaaacccatcaggttaaaattctgccctgcccctccccgtgcactctatttctgtgggtaacagctcctagcagtgggggatatggagcttgaagtggccacctcctgtagctaggcaggactcccagtgtagggataaggacatcaacccacccacaaaagctttaacccaaaatttgttctgcctacaagtgcaaggacaaaggttgaatagaggttgagggaatggtccatcaataactagcacaacttgagactcatctatggacaaaatacaatccctgactttattaatgatatgctattatacttgcagacagtactattgtcctctgaaaggctccacctagtagctgactgaaatagatgcatagacctactgccaaacattagatggagcctgcagagtcttgttcaagagttggggtgggggtactatggaacccaaagaggataggaactcttcaagaagaccatcaattaacttggacccttgggggctcccagtgagcaagcaagcaagcatgggctggaccttggctgcccacacatatattgcagatgtgcaacttggtcttcatgtgggtctcccaacaactggagagggagctgtctctgactttgttgcctgcctgtggatcctgttccccttactaaactgcctcactgggtctctgtgagagaggattcctgcagtcacttgatatgccaatgtagggagggggaaggggctccagttatttggaaaagggaaggggaaaagttggaagggttgtgtgagggccgctgggagaatgaagggctgcaattatgatgtaaagtgaatagattaattaattaatgaaaagaaaaaggaattcatatatctccttgaattaatagtgaagcctcttttatgctttggaaaagtctcccaattcttgatgtttaaaaccttgtttcctctggtttgtcacagtccttcctcatgtcccttcccctttttctttttgctttctcctccagatcctccctcatttggccctcccattcctttcacataggaagctgacatgtaaactcctcctcctgcctctgttaaattccttgctgtagttttcactaaatgcattatcttcattatttttctcatgacactttaaacttgtttgtatgagtttattgcctgcatgaatgtatgggcatcttgtataggcctggtaccacagaggtcaaaagagcatgttgtattttctggaactagaattatggtgattctaagctaccaggtgggtgatgaaaaacaagctaagatactctgcaagagcaccaagtgctcttacccactgagtcttctctctgctctccataaatctgttttgttttcccagtttgtttttgatatct

SEQ ID NO: 2375 - DNA, 1200 bp, mus musculus
ttgatagccaataggcttgaaaagttaaacaacactggacaacgttgccccttggccagtgctacattcaacagttaggttaatggttattcaaggttcttcaaagcagtcttttccctggctcatgatgtggctattcatcattcaagttttaaattaaatgtcactttttcaaaaatcattttttcttcctaaaactaattttaagttagtagtatacagagtcatgtgtttcatcaaggtatattttttataaacatgtgactatactttgttctaattcatacacattctccactggccagggtacatttcttgaacacccatttttttattaatcattccatttgtctacatctcaaatgatattccacttcccagttatccctccaccaccaccacatttcacatctgccattcctctcccttttgcctgtatgagggtgctcccctacctacccacactctcctgccccaatgctctagcatcctcccaatgatggggcatcaaacctccctgggaccaaggaactcctatcccattcctgtcaggtaaggccatcctctgcacatgtatctggagacatggatccctccaggtacactccttgtttggtggtttagactctggaagcacttggtggttgggccagtggacattgttcttccaacaggattgcaatccctctccacttcttcagttcttctgccagctcccgcatcaggttcctttaactcagtctgatggttggccccaagcatccacatatgctttggtcatatgctagccagatctcccaaggaactaccacactaggttcctgtcagcagtcgcttgaccagggcaacagtgtgggttttggtgtctgcagacatgatggatcccgaatggacagtccatgtttggtccctctttcagtctctgttccatatttttgtccctgttcttcctttgaacagcaacgttggttaaaaaactttgagatggttgggtggtcccatccctcgaccgggaggtgtgcctatctactagaggtggtctcaacaagttctatctgcacatttcaactaaagtcatccccattgggtcctaggatcctcacatttctgtactgtctggaaccctacaataaatatccccagttcctcatccccactgctacctatttttgttcaatttcctgaccctctgtacctctc

SEQ ID NO: 2376 - DNA, 1400 bp, mus musculus
gttcttgtcatatatatctttcacttggttgtttagagtcacctcaaggtatgtaaaattatttgtggctattgtgaagggtgtcatttccctaatttctttctcagcctatttttcctttgatagaggaaggctactgatgtgtttgagttaattttatatctagtcactttgctgaagctgtttattagcttaggagttctcgggtggaatatttggggtgacttaagtatacagtcatatcatctgtaaataaagcctgaatgcttaaagaagaactatttatccctcccccgccccaagttgttataggaaatataaaataaatagcaatttcctgcactacatccagatactctcaggcccgttggtctttctgtccagttcctaactggtggagattctctgactcatatttcgaaaatctcttcacccagcaactactgccatgtctcatgccagccccatgcttcaaaaccatctcggcatttgtggtgcacatcaggaaaactcatgctttgctgctgtactttctcactggaagtgaatcaagctgccccatgaagaaaaacaccatacaaacttagctcagaaacaatgttaactcaatctatgggtgcaacaactagaatgctaatcttgtaagccatattaaatctaaattgtctactggcaaatcctcacagattcattatctaatctggaagaagctagtagctatatcttgtcttgtctctatacccatcgcccaaagcccctaattctctcctgctttctcttttcctctgtccaaccctgaagtcctgactacccatccagtgattggctcctttatttattataggatggtttagaagaagtcatcatagtatgtgactcattcctcactccagacaaccccctgggaaaatggaattaacatcaaaatacaaacaacaccagggccattcacaacacaaagggatatttattagcccctaagatttttttagactatggtcaaaatatcatgggctagttgtcatttggccatttatatatatattccataacatctttgtcattgcccaaaccaaatcaagtacaatattcaaatgcattcttagaaaactctgtttatattaatctaaatgctaagagtattatcatatatcatttaagacatgtagtagagatttagtgtattgttttttagtgtattctaaaggtccctggttcaatcccgggttttagcaccacttatcccgagctagtatctcaccagcaagaattcacttggacaaccggattcttctacggcaaagctttattgcttcatctgaaggaagacccccgaacaaggaaaatggtgctgcttatatacccgtccgtgtgatgtgtcagctcctgattagctgctc

SEQ ID NO: 2377 - DNA, 1600 bp, mus musculus
tccactgtttctatgagggtgtttcatttttattatattaatcctgccaatccattagcatgggagatctttccatcttctgagatctttgatttctttcttcagcgacttgatgatcttgtcatatagatctttaacttccttggttagtttcataggttttctatctcccggttgtttacctttgtgattcctttattgtttctatttccagttttagatcctggatggttttgttcaattccttcacttgtttggtagtattttcttgcaattatttaagggatttgtgtgtgtgtgtgtttcctctttaaaggcttctagctgtttacctgtgttctcctgtatttctttaagggagttatttatgtcctacttaaaatcctcaatcatcatcatgagatatgattgtaaatcagtcttgcttttgtggtgggtttggatatccagggctcactgtggtaggagtgcttggttctgttgttgccaagtagccttggtttctattgtgtatgttctttcccttgcttgacatctgcttttcttgacatctggttatctctctggtcttgctgtctctgactatggcttgtctttcctgcaagactgtgtgtcagtacttctggggaaccaattctctccaggaggatttggttatggattgctgtgtcacagggtcagctccagggctcatatggaaactggaagtatcctgtcactgtctgttccttggtttctgtatcctgatgaattgagtaaggtcccacttgtgccaagaatttgagtagaagtggtggtcttacctgtgctcacaggtgtgtcagccttctgggggactaacactctcctgatggtatttgggtagagagtgctgttgcacaagatcagcaatgggtactgtggcatagaatcatttctggttacagacagaaactgtaaggatcctgtcccaggcttcttctcatttccagttccctaagggctctgggtagatccctcagagcagaaatggtggtcttacctgtgctcacaggtatttctgcattccgggaaaccagctctctctggatggtatttggatgtgaagtgttgtggcacaggatctgacggtaaggctttggatgaagacacaacacacatttctttctagacatgcataagtcagtcttgaacagactggctgacttctggctaaatttaatataacttaaaggtgatatagaaaatacagtaatataattgaatactagacattgaatgttataacatggacttgctaagccaaagtgcccactgctgcagtaatggtaaaactacttatgatggtaccaaaaacctctcttagatattcattcaggtgggcataggataagcttcatgctggatattgtagacatgtttcacccttggctacaaaactcatagacagtaggttaaaaaaaaaaaaaaaacctactggtttgcagcaactccccttgaagttgaaaccttccaccttggaggtatgcttattcaaatgcataatgttaaaagacacttcaaacatcagtatcatttaagctgaagttattcaaaacaggagatatttgtggggaggcct

SEQ ID NO: 2378 - DNA, 1000 bp, mus musculus
ccctgtcattcccctacattggggcattgaaccttcccaggaccaatggcttctcctcccattgatgccagaaaaggtcatcctctgttacatatgcagctggataccctttgttggtgttttagtccctgggagctctggggtgtgtctgattggttgatattgttgttctgcctatggggtggcaaacccctttagctccttcactcctctgcctaactcctccattggaggagcctcatggttggctataatcatcatcatctgtatttgttgggctctggcagagcctctcagagggcagctataccaggttcccgtcagcaagcacttcttggcatcaaggatagtgtctgggtttgatgtctgcaggtgagatagatccttagatggggcactctctggatggcctttccttgagtctctgttctgttctttgtctctgcattttctttagattggaacaattcaggcttcatatatttgagatgggtgggtggccctcatctgtcaactgggggctgtgcctgacttctggctatggtctctatatgttctctctcccctcttttgggtattccagctaatatcatccttgttgtgtcctgggatcctcttgtttccctgtcatctgggactctctaatggctaaacccccagttccttatcccttcactgctacaaacctctattcaatttcctgaccttatggggggcacatagctccagctgcatatgtaacagagaattgccttatctggcatcaaggggagggggcactcttggtcctgtggaagcttgatgccccagtgtaggaaaacgctagtgcagtgaggcaaactgggcaggtgggtagaagagctccctcatagaagcagggggaaggagggaggagataggagttttgaagaggggaaaccaggaagggggataaaatttaaaatgaaaataaataaaataaccaataaaaaatggacactgaggaaatgaaaaaagagaa

SEQ ID NO: 2379 - DNA, 1000 bp, mus musculus
gtatgttgggttttatacattagaaaatattgaaaattgccccggagctccattgtctgaccatttcaaggccagtgtccattacgcctgcccaacagtaaccaaccagattagatccctcacttccatgcctctgcctttccccaagggcatgcctaggtaccctcagttacttgcatcctatcacttgatgtccattgtctggtcactgctctgccatcttccatcaggcaagccaaacaaggaacatttatgccaccccaacaaagtcaggccccttcccccatatttcctggacaatcacctgggaaatacccagatgccctaagctacctgtgggttgtcttcacaagcttcattgtctagtcaccactctgcctgtctccatcaagacaactgaacaacaaacatctaggcctacaagtaagacctgatacaccaagaacatccactcgcaagctgcccaacaggaatgtgctgcgtggtgaacattcagaataggactaacttaccaatacatgctacaacaagaacatccagccagggacaatcagatggtgagaggccataataagaacacaaacatgaagatctagggtaacttggcacattcagggcaaagctgtcccatttcagcaaacccgggatattctaagacaactgaagcaaaagaaattcaaacttataatcatgactacaagaattaatgattactggtcattaatatttttcaaaccagtagactcatttccccaataaaaagacacaaactaacagaatggattcttcattctgttgaatacaagatacatatctcagcaacaagggtagaaattactttagagtaaagggctataaaattttttccaaagcaaacagatgaaagccaaaagctggggtggccattctaatatcaaatgaaacagactttcaatcaaaagtaataaaaacagatgggtaaggacacttcatactcatcaaagaactagatccacccaga

SEQ ID NO: 2380 - DNA, 1200 bp, mus musculus
tatatatatatatatatatatatatatatatataatttgtgtctgtatatgttatatgtgtccatgtgggactttgaaaggcagactgttctctggttgaactaagttcaaaccttggatacccagcagattaatctgcaagggacagaaggcttgtttttggctcctgacaggaagccccagctccataattctgtggtcttcagtcatgtaggctgtctggactccacccccacagttacctgtaaggtagcccaacccactataaaaaaagctgcttgctctctcctcattctcttatcctcttacctcttattctcttgctcttactcttgctcccttgctctccctctctctcccttctctttctcctctctccatgtttccatgaccatcctctgcttctctactctctccctctctctgcctttctacaataaacaccttaaaaccaaggaccatctctgctcatctaaacccaccctgatggagtaatggagtatgtctttcactaacaagctgagcatttaacttccttacaggaggtctgcctgtgcaccagtcatggccaccagccaaaccaacctggccactgagcaagctaactgagcatgtcagactctctcctctctgcagcaacctgccagagctgtctccccctaccattttcccttcagcctccagtccagagtctgcccaagggtacattctcctcaacgtgcactggcatctgggatgtctgagagtgagaatctgttgttcttggcttccatgctgcccacggacctcagaacgggctcttccatggtgctcagcagtctgaggtgcccaagagttggagcctgacttaggcagttctatggggatcccagattttgccatttcctcacccctggagcaggatcctgtggcttctcacagttcagtggccacccagtagttccatgggctctttgacacagtcaatagatgagattgcttcaatgaaagcatatgccttactgtcagttgcttaatagaaaaacccatgtctcaagaaaccaagaaaattttttgattcttaagaaaatgaatctttgtaataccatgcaaactagattgtaatacttctaggcaatcattgtaacagttacagcattctatgtttttgaatttcaacatctttaagcctccctgatatgttttatacagcttatttgg

SEQ ID NO: 2381 - DNA, 1400 bp, mus musculus
cctactttcccatcatcttcccactaattgacctctacaaagtaatattgtgcttaatagattaaatatatatatatatatataatttgctttgttcactcctctgttggagacctagattggtttcattttagatatgaacagtgctgcaaaacaacatttgtacaaatatttccatgatatatcaaattggagtcctctggataaatgcccagaaataatatggataagataaaattagatttagttatttgagagttatttatactgatttctattatacagctttcttatttgaactatgtaattcaaattttaaaagtttgaaagaagggctcaacaagagattgggtaaacaggaggtgaatctatccaggcttaaaagcaaggtagattatttggatcactcattcactggaaatgtcaaaccttcccccaaaattctcaagagtgaaaaccatatgaaaattcttgaatactattgttgtgccctatttttaagccccaaaagaccaccaggatccaactctgatgcaaccacactagaatctctttattagaaactgaaatttagtgttacttacggctgaccctgatacagcaggacggtttgatgcagcagccccaaaccccccagggcacaaggatttataggaaatggcaagcaaccaaaggggtgtccagcctggcaaacatctaattgaatgactattgtatgttgacaagtgggtgctctgaagcaaaaccataaacaatcacaaatggtttgaaagtatatttgaaacaatcatactcattttgattcgctgttgctaggacatagctagggaataaatctggggtatgctcagtggaaaatccctagggtccttcctggtacttaggtgtagcttggtttcagctacaggtcaaattctcaggctcttttatttctaagatatagtccagtccctagatggagtagatttggccttagactgccatatccagggatccaccccataatcagcttccaaacgctgacaccattgcatacactagcaagattttatcgaaaggacccagatgtagctgtctcttgtgagactatgccggggcctagcaaacacagaagtggatgctcacagtcagctattggatggatcacagggctcccaatggaggagctagagaaagtacccaaggagctaaagggatctgcaaccctataggtggaacaacattatgaactaaccagtaccccggagctcttgactctagctgcatatgtatcaaaagatggcctagtcggccatcactggaaagagaggcccattggacaagcaaactttatatgcctcagtacaggggaacgccagggccaaaaagggggagtgggtgggtaggggagtgggggtggg

SEQ ID NO: 2382 - DNA, 1600 bp, mus musculus
ttatatcacatgttcctgttgtacaaccacttaaaaagtctcaattttaggcttcatatatatataatttctctgtatatgttatatgtgtccatgtgggactttgacaggcagcctgttctctgcttgagctaagtttaaaccttggataaccagcagattaatctgcaagggacagaaggcttgcttttggctcctgacaggaagccccagcttcattattctgtggtcttcagtcatgtaggctgtctggactccacccccacagttacctgtaaggtagcccaacccactataaaaaaagctgcttgctctctcctcattctcttatcctcttacctcttattctcttgctcttactcttgctcccttgctctccctctttctgccttccctttatcctctctccatgtttccatgaccattctctgcttctctaatctctccctctctctgcctttctacaataaacaccttaaaaccaaggaccatctctgctcatctaaacccaccctgatggagcaatggcatatatctttcactaacaagctgagcttttaacctctctacaggaggtctgcctgtgcaccagtcatggccaccagccaaaccaacctggccactgagtaagctgcctgagttattcagactctctcatctctgcagtaacctgccagagctgtctccccttaccatttttctttcagcctccaggccagagtctgcccaaggatacattctcctcaacgtgcactggcatctgggatgtctgagagtgagaatctgttgttcttggcttccatgctgcccacggacctcagaacaggctcttccatggtgctcagcagtctgaggtgcccaagagttggagcctgacttaggcagttctatggggatcccagattttgccatttcctcacccctggagcaggatcctgtggcttctcacagttcagtggccacccagtagttccatgggctctttgacacagtcaatagatgagattgcttcaatgaaagcatatgccttactgtcagttgcttaatagaaaaacccatgtctcaagaaaccaagaaaattttttgatccttaagaaaatgaatctttgtaataccatgcaaactagattgtaatacttctaggcaatcattgtgacagttacagcattctatgtttttgaatttcaacatctttaagcctccctgatatgttttatacagcttatttggcctcaggtatattttgaaatatatgtatatgcaaatatgcatgtaacaactattcataagaaggaggcaataaatttgaaagagagaaatgaagtgtatatggaaggtttagagagagcaaagacaaggtagaaatgatataattatattataatcacaaaaataaaagaaaaaataagtcacttcctacaatatagacatatataattgaaaataaaggtagatcctgaaatgtcatgtaaaatagtgaaaaacatgcatcttcatagcataaaatcagaaactcaagtacatgactgttgaatgaatcaaaccaaatttcttcttacagatattaactgaaaaaaattgaaattttacctgatacttc

SEQ ID NO: 2383 - DNA, 1000 bp, mus musculus
atatatatatatatatatatatatataatttgtgtctttatgtgttacatgtgtccatgtgagactttgaaagacagccttttctctagttgtgctaagtttaaaccctggagccccagcagattaatctgcaagggacagaaggcttgtttgtggctcctgacaggaagccacagctccataatcctgtactcttcagtcatgtaggctgtctggactccacccccatagttacctggcaacagcaaggtagtccagcccactataaaaaaagctgcttgctctctcctcattctcttatcctcttacctcttattctcttgctcttactcttgctcccttgctctccctctctatgccttcccttcatcctctctccatgtggccatgacaagcctctgcttctctacactctccctctctctgcctttatacaataaacacttaaaaccaaggaccatctctgctcatctaaacccaccctgctggagcgcaatggagtatgtctttcactaacaagctgagcatttaacctccctacaagaggtctgcctgtgcaccagccatggccaccagccaaaccaacctgaccaccaagcaagctgcctgagctagtcagactctctcctctctgcagtaacctgccagagctctctccccctaccattttcccttcagcctccaggccagagtttgcccaagggtacgttctcctcaatgtacactggcatctggggtgtctgagagtaagaatctgttgttcttggcctccatgctgcccacagacctcagaacgggctcttccatggtgctcaacagtctgtggtgcccaagagttggagcccaacttaggcagttccatggggacccaagattgtgccatttcctcacccctggagcgggatcttgtggcttctcacagtccactgcccacccagtagttccatggggtcctcgacacacacaatagatgtgattgcttcaatgaaagcatatgcca

SEQ ID NO: 2384 - DNA, 1000 bp, mus musculus
ttgctaacatagacaggtagtcataacgcttaattaactataacattattttttttctaaaaatcatcccagcaccatggaactttgtaatgtaacaagtaccttggaattccttttacttggtctctcagaggaccctgaactgcagcctgtcttatttgcactattcctgctcatatacctgctcactgtgcttggaaatgtgctcatcatcttggccatcagctctgattcccacctccacagcccaatgtacttcttcctctacaacctttcattgtctgacatgggcttcagcagcaccaccatccccaaaatgctgataaacacgcagacccataacaaatccataacttatgctgcctgtctaactcaggtgcctttcttctttctttttgggtgtatggacagcctcttactgactgtgaaggcctgtgactgatgggtagccatctgctattctctatactaccaaataattttgaacccttgcctatgtaaatgtttggtcatagtgtcattttttattagccctatggattcacaggtacacttcttcatggtgtcacaactaaaattttgcactaatttagaaatccctcacttcttctctgatggtacagagattctaaaacttgcatgtactgacattactatcatcaacatagccatatttcttgtcaacatcattgctgggtttctccctgccttaggaatcttttactcctactataaaattatttcctccattgttagggttctatcgtcattacagaaatataaagatttctctacatgtggattccacctgtcagttgtttgcttattttatcaaacaggtataggtgtgtaccttagtacatatatttctagttcttccaaggaatgtgtggtggctttggtaatttatacgatggtggttcccatgatgaatcccttcatctacatcctgaggaacagggacatcaagaataacctccagaaaatttttactcaaata

SEQ ID NO: 2385 - DNA, 1200 bp, mus musculus
gtgctcacttataaaccggtattagccataaagtgcagaacacccatgctacactcaacagatccaaagaagctaaacacgaaagaaggcccaaacaaggatgcttgaggaataaaacagtcatagggggcagatggtgggagggaactggatgggagaagggatggggagggaaatggaggagttttcaggatcaagtgtggagagagacaggggagactgccagagggccatgagaatgaatagaaaacttcagctggtgggaactggggatggctcacatcttgaggacttgccagagacctgagataggagaggtttccaaggatccttgtaggtgaccttagctgagactcacagcagtggggatatggaacctgaagaggctacctcctgtaggcaggcaggaatcatagtggagcaataaggacaccaacctacccacagaactttcaatccaaaatgtatcctgactacaaaaaatgcaggggtgggaaataaagcagagactgagggaatgttcaaccaataagctgcccaactagagacacatcccatagacaaacagtaatccctgacactattaatgatactatattatacttgcagacaggagcctagcatggctgtcctctgagaggctccactcagcagctgactcacacagatgcagagacccacagccaaacattgaatggaccctggggattcttatggaagagtagaaagggttgagggcccccaagggaataggaactccacaggaagactaacagagtcaactaacctggacccttaggggctctcagagactgaaccaccaaccaaaaagcatacagaggctggaactagcctcccttccacaaaaaaaataaaaaaggcccacatttatgtagcagatgtgcaactaggtcttcacgtgcatcccaaacaactagagtggagctgtccctatggctgttgcctctctgtgcaatccattcccttaactcggctgtcttgtatggcctcagtgggagaggaagcgcctagccctgcagagacttgctgtgctagggtaggggaatacccaggggcacctccactctctcacagaagaagggaaagagggatttggaaagaacttgggggggggggtagcatgagaagagggaacattgatcagaatgtaaagtgaataaataaagaattgaataaaaa

SEQ ID NO: 2386 - DNA, 1200 bp, mus musculus
ctttgagacagtctctctatgcagaccagaatggccttaaactcataaagatcacttgcctctactttacattgctgaaagtataggtgtgagccagcacacccactttctgtgtccctaaggatggaacccagccctttgtgtgcatattcaacactccacccatagagtcaaatctccagcctgcaagaggattttttaagttttatcacacttgttaataattgtgtgtgcccaagagcactcacatggagatcagagggcaactttcagaagtcagttctcctcctccatcatgtgaggcctgggcatggaattcggggccttaggcttcgtggctcctgcacttactgctgagccctctcatcggccttgaagaagattttgatccacgtttctaaaacagctccacgtctgaagctcctgggccaggcaggctgagtgccaaaaggtcgctcatgcctggaactggagcctgggtaaagtgcttactgcgtcctgtggcaacagctattgtagaaccacaatagcagccatccagacctggggcgaggggaagtgccacctgtcactagcagacaatcctcctgccagcagaggggataaaccatctgtggctctccttcaggccactctgacccccttgactggggcttatctcaaggcaactgtctccagcaccccgggaggtctggctgaggttgaggggcatctcctaggccccttctgttggatttacaggtactccccttccaagctgtttagacattaactctgtcaagataagccaacaccaacagacctgggctctatctcaggcacaccgtggaccagccctggatcctgggcttcttcctggtcctcactggcagccccttgggccatgctgagcctccctcatgagtcacccaggcagtgctccccaatttgactatctaatcactgagttcctcttgtgtctcttctggcctctaacaggtacttccaggtgacaccctcagccaccacacacacacaccgagccgtgaaggttggcagttctaagaacatcagtatctatgcccactcagattccaggagatacctcttgaggtgaccaccatggtgtgggactctctggtcaagaagacagtgctgtccaggagcctgatcattgtcagtggaaaatggcttcatggttcagatgcctgctccaatgga

SEQ ID NO: 2387 - DNA, 1200 bp, mus musculus
aggttctgtccccgtggggccatgtccgtgtccacattggagtggtttcatagtgtttgtctgcttcctgcataccttgcacttagcatgtgccagcacctctgaaagctctggggtgactagtgtgcatcaccacaccgggcttaaccctagacttccagatggcttccactgccatctgcggtggcagcccttgactgggagaaccctgaagaagctgtagttggtgttggtggaagggtggagtgctgaagggaagatgtggctgcggccttgcaggcatgaggctctgagttccatcctcatcagtcaaagagatgggtgtggttccaaactgagaactatttaaacagactcttgtcaacattagtgggagcctgccatctgagagccctcatctctcttctgtttggtctgttgtctttcccagcttcatgtactggacagattggggaacacccgccaagatcaagaaagggggtttgaatggtgtggacatccactcactggtgaccgaaaacatccagtggccaaatggcatcacactaggtatatctgaggggtggtctagcctgatgggggtgggcacactgaagaggacaaagtacatagttgagaataggtgataggtattaattaccctcttcccatgcagctggaagggtcactggattaaggcagaagccacaatgtagccctcagcttcctatgtagctagagagatcccccaaagctataccctttaccctaatctagtgacctgaattttttcctggcatgttttgaaactttctggaacattttagaatcttctaaagcatactagaatatttaggcaattgaataatcttatctcacctctggcctctccatattttcgtatgtgtttgtgcgttttagatctttccagtggccgtctctattgggttgattccaaactccactctatctccagcatcgatgtcaatgggggcaatcggaaaaccattttggaggatgagaaccggctggcccaccccttctccttggccatctatgaggtgaaccctgggaatgtgaggggtttgtcttatccattcaagccaagactgaggaaaagctcttgtctagagatttagaaagaagtattggaattacagctacttcatggagttgattgattgattgattgatgctaggagtggaacccagagttgattg

SEQ ID NO: 2388 - DNA, 1000 bp, mus musculus
attgtagcccaccctctatgcccagcccccctcacacagttccttcctctatctcccctccccttttcctcttagaagggagaggcctccctgggtaccaacccagcctggctcatcaagttactgcaggacggggtacacacgtcctctcccattgaggctagacagggcagcccagttaggagaataggctcctaggcaggcaacagtgccagctctcctattccagatatgggagacctgcacgaagaccaagcagtacatctgctacatatgtgtgtgtggggagggggagttgaggatgggggtagaggaggatggaggttgatggctagatccagccaccaaagtatgctctttggttggtggttcagtctctgggagcccctaaatcgttcagttttgttgactctgttggtcttcttttggagttcctatctcctccaggtcccccagtcctttccctaaaacttcaaaagactccccgagctccatctaacttttccctgtgggtctcttcatatgtttcctttcagctgcttggtggagcctctcagaggacagttaagttaggttcctgtctgaaggtataacaaagtattaatagtgtcaggaattggttcttacccatgagatgggtctcaagttgggccgattattggttggccctcagtttctgctccatctttgtctttgcacttcttataggcacaacagattttgggttgaaggttttgtgggcgggttggtgttcttatccctccactgggggtcctgcctggctacaagaggtggccacttcaggtttcaggataccccattgctaggagtatcagctagagttagcctcacagactccctggagcctccccaaacccaggtctctgacactgtctagagatttcattcgtcccacccacactatccactcccattctccatcatttcccactcacttccccagccctttctaccctgttctctctgcacctgattccct

SEQ ID NO: 2389 - DNA, 1800 bp, mus musculus
caaggtatgtgtgtcacttcttgtactcttggagttcttgcgccatgctgcatgttgatgtagtttaggcatcataactgaataggactgttggttgcctccctcctcagggaaggggaactcaggtcagttccagctcagggatctctgggttctgcatctcaagtacatggactgtgccaccaaaggaatggacatgggactggaaaagtgggacataaacaccagaaatcttggaatttgagatcagcaccaatagagctaacttcttccctagtttccatgcctgtttagaggcaggtaagcatgacctctaactaggcaatcacgggcagtcagacacatagcacagcatgtgaaactcttccccatgcaaatagaacatcatcagcatctcagcttcagccaatagaaagcatttaccaccaaaatcccaccccactccccaaggttcatatagtccctgttcacatggagtaaagcacacaagatatttcaccaaggaatgtataagactggttgtccctgcaagcctacacctgtggactttgaactggccacatggtcagggtcccactgctgtggagactcatcagatctgagcactggctcctgacatcactgctgtgctgctgcagccgctatgggaccctggccacttgcccctcagtggctacccaaacttcattacttttgtaactgttgtatcatttttggcattcctagctggaccagagccctattcatagcagactctgcttcaccttcctcagtctgatgttcagcgacatctgattatccagagtgaagaggcaggctacatactccacatgttctggactttgccctaggagaattatggaaaatgataaaaaccacactgtagaacagagtagatgagtgagttacactgaaaaacacaattcgttggaaacgggaattgtgtatatcaatgagttactaggagaaacatggaaaatgataaaaaccacactgtagaacagagttccaaacctttccaaaccttcagaggcaccctgtcacctcaccaggtcaggagaaacaaggaattacaactttccacctctggggggagccaagggcaacatcaatagcctccatgttttcaaatctcttaggcagccctggctaacaactcagaggacttctcatgtttgggtactggggattttgttagactcttggaaggagcccagtcagaaagagaaaaaagctcattaaagctatatatgtgtatttatatacaggactatgcatattaccgatgttttgatagctaatagtatgattccctgtggatattcaggcatccttattgttactttatcttgcttctttttgttttacttcctacccacttcctagagtcctctcttcaccatctcccttatcagatcacttgtcaccagtcactaccctcttttttgcttcccaaacacctattctagcaatagtcttgttttactttcctgagttttatagttaatacaggctgtgtcatcacatctgaagatatggagatgggagcctcaaatgaaacaggacacatggagtttgtgtttctgagtcgaggtgacctcatgcaacacgatctgttccagatcgtttgcctctatgattttatttttctttacagctgaatatattccatagttcatatgtaccacacttttgttatccattcctctgttgaaggacatttaggttgttttcatttcctagctcttgtgaatagagtataaatgaacacagccgagcaagtatctgtgaagtagggtg

SEQ ID NO: 2390 - DNA, 1000 bp, mus musculus
tggcagttccctatactggggcatagaaccttcaaaagaccaagggtctctcctcccactgatgactgactaggccatcctctgctacatatgcagctagagcaatgagttccaccatgtgttttctttagttggtggtttagtcccagggagctctggagatactggttagttcatattgttgttcctcctatggggctgcaaatcccttcatctccttgggtactttctctagctcattctttgggtaccttgtgctctgtctaatgtatggctatgagcatccacttctgtatttgtcagacactggcagaattctcaggagacagctatatcaggttcctgtcagcaagctcttgttggcatctgcaatagtgtctggttttggtggttgtttatgagatggatccccaggtgggacagtctctggatagtccttccttcaatctctgcttcacactttgtctctgtaactcattccatgggtattttgttcccccttctaagaaggaccgaagtataatataagagtcacggtgtctcttcacagcatgaaaacacggattttaaaacaatgtaccaaaatcaactccaacctttcagctacctggtaaggagagaggtagaaaagccaacctcaagggaaagcccactacctatcagctgaacaggcccactcccaaaggcacatttccacagcctatatttccactgcagtgcctgttaggactcttccctcagttcagggagattcccaatacctaggcacaggccacaccagtcagaaaaacagagaaactctgctgcagcaaaggcaagctactctcaagaaataagaacaagatcaacaacagacaggcagtgtggcatcaccagagtccagctattctatgacagcaagacctgaatatttcagtgtatctgaaacacaacaaaatgaccttaaaatcaactttatgaagatgatagagaactattaaagaagaaataggaaaaaact

SEQ ID NO: 2391 - DNA, 1000 bp, mus musculus
ccagaaccataaggatcaggcacatcacccagaagaaaggctgtgtgctaacccatattccccctaaccttcatgaattcattcctagcatgcccttccagatgggagccatggactgtgaaaggcttgttgaaggttggatcatctgaccatgagagcaagtggggagacagtgaagagccacagacccagaccctgcgagatgagggaccacagtcagcctcagctggtgaagggtagccccaagtgaagtaggaggaggaacagaatgttcttcatacatgaacagagaacccaggcaggacacagcatttacacaggcacctgcaacacatgatacctattctctgcaaccctgtgtgtggaaggcatcactggactatgtagttcagaacagaagcaagatgctgaccaagccctctgcccttccagggtcctggtcagattaggattgtaggaggcctatgctctgaggtgactgtggcatttcctgtgtaaatgaagcccaaagatgtataaaccattcacatacacgagcagatccagcgcagcttctccccagcaccaagttcttcccctacagcaatggaatgtcttgagagcatacatgaccaccttattgagcactaaccaagagacttaaggaacaaatagggtggggctgcatacatctgcacacatctggaaggcctagtgaaacaagagggtgaagcagtctacagaagggaaaatctgaactgtgtagcattttaacgtaatcttaaatattgcacagtctttcagaggcaataatgttctaccacatgcaccacagaaccagaaattccagatcttgacctgggcatgcccttctaccctgagatgcccagctaccctgccaagggccccactggccagtaccactatgtaggaggtacaaagatggcagcaaatggatatttgagacagacaacccactttgtcctcaacactctggtacctctttgcacattccattcag

SEQ ID NO: 2392 - DNA, 1400 bp, mus musculus
tgtggtgttgagaaagaggatggggaaagtaatagaatatatatgacatccaagtggaaagggaattaattgggtgtggaaggtatgggtggcaggaggaggtgggagaggggagtgggcagaggggatcagtggtgctaatgtgtgagaacactacagtgaggccccctactttgttattgtgaatgtcaaataatgatatatattattactatagctatatagtttatattatatataatttagtttttattccaatgcattgggatttattatatgatagccacacatctagcttggagaatattcaagtgcattcacaaagaatatatattctgatcacaccaatcaagagacatcaatacagacccacaatgttgtcctgttggcaaggatgggatgtcttggattaatgtatcatattgggattctttgatctgatggctaaactggttatgacttggaggtggacatgtgggtggcaggtgtgatcctgtacatccacttgtgtggcttatcccctctccaaagtcatgaggggacaaagacgaacatcatccaagtgggccagtttgagttcctctctccttactgggaaaacatttctgatgctgccaaagatatggtgagaaatttgctggtggtggaccccaagaagcagtatatggcccaccaggtcctacagcatccctggattgagatggttgggcatcccagcaaagtgaacccacaggagaatttccccaacagcgaaggtcacttccagagccagcacaagaaggttgtggagcaggtgtcataatccttcctgggtcatctgtctagcctagtctccttgaggacagagaagagaggggatgtctacaagcaaggctgagcaagaaacttctccacagaaccaaggaaggagaagaacacctggcatattttaaagcacgttagaaaagcaacttcctaatgttgaatgatgtaggatatttttagatttgtatatctgaagtctttaatagtttttggataagaattgccatgaatgaagaattttgataataatgatgaattctatttttctccttgtagtcacattcatggtggactccatgagtgtgattcacatcacttgagatccccccacccccacaataaatgaggtgatttctggcttttttttaatctcaataaaacacgacgaataacagagaggaaaaaaaagaatatatattctcctgccactatcttggatgttcttgtcactctcagttaggaccagtctgttagtttaatttggctcattggctttggttctggtccaaggttgggggactgcatatggtgatggccttcttcctggcagagtcctgaggtggcacaaggatcgacatggcaagagaacagcaata

SEQ ID NO: 2393 - DNA, 1200 bp, mus musculus
agtaacatacaaaggcagacctatcagaattatacctgacttctcagcagggactctaaaagccagaaggacctaggcagactcttgcagtctctaggagaccacagatgctggccagcccaggatactatacacaccaaaactttcaatcagcatagatggaaaaaaaaacccaagatattccaagataaaacaaaatttcaacaatatctatgtagcatgaaatattaaaaagcaatccatggtatcccagcaaggcactgggctggctagcccggcactggcaggcatggatggcctgttctcatctcatagagactctctgacccagagctctgaaatctctccacccagcttgctaagttctcactggcaggttgctaccacaccagccccatgcatccaaattttcatggccttttggggtacacttcttgcaaacccaggttttgccaccatacctttctctctagaacccagttgagtcattgtgtgaaggaaaaccacaaaaacttagtttagaattaacaggtaactcaaatattgggctcagcaactagcattctaatttataagccagtctaagttcaactcctctggtggtgaatcctgggggttctgccatctaaactggggacctcttgttagccacatattgtcctctaagctctccatgtcccaaaacaagtatcacgctcctgcctcccctcttcctttcaccgacctgaaagtcctgcctgcctactccagtgattggtcccctaaaatctttattcataaggagaaggttctgccacatatatatctataaatccatccctacagaagatactagaaggaaaactccagcccacagaggttaactatacccaagaaaacacagaaaataaataataccacaccagccaaactgaaagaagggaaacacacacacacacacacacacacacacacacacacacacacacactgctattataaacatcaaaatgacaggacttaacagtcattggtcattaatatctttcaacatcaatgaactcacttccctcaaaaaggcacagtctaacaaaatggatgtgaaaagggaacccatccttctgttgcttacaaggcatacaagaaaaaatacctcagcagcaaagatagacattacttcagagtaaagggctggagaaaagttttccaagcaaatagacc

SEQ ID NO: 2394 - DNA, 1200 bp, mus musculus
atttctgagctttttaacaaatcaacatacaaacacatacacacacataacacacacacagagagagagagagaggggggggagagaaagaaagagagagaagaagaagaagaggaggaggaggggggagagggaggggaggaagaggggaggaagaggaagagaagaggagaggagaggagaggagaggagaggggaggagaggggaggaagagagaggggagggaggaggagagagggcgagagagggggaagagagagagacctactaccctaatagagctttgagtggggcagtaaaaacagcaagctgagaatcaccatggtcacaggaatgcacaggtacagcgtcacttcctgatgatgtcactatttttgcttggtggaagagagagaagagaatgtcacctgtggatgattcatcttcgcagcagctggtttggtccaggtgtctggccccagggagaagcttctgtgtttggaggttgtggaggtgcttgccaggcagagtcatagactgttccactgagcatgttcagtgggccaccatgggaggattgcctgagttgggacagccataaactccactatctctggtttgggaaatatctcacttggtatcctcatttcattctttgaccctagagatttatagtttccagctacaggaaaggtccgtattttcatagcaagtggtaaaatatctctttgtcctttcaaagacatgagttccaagctgagaagctgtgtgactatgggagagggatcttctgtctgcatagtgcagctgtcagccttccctacagaagcggtaaggtgatgaagtccttgtggggacttcaagactccttttgtatcttcctggagtctgcacacctgacttgctcacggcccaattgattttagagattgacaatccgcacatactctgttacagaacccacgtggctggagcactggggagagcattatctccagcttcgctgaacttcccacatgtagcctttgaaatttttcccgctcaacggtctacccccctccactgcagccttgaaagaagatgtctgaaagtagtctatttttagtatggagctggttgtgaagagatcatgagtgggagaactggtttcagggaaacttgcatgtcctcaagctgccctttggttgtgtgccccacccccgcagccgtacccccccccc

SEQ ID NO: 2395 - DNA, 1200 bp, mus musculus
gaagttcagtgcatcatggcagagaaggtctgtggacacagtgatgggttgactagacacattgcctctgccgtcaaggaaagaaagagaggaatactgagtacaccaggcttccctgccccttcccacttttattcagttcttggcacacagcccacattgaggcctagtcttccctctacagttaaatatatctgtaaacatactcacaaacacacctaaggaaagtgccttagatggttctacaatccagtcaagccaacagtaaaaattaaactcacctataaagtaaataagtaaattaatgaaaaaaaaaggacagacaaacagatagatgcttaccctatgtatatatgcttctcccacgcctctgctgacctgaactttcagaatgaagttcacacttgtactctgggcagccttcttgctctgatatcagatggtgctagttagcagctatctgaacttgatacctctagagccagaattgaatggatgttcaccttgttcctaatctccgaagttcagatgcctttcacaatatgatatatactctgtaatgacacagtcaaaaaacacatgcatagcaaagatggtttctttcttaaccaggacatttcttacattgttgtgaagagaaacatgaagctttgttctgctgctacagaactaagaccttaacatccttgcatgtacacacattcacattcaaaactctccctctcacacagtgttgacaaggtttgtgtctatttcccctgtgatctccacaactccgagcccccctctcctgcacatggaggtcagcttccatgtagaggtgaagtggtaaccacttgatccttttgcagcagttgtccttggttcaaggtgggaatatgaagagttgatatattccaaggtaaatgagactcaaacagaatttgacacaggatgaattccttgccagcgccaaaggtggttgatgtgtctgccaaaaggacatccccctgtcttccattgcagtccaggcttgcagagcatgctggcttgttttggattgaagcacagttctgacacgatccaggaaggtgctgccagtcttggcatctgctctggagatatgtacagaagcagaagccaggaaaagaagtggcagggcctgggtctgtcgtctgccttgtttgcactggaattaaataaactgagactcatttaaag

SEQ ID NO: 2396 - DNA, 1400 bp, mus musculus
ttgaccaagtctcaaagcttatgtattcatctctctggcagataacagggattctttgaaaaataaacaaaatggctgttcatctccaatatttgaagcatccagcacagggctggtacacagcagatgcttaataactgttggttataggaatgtctgattgcctgactcacggctcctctggctcacattgctgtccaaagggacttttttttatccatgcgactcttccaaattttggcccctccctgatgacaaaatgcctttatggacgaaagtcttttcttcctgcttccagttggacaccgtcacgccaagtgagggaattcattcccagcttcagaaaccaccagccaaggaaatctgaggttattgcttgctgagaaaaataacatcagggtagatgagatcagtctaatagctctgttgcacttgccaacgggactgtgaaattcaacgaaacacccgctccttcctgtacccacccagacagccagaccctcagggtccatcggtccttcctgttgactggtcaaacatctctctctctctctctctctcacacacacacacacacacacacacacacacactcatgaaattgggcttgcactgttatttaattgctctttcccatgtatctgtaaggacagctgaggcctaaacaccggtttctggtaccagcttgccacgaacatctccaaatcctgggagagatgaatggcatcaccaaactagcccaagagtgtccactcttcagccactggaaactatccctgtacaccaaaacttgccatcgagcactaagcccgtgacccactcaccattgtatcaaagcttcaggcctcttccaagtcagccccaagtttagaaaaatccattcttgaagtcagatcataaaacgtgccgacaaataaaaagtctccggaaacatagaatggcaattgcagtcttggtcacctctctacactgggtagtcatagaatggcaattgcagtcttggtcacctctctacactgggtagccatagagttcacaaaatcgcaaccaacaggaaaaggaaggtgactcttgctgataggtcaagcctgcagtgtatagctgaggaaaacaaaggtcaggcagctaactttacctgcactcgcattgtattagccttgagtttatctcctttgcagctttgttggaatgccgaatttgagggtgacttcgtagtctttctagactgttcgcagcagtcctgtgtttgtctgctcattcagggactgactggcttagacactttccccacagttgaagaataatcctgctcttgacaggggttgcttatagctgcttctggtcatcttctgatcacgtgatcatgtggtgaagagaatcagcaagtagccgggtatgtc

SEQ ID NO: 2397 - DNA, 1000 bp, mus musculus
tctcattacctgccaccgttacaaattctcacttccctgcatattcacttggaactgagtcgcctaggaaacccgggaaacaaacacagaggaggaggagggcaggagctgtgggaggagggagtgctcatggctttggtcacgtagggaggtagggaacatgggagagggtggactggggcgtcagcttcaatgccagccagatggagtcctcctccctgcgcaagtgaatcagttctgtgtgggtcacctgagagatgcctgggcaagtattaggaagccccaatagatttattaagaacgaactaacctctctctctctctctctctctctctctctctctctctctctctctctctctctctcaggttttctgagaaataagcctaacttttaaccatactttctgaagccgcttagatacacaaaagtatgactaagaatgatggctgctacatctcgctacacaagtccatgaaacttagttacctgcaacccgtggatcacgtgtattaattcccaactcacagacccgtctgcccaaatggaaccacagtgtgaatgtttgaagcaaagctcactctgcctcgtccatcccagcctgtctccagccgttcagcttccatgaagcgcatccttgttccctaagggcctgactcattcaggaacctccggacccttcttcctcatccagggtcagttattcccattccatttccattttagaacatccctgctctcctctctattccctacagccaaccctagattctttcatggctggcttcacttgcctataatccatcggttgcaatgctactgaagctgtgattccaaaatggatcttatggaccagtgactgcctcggtagcaagatcctggtcctcagtcaggcatgtaaggttcttcccacccccatccacacccaaagtagaagtacccatatgtgtagttccttcaacaagtgagacaagagtctgtgcctttcagggatgtctc

SEQ ID NO: 2398 - DNA, 1000 bp, mus musculus
gccataattaatttgagatttatttttattggagaactcgagtctcgtctgaccttagccaaacaaggcagcttgagccgcccctggatgcgcttgaatgctggggaatatttctgcaggaaggctctgcaggagcgcctgctttgaatttgtttctcagacttcatccactcacagattgaaggaagatttagagcctctgtacgccctgcccgctccccacgctagttcttgccttagcaccgaccctgttcaaaactctacgtgggaggccgcagcgcctgcagagccgcgcagggggccaggccaggagggtctcagagacccgagccccagacaattggaaggcgaacccccagaccactaggcgtcgtcgagaaaaccccaagggagtcggagactgaccagagagcacaggatgacaggaggtggagaccagcccggtgtcgcgaccctcatccagtggcggcgccataatggggactatggaggtcgcgggtgggttcagcttctggaatctcagccaacccgacctcccagtagccccatacaatattctctccaaatacggaccagtatccttgaagcgcagcttcaggacctacatgccagaaacttatgggcagtatcactgtgcaggttcaggacctagcagcctccctttgagtgagtcaagggagaaggaggatgtcacccccaaaagcagcatgggcaaaatcctcaggctgatagagtggaggacagaaagaagagaaccctatcaggtttgtgcaggtgtatgtgtgtgtatcagatttcaaggaaacgccccatttgatggaataggaatgtaagtactgtgctattattggaccgcattattgcactgggtctctggtcttctccatccacctcctaactcagattccgcgtgtgtgaaagtttaggctggaccactggattcctctggactcttaacctctctgaattagtgtccctctctgcgcaatggccacagact

SEQ ID NO: 2399 - DNA, 1200 bp, mus musculus
tttcaatatgcccttgaaatacttaaaatagctacataacaaagcctgtgactatttttacaagtttatcttactgtgtaaaattattgtcattggtcggcatgatttaagatgtgtgtttgtgtgtgtgtgttcatgtatatgtgaataaaaacattttaggatggcttctgaacttaacagtatagcactgatatgcaggggtagttgcctgctagtatattctctccccttcccctaacactgcatctttagaaaaatagagttttcaaggtcctcatgatattcaagcccaagaaagcatgtctctgcatatgttctgactgtgagcttgggggttttgtgggactcctaagattaggagcagatgcatcctctgactctcttgcctgctcttggaactcttttcctcccactgggttgccttttccagtttggatttgagcgcttccacattgtcatattgtatcttgttttgtcctgtttggctgtcttgccttgaagccttattcttttctgaattagaaacagctggggtggctctgggagtcggggtggaaggcaagggggagtgaaaggaggggagactgtggttgcaatgtattttatgagaaaagaatttgtttgcatatataattttttttttacaaaaaaatggggataaaccaaaccaaccaaccaaccaaccaaccaaaaaaagtacaagacagttattttaaagccaatctgtaagtacctgcttattctacttgaggctttaaaatatcaggtaaacatataacaataataatgtgcttcattacaccacaaacataatttagctttagcagtttctcttcacgatgtattggaagaataatatatcacaaggctgccaggttttaggaggactagattaacctgggtaaagacgctcagttgaattacttgcttaaaacaaatgtaaacaggtgactttcaagtacaagaaatcacaacatggtggagacagaagtaccagatattagtactgtgtgcagttctctcctgggacaacataagaaacccttcttagagaagccattgtcaaagttcacattagaaaaagacttagattttaacaagtagttaatttaaatttgttctgcctgtagttgctaactgttggattttttttataatatcctcccttgtttttagatgaactacattttctttgaa

SEQ ID NO: 2400 - DNA, 1000 bp, mus musculus
agtgcctggtgtgggcacaaccaggcatttacgacaagacttggcacatacagagcctctcgctggtctcagaagggggaacagtgagaactaatcaccaatcccagtgagaccagtgagaaagtagcacgaagaaggaactagaaggcaggaaggcatctgtcaaaaatccattacttgatgtgttaacaagattgttcgggccccctgccattccattggttatagagacctgccctttccataaggacctgggggttctctttatgaacatccctgtagagagtcaagctcctaccagaacaccccaggactcctgcccatctctgcacatttcagggggaggcttcttctcactgcatgtctgcctgtgtccgatggagaagagagtcttttcacaatcgccccctggagctttccctctgataagtacaagtaaaagctatgatgctcacatccaagcaagaggactgtggtgggggttggcaggtaaaacgtggctctatgtgggacaggattcaccctgaattctcaaataccctacaaattaatatgtaagtgcatttaaatatagtgggaatctggctacaggagctaggttcttgatgaacaacagggaaatggagctagctgcaagggtcagatagcatcatgcagacatgtaagatgtccccacccccaccccccaaaaaggcaagaggcccatgctgaatgtagcttgcaaatgtcttaggaaggcatacctaccaacggaagccgtctttgcccacagtccaggttgaaagcacaacagcccctttctcatagtggtgagaaccacaggtatacatccctttgcttcagatctgtggatctctaatgtctgaaagtccatgtgacatcctgaccccaattcagtgaagggacaaataactttgcaaacaccaagtggctcttctaaaacaaggcctaagagagagactgctgacctcagacctaggaagaggccagagcaactctc

SEQ ID NO: 2401 - DNA, 1000 bp, mus musculus; identical to SEQ ID NO: 2400

SEQ ID NO: 2402 - DNA, 1600 bp, mus musculus
tgtgtatatatgcatgtgtgcatatatatacatatatgtatgcatgtgtgtgtgtatatctgtgtgcatacacgtgttcatgtgcatgagatgatgagagaaagaggtaatctaagtacagggcctagcacattgcattttatttaatttcatcttaactaacttggccatggatccagcccactgagatcagcaaaccagacgtttgcagttaccctcatcaccagcctgtgtcctatactcagcatccaccagtgctgacctcacctcttcacatgcacctgtctccctttgatccttaccattcaaggcgggcgtttatatgaatttcattacaggttaagcaacgggaggagggatgaattttcccaagattagaaatgatctgaacccaaacctagttccaatgcatgcccttaactgctagaatatatagccttgtgtcctcatccatattagtgaagaatgggaaggagagcttcagagactatactgataaagaaatagacattaaaagtgcagatgtcagtcagactctcactgtgtaactaacaatactgttttcctaaatatatcttgtcacacactataattttgaggtgcacactgaaggacctggaattatgcgagaaaactgaaaatcacggaaaatgagaaatacacactttaggacgtgaaaaatggcgaggaaaactgaaaaaggtggaaaatttagaaatgtcctctgtaggacatggaatatggcaagaaaactgaaaatcatggaaaatgagaaacatccacttgatgacttgaaaaatgacgaaatcattaaaaaacgtgaaaaatgagaaatgcccactgaaggacctggaatatggggagaaaactgaaaatcacggaaaatgagaaatacacactttaggacgtgaaatatggcgaggaaaactgaaaaaggtggaatatttagaaatgtccactgtaggacgtggaatataagtccagaaacctaagagactctgtgtgtgtgtgtgtgtgtgtgtgtgtgtgtgtgtgtggtgtgtgtgtgtgtatctataaacctgttaatacagcaaggtcgaaagaagcatttaaaagatttttctctaagcaaatatattgttatggtttgcatattcttgacccagggagtggcacgattagaaggtgtgactttgttggagtaggtgtggccttgttggaggaggtgtgtcattgtgagtgtgggctttaagaccctcatcctagctgcccggaagccagtattctgctagcagccttcagatgagcatgtagaactctcagctcctcctgcaccatacctgcttggatgctgccatgctctcaccctgatgataatggactgaacctctgaacctgtaaggcatccccaattaaatgttgtccttataagaggtgccttggtcattgtgtctgttcacagcagtaaaaccctgactaagacatgtatcaaccaaggccattgcatgagcagtttcctatatctgtctgtccttaacagctccccagactttaagattcctcttcctagggtaccctgttggtgctcagtctcagtttatatcccactttctcctga

SEQ ID NO: 2403 - DNA, 1000 bp, mus musculus
taggatagcgaaaactattctcaacaataaaagaagctctgttgaaatcaccatgcctgacttcaagctgtatgacagagcaattgtggtaaaaactgcatggtactggtacagcaatcaacaggtaggtcaatggaatacagttgaagacccagaaatgaatccacacaccaatgatcacttgatctttaacaagtcagctaaaaccatccagtggaaaaagacagtattttcaacaaatagcgctggcacaactggaagttatcatgtagaagaatggaaattgatccattcttatctgcttgtacaaagctcaagtctaagtggatcaaagaactccacataaaaccagagacactaaaacttatagaggagaaagtggagaaaagcctcgaagatatgggcacaggagaaaaattcctaaatagaacagcaatgtcttgtgcggtgagatctagaattaacaaatggaacctcataaaattgcaaagcttctgtgaggcaaaagatactgtcaataagatgaaaaggccaccaacaaagtgggaaaggatgtttaccaatcctaaatccgataggggactaatatttaatgtatacaaacagctcaagaagctggactccagaaattgaaataaccccactaaaaatggggtacggagctaaaaaaaaaagaattctcgactgaggaataccaaatggctgagaagcacctgaaaaaatgttcaaagtccttaatcactggggaaatgcaaatgaaaacaaccccgagattccacctcacaccagtcagaatggctaagatcaaaaattcaggtgacagcagatgctggcgaggatgtggagaaagaggaacactcctccattgctggtgggattgcaagcttgtacaaacactctggaaatcaagtctggcagttcttcagaaaattggacatagtactacctgagaagactcagcagtacctctcctgggcatatacccagaagatgttccaac

SEQ ID NO: 2404 - DNA, 1200 bp, mus musculus
ctgtatccccaccagaagtcctcaattgtggagagttatacttcagcatacttatcacatttttctgatatttttcccattaatttatttgtttattcattttacacccctatcactgcttccccttcctggcccccccttcatacagtcctccccccatcctttcttttctgagagggtggggtgcccctgattatccccaaccttggcgcatcaagtctcttcagagttaggctcatcctctccactgggaccagacaaggcagcccagttggagaatggattccacagacaggcaatagctttagtgacaaccctaactctagttattggggggttctcacatagagactgaaatgtttatctgctacattgctcagggctgtggtccagcctgtgtgtgctctttggttggtagctccgtctcttgagagtcccccaagggagcagtgtaattgactctgttggtctttctgaggagttactgttcccttcaatccttccccttactctttcacaagagtctctgaactctgtctaatgtttcactgtggatctctgcatttgtttcagtcagttgtaggatagagactctcagaggacagttatgcttggcttctgtctgtaaacacaatggagtatcaatattgtcaaggattgatacttgcatatgggatgggtctcaggttgagtaagttattggttggccattccatcagtatctgcttcatctttgtccctgtatttcttgtagacaggataatttttgtgtctaaagttttgtgggtgcattggtgtccttatccctctactagagggataagttcctgcctggctataggaggtggcctcttcaggttccatagcctcactgctaggaatctcagctacacaattcagctaagatcctccacactggctcctgggagccttcctgctcccaggtctctagcatgtcctagaaatgccccctactccaacccctgctagcttcagatttctattcattctcttgtccctttagctgtcttacctgtctctatgcatacctgatcttgacccactccccattcccctccccattacctttcccaccaagctccctctcttcatctgcttcctaagactattttattcccctttctaagtgagatgcaggcatcctcacttgggccttccttcttgtctatcttctttggt

SEQ ID NO: 2405 - DNA, 1200 bp, mus musculus
ggttttgttcatttccatcacctgtttggatgtgttttcctgtttttcttttaggtctcctacctgtttggttgtgttttcctgttttactttaaggacttgtaactgtttagcagtgttctcctatatttctttaagtgagttattaaagtccttcttgatgtcctctaccatcatcatgagatatgcttttaaatccgggtctagcttttctggtgtgttggggttcccaggactgggtgaggtgggagtgctgtgttctgatgatggtgagtggtctttgttcctgttagtaagattcttccatttgcctttccccatctggtaatctctggagttagttgttatagttgtcccccgttagagcttgttcctctcgtgattctgttagcctctatcagcagacatgggggacttgctctctcctgagtttcagtggtcagagcactctctgcaggcaagctcttctcttgcagggaaggtgcacagatatctggcgtttggacctgcctcctggcagaagatgaaggtcagaaacagagcttgtcccagaagctgtgtcactttggcctgtcccagaagctgttagcttctgtagtccacactctcacctgagcagactagtctcgcagggatctgggaaccaagatgagttcccctggtgctcctgcaaactatcctgggtggggcagacacctctcctctggcagggaaggtgcccagatttctgaagcctgaaatggggtctgcctcagaagctgttctctagggaccttgggagtgtctgccgacactgtgcccaaggtgaccaagtgctggcacagactggaagggcttaacctctcatttttaaaggccctgtattttaaagtagttcctatggtgcatatagaatattcaataatggtttaagtatttttgttggatataattctctgtgggtgtggtaatgggaaggataatattggtataaaatgggaagggagtaaggatgttgtttattatgctatacagaacagcatcacaattacttgtccaatctaagtagtaataattccaagagaagaatttttttatataaacaaagaaaaatgaaaaaaaatcaccattttttctatatgtctatctgagttctaacacttagagtaaattatctcatttaattaatattagatgaactgtgaattccatttacatttt

SEQ ID NO: 2406 - DNA, 1600 bp, mus musculus
caatctcccaaaagatttcctggtactctgcctcatagtcttactgttccgactttcctgatattccctgagctttaggtgcaggaattgtgctgcagatttataaattggaacttagaatcaaagatcaattgttctctacaatttgaccacctctagtgttcttcatctattacaaagagaagctttgataggtggtatgaggtgtacatattggtttggtacaaggataactatttagaacgcaggtatgaagagttacacttcattagtaaagtggtgattgtatgttctgctttagaatccatagcttcactagctctgggtattggctaggtttccagtatcacacataattccctcgtattgagctggccttaagttcatttaaacagctgctggttagctcctaggtatgaggtgctacttttcattgtaaggggtgtcttgccatgttggtcattgttgtgattcataggtgatgttactgagttagacaatcggttgtgaggagcgggtgtggccgtggccccaagatggcgcctgggactgctgcaaagtcttatgactggcacctgacttgctcatatccctcaagatagccacataccttgagctgcattgtgcagatgcaccacgacgtaagatcggatgatgtgacaaatgtagtcctgagccaattatctgtacctacgtggactggggtgagggggagtggactggaggggataaagggcgatggcagagagaggtcagggattctttttcctacacatttttgaagttcctgaataaactgtcttgagaaggacgtcgggttcgtcgcttattttctactggttggagatggtagggtagcgacaatcggttgattttcttctttggcaactcaaataacactttgtaatagaatggaagctagtcctccctgggtaggcttttgggtcagatcctgatcaattctttcacatcttctctttgaagtatgtggtatcttcatcaagctgcattattttcaacttcttggaggcaaccaaggacaacagcagtatatgataactttttggagtccactggattcccttggccaataattcaaaatgggtcctcctatttctggtattggaattttggcttgctagtctatgtcctttgggggaatcgttatcagcacagaagtgatcatttcatttaaattgtagatgtgtatgtataataataggcttatatgtatgatatataagtgtaagactattttcaactggaagttccctatttcaagtaagctatatgtattctcattattcacagtttttaaaatttccaagtccatgttcctctctgatgttattataactaataattatgctttttaacaaacaataattatggaacagatcaagctcacttgtgtttacttccttttcatttaatcccctttcccactattgtcctcttttagggaaaatagttttttcccatataatatatacggattacagtttcaccttccttcaacttctccaaattccttctcccctgccattcagatccaatccctttctgtctctcattagaaaacaacagacctctaaaggtt

SEQ ID NO: 2407 - DNA, 1400 bp, mus musculus
tcttgtgatcagaattcacacctaactgggagacaagtttgaaggagataaattagatgttcatggacaggagatgaaaagaatgcattggcacttcattaatttctctttaaagctttggttttattcagaaaaggagtaatggacttccaaaatggaatttattttcatatgagaacaggtatgctcatattggtgagaccttaaattaaatacttcttttctatttccatagaaattatcaaagaatgggcactgggaatcattctgcagcagttgtgtttgtcttggtggaattaacacagcagcctgaactcctgctgcccctcttcattctgttcctgggcatctatgtggtaacagcagtgggaaacctgggcatgatcctgctgatcacagtcagtccactgctgcatactcccatgtactatttcctcagcagcttatcctgtgttgatctctgctattccactgtcattacacccaaaatgctggtgaactttcttgggaagaaaaatgtgattgtctactcagagtgcatggcccagctctttttctttgtgatctttgtggtggctgagggctacctgctgactgccatggcgtatgatcgctatgtggccatctgtagaccattgctgtataatgtgatcatgtcctccagactttgctcactgctagtgttggttgctttcatcttaggctttgtttctgccttagcacacacaagtgctatgatgaatctgagcttctgtaaatcccatatcataagccattatttctgtgatgttcttcccctgctcaatctctcctgttctaacacacatctcaatgagcttctcctatttattattggagggttcaacaccttggtgcctactctagctgttgctatctcctatgtcttcatcttctgcagcatccttcacatcaagtcatcaaagggcaggtccaaatcctttggaacctgcagctctcatcttatggctgtggggatattctttgggtctatcaccttcatgtatttcaagccttcttccagtaactctctggagcaagagaaggtgtcttctgtgttctacaccacagtgatccccatgctcaatccattaatatatagtttgaggaacaaggatgtgaagaaagcattggggagattctttgtagggagataagtcttacttttggcaaatgatacatggagaagaaatttttctaatgataatatattctatatattcattttatctttcaaaatatacaacattctgtctctagtgctgagattaatttctgacaatcctgtgttttcaacaagctctatatcccagtgctacatccactatatagcttctaaaaattgctttaccatgtatcattgagatagtttttccagtaaa

SEQ ID NO: 2408 - DNA, 1600 bp, mus musculus
acaagcagactacagaagtgacatagcttctgggacaggcagaagcaacaaagcttctgggacagacccctgtttcagactccagacacccagtcaccttcccctccagagtagagatggccgccctggagggctcttacccccagagcaggtgagggagccatcttgtctcccgagtccctctgagactgaaagaaaataaaagttgagacctgtgattcatgtaatagcccaaagagttgtgagctttgaagcctgggactgaaagcatagcagaacaggccaggacatgcccaggcaggcctgtcattaagacattactgaggctgcttggccataaagataaagagaatgcaaagacatgtccggactgacccagcaccttcctatctcctgaccttctgacatggattgaatgttaaccagatgctctgctgttacctcgatctgcacatagagtctgctgatgttaaaataaaccaattgtgtgaaacctcgccaattcctccccaaccccagacccttttctataaaaacccctagctttcgagcctcgtggccaacaaccattgtctcctgtgtgagatacatgtcagcccagagctccgtcattaaactacctcatgtgtttgcatcaagacagtctctaatgattccttgggtgtgcactgaatagggaattgagtggaggtttcctcactaggttctttcaagaccagtgtgcacaggcgagagtgtggattgaagaagcaacacagcttctgggacaggccttgttttgggctccagacatccgggtacctttcccgccagaggagaggtggctgcccaggagggctctgacccccagtctgcacagatcagctcactgacttcggaaatttctgggacaggcagaagttacacagcttctgggacagacccccatttcaggctacagacagctgggcaccttccctgccagaggagaggcaaccacctgggagggctctgaactccagagcaggagagggagccatcttatgtcttgggtccctcggagacccaataagtacaggtgagcatgcagactgcagaggcaacccatcttctgggacaggccctgtttcaggtcttcatcttcagtagatctgaacaccacacctctgtgcaccttcccttcaagaggagagcttgcctgaagagagtactctgaccactgagactcagaagagagctggacttccaggaaagctgacagaggctaacagaatcacaggtggaacagacttcagccagagacaaatataacaactaacaccagagattatcagatggcgaaaggcaaacgaaacttactaacagaaaccaagaccactcaccatcatcagaacccagcactcccacctcagccagtcctggatacccctacacacccaaaaagcaagattcagattcaaagtcatatttcatgatgctggtagaggacctcaaggagggtattaataactcacttaaagaaataaagaacacagttaaacatgtagaagtccttaaagaatcacaggaaaacactgctaaccagggagaagtccttaaagaatcacaggaaaacactgct

SEQ ID NO: 2409 - DNA, 1400 bp, mus musculus
tatgtaggcctttgacaggaaatgaaaataataaattggtaattttgtaacttctgttttaacttttagtttcatttggaagagaagtacaggtcttctaaaaagaaatatttagtttttatgtgagatcaggcatcttcattgtagtatgatattaaactaatatgatatataaactaatatcatattagtatgatattaaactaaatacatattaatacataaaatatgtattttctatttctccagaaactttcaaagaatgggcactgggaatcattctgtaacagttgtgtttgtcttggtgggattaacacagcagcctgaactcctgctgcccctcttcattctgttcctgggcatctatgtggtgacagcagtggggaacctgggcatgatcctgctcatcacagtcagtccactgctgcatactcctatgtactatttcctcagcagcttatcctgtgttgatctctgctattccactgtcattacacccaaaatgctggtgaactttcttgggaagaaaaatttgattgtctactcagagtgcatggcccagctctttttctttgtgatcttcgtggtggctgagggctacctgctgactgccatggcatatgatcgctatgtggccatctgtagaccattgctgtataatgtgatcatgtcctccagactttgctcactgctagtgttggttgctttcatcttaggctttgtttctgccttagcacacacaagtgctatgatgaatctgagcttctgtaaatcccacgtcataagccattatttctgtgatgttcttcccctcctaaacctctcctgctctgacataaagctgaatgagcttcttctattcatcattgcaggcttcaacaccttggtgcccactctagctgttgccatctcttatgtctttattttctgcagcatccttcacatcaagtcatcaaagggcaggtccaaagcctttggaacctgcagctctcatctcatggctgtggggatcttctttgggtctatcaccttcatgtatttcaagcctccttcaagtaactctctggagcaagagaaggtgtcttctgtgttctataccacagtgatccccatgctgaacccattaatatacagtttgaggaacaaagatgtgaagaaagcattgggcaaatgtctggcagggagataagttttacattcaacatatgatacatggtagaagtgaattgtactaatgcaaataatttttttctattcatttttatttctctcttgaaatattcagcatatctctgcttgtggtactgggattaatctcagaggatttcatgttttaggtaaacactatacaatgtagctatatctaatatccatgtttcttttaaaaatgctgtaccatg

SEQ ID NO: 2410 - DNA, 1400 bp, mus musculus
ctgtctgggtttgtgatttctttattcttctgtttccagttttatgtcattaactgttttgttcatttcttttacctacttgattttaattttctatagtccgtcaagggatatcttaattttctcttttagtgcttctacctatttgcctcttttcttgtattcctctaatggagtttttatagcctccttaaaaggcttctaccatcttcataagatgggattttaggtcagaatattccttttcaggtatgttatggaatccaggcatttcatggtgagaaaagtagattgtaatagtgccagattacatgatttctgttgtttatgttcttgtgcttgcctcttgctatttggtaacctctggtgttaatgcacatgtatatctcttactggagcctccctggttggatgaagtagagttaatgacctgggttaggtcaggcctcctggatggcaggaagtgctgtttatgttgggggagtgggactcttgtgtccctcattagaataggcctcctctgtccctggttagagcagtcttcttatgtccatggttagggcagatgtcctgcgatcctgtttagggtgaacttcccaggagacagtcaggttttgggttccaagggtaggatcttccccagttccagatggaggtacagaataaaaggactatgtggcttaggcaaagcatgatacatcccaaatctgctggtctctgtgcagtggcagggacatggtttctgtgcttattgtgtcaaatgtttcaaatgtgtccctagttaaggctgatctccaggcaatatgtgtggtatgaaagaggggcagtcacactgatctatcttaccagggtgaaggtacatatcagaaagaagatggggctcctgtaaaaaagatagatcccacatctgctggactctacgaagtcccagttgaaatgggttagtgtgaaagaggtctcacctgtgtcccaaattatgtcagacatccttggagacaagcatgctatgggatgtggttgaagagacaggcagcagatctgtcccagagggaggttcagatctaaaggatgattggcctatggcagaggggatagatccactttctgctccgtgggatttttcagctgccttaggtattggggcagggatctcaactgtgtccctggttacagcagaccccttggacacggacaggctctggggtatttgaaaggggtaggcaagcccatcatctctgagtagaggtgcagatgggaagaaagaaatgtctttaatgacaaaattctaattcatttaggaagttattatgtgtacacaatcaataaatgatgcagagtttgaaagaatataagacagtacttatattttcccctagctaatgggtttctgcattgcaatc

SEQ ID NO: 2411 - DNA, 1400 bp, mus musculus; identical to SEQ ID NO: 2410

SEQ ID NO: 2412 - DNA, 1400 bp, mus musculus
tgagaatgatttagttaccacagattcaggatcctaactatgggcttactttagtgctttctttatagctttcttttgaactccttttgttcttcatccttctgtcatatcagcagaaaattatgacaagataaatatagttctgatcactatatattaactccctgtgctattatgtcacaccaaaaagattagaccaagatacatccttcaatatctctgagtctgcttattagctgttttcactatgtttcttatccttcacaaagctgaccctataaatgttagtctccatcatagaagctatattatctgtttctcaattatggtctatcaatgcttgtgggttttgaccaacttcatgtcattaactttctctgcatcccagttctagcactcttaattttgttcagctctgcttatgtcgcctgaatgcttgcatgccttggttcttggtggagcatttctcaaaactcactttgcattatttctcttagggtccctttgtcagtcacctcttaaaaagtaatgaatgctgagccaagggtggccttggtagggtcagaatgacatggttcctgcccctgggacaaggacaagaaggcatagacctccttgaatgtcagtggttgctgtgggaattgtacttgtttgtataataatgtacatagtttcttttgttgttggtttttggttttgaatttgtttttgttttttggtgtttttgtgttttggttttggtttttttggtttgtttgtttgtttgtttgttttggggtttttgagacagggtttctctgtgtttccctggctgtcctggaactcgctctgtagaccaggttggcgccaaacttagaaattcgcctgcctctactcccaagtgctgggatgaaaggcgtgtgtcaccacccccagctcatgtacatagttgcatgttcctccttaaaggaatgtcattcccattaatgttattggttagaaacagcagaagtctgagaactgaaggtgtggtgaatgtcttagcagggtggtaaatgctgggaccttcaaaacaatacttaaagatgtgtaaaacaactctaaaaacctgaactcaaaaacatataatctctcaaatctatgtaaaatataagaacgcagtataaattatatgaaagtctgcaggaatctaaaagaacaaaaacagctgcactgtgatccaacttgtcagaaagatactaaggaaagagatttaggaactggtgatcacaggagatcccacccagctaagattttgtttatgcttacaaaggcagacagatctgtgaattcttttgcaattaaaaaaaaatgcatgtgcttgctgtgtccatagaatcaagaggttggggtaatggaatgttaatttatgggaagatcca

SEQ ID NO: 2413 - DNA, 1600 bp, mus musculus
cctgtgatccatccattagctgactgtgagcatccacttctgtgtttgctaggccccagcatagtctcacaagagacagctacatctgggtcctttcgataaaatcttgctagtgtatgcaatggtgtcagcatttggatgctgattatggggtggatccctggatagtttttcatggccactttggcatctttatttctgaggctatagattctcgattttaccatggactcaaggatggtataagacatagtcaacacttttccttcgtctatgaagataatgctaggatgtaaccccaaaacacagtaacagccaaaatactggatctgcaagtgctaaaggctttggacctgccgtcagttgaagtactttgaatactttggaataaactaaaaatgatgaagatataatagctaagaatgcccagacatagaagagtgagattaaatgcactggactaataattcactgataaaagtactagaacccgagagtaatggtttaatataccagtcttgcaggaaacaaaaaactcttagcacaaagacagtgtgagctacggtacatagtaaacccctaccatatacccaaccacaatctaggaccagagttgataggatatgattaaattgtaaagtaaaggattgtggacagcaacacagaggtcatatgccactgcagccagcagaacacattttgcagcaccaaaagcacagaagtagtactgaggtatgcattcttagtagcagatgacactctactctgtcgcaaagttcagcagcattgtgggagtaatgacggtggacttagagcagtcaataaagagcagacggcttagtaaataacaacaggtgtgtgtagttgagaactaaacagaatggagatgagtgtgtccaggtttccgacaattgtgaccactagtaagttgaagaacagtagcaactgaagctctgcaatccccttctttttccaaagaatttgcaatcatggaaaagatgagtcatggaaagaagacatcatatagcttttgcatacttattgcttacactttaatagtggttattcattctactcagtccctcacaacctcagactgatacctgtgatttaatgttccactaatatcttgtgtctattcataatagtatttccgttgaagcaaaaaaattgatctcaattgaatgttcataagctttacatatacaatgaaatttgtcgtttgactgtgagtctgtaacttaaatcaggcatgatattccctgatagtatcacatgctttattcaagattcctttggccatctgtatcttttgtacttccctatgaattttaagattgtttttctacttctgtgaaaaatgtcaggaggatcggtactgcattgaatcaggatgctcattcacaaaattaacttctgtagttcacggccatggagtcttttccaacttctaatgtcttctttaaattctatatgcatagatttaaatatgtcactgtagagttccatatttcactttataatcagggtgaggttgtgatttggtttctttctctttcattcttcctcaccttccttcctcctttcttttattctttct

SEQ ID NO: 2414 - DNA, 1000 bp, mus musculus
agcatccttttctttcttccacccctgtaatttaaactcctctaatccacacacataataaatgtcaccaagaatttctttccacagactcccaggagctgattcatccatgaacatgacaaacaacactatggtgacagaattcaccttgctgggcatccctgagacagagggcctggagaatgtcctactcttcctgttctcaacattatatgcctgtgccttgctgggaaacttgctccttcttactgcagtcacctcctccccacgactccacacacccatgtactttttcttgagcaacctctctatctctgacatgggcttctgttccactacagctcccaagatgttgtcatatctctcaggaaggggtggggggatttctttccagggatgtgttgtacaacatttcttctatcattgtattggatgcgttttgtgcttcctgtacacagtgatggcctatgatcgctttgttgccatatgcttccctttgagatacacaatcatcatgaaccacagagtatgctgtgtcttggccacagggacctggatgagtggctgtgtgcatgccaccatcctaacttgcctcactttccagttgccctactgtggccccagtgaggtgagttattacttctgtgacatgcctgcagtgttactgctagcctgtgaagattcctctctagcacagagggtaggtttcacaaatgttggtcttttatctctcatttgtttctttctcattgttgtgtcctacactcgaattgggatctccatctcaaaaatccgctcaacagaaggcaggcagagagcgttctccacctgcagtgctcacctcacagccatcatgtgtgtctatggaccagtcatcgtcatctacctacagcccaaccccagcccattgcttagtgcaattattcagattttcaacaatcttgtgacacccaccatcaacccattgatctacagcctgaggaacaaggatgtgaaagca

SEQ ID NO: 2415 - DNA, 1000 bp, mus musculus
tataagcatcttttttctccacccctgtgatctaaactctaatctacatacacaataaatttcaccaagaatttctttccacagactcccaggagctgattcatccataaacatgacaaaccacactatggtgacagaattcaccttgctgggcatccctgagacagagggcctggaaaatgccctgctttttctgttttcaacaatgtatgcctgtgccctgctgggaaactttctcattcttactgcaatcactacctccccaagactacacacacccatgtactttttcttgggaaacctctccatctttgacttaggtttctgttccactacagctccaaagatgttgtcatatctctcaggatggggtggagggatctcttttcagggatgtgttgtacaacacttcttctatcattgtctgggttgcacattgtgtttcttgtacacagtgatggcctatgaccgctttgttgccatatgcttccctttgagatacacaatcatcatgaaccacagagtatgctgtgtcttggccacagggacctggatgagtggctgtgtgcatgccaccatcctaacttccctcactttccagttgccctactgtggccccagtgaggtgagttattacttctgtgacatgcctgcagtgttactgctagcctgtgaagattcctctctagcacagagggtaggtttcacaaatgttggtcttttatctctcatttgtttctttctcattattgtatcctacactcgaattgggatctccatctcaaaaatccgctcaacagaaggcaggcagagagcgttctccacctgcagtgcccacctcacagccatcatgtgtgtctatggacctgtcatcgtcatctacctacagcccaaccctagtccattgcttagtgcgattattcagattttgcacaatcttgtgacacccaccatcaacccattgatctacagcctgaggaacaaggatgtgaaagcagcc

SEQ ID NO: 2416 - DNA, 1000 bp, mus musculus
catttctaaacacctaagctaaactgtgaaacacccttctcagggccctcttcacttccttgttcctcagtgaatatattaaagagttgagcatgggtgagacaatattatttaatatctgcaccacagccccaagcagagggtttggtgtgcgctgcaggtagatgatgattacaggtccataggcacagagaatggcagtgaggtgggcactgcaggtggagaatgctttctgcctgccctctgctgaacggatcctcagaatggcaaccccaatgtgtacataagagacacaaacactgaagagaagcatcagagccagaaagccaacattgatgaaacccaccttccgggccaacttattatcagtacaagccaggggtaaaactgcaggaatgtcacagaagaaatgatggacatgattgggcccacagtaggttaactgaaaggtaaaaaatgtcaggatgccagactgaagacatcctatcaaccaggatactatgaccaagcccaggcacactccaggtttcatgataagcatgtatctcagtgggtgacatatggcaacataacgatcataggccatcacagagtagaggcatccttcagtagaacccagaaaatgataaaagaagagctgtgcaatacagcctctgtaagagatggctgggctcttgccagagaggtaaagtagcatttttggacaggttactgatgggaacaacatgtcaaaaatagaagtcccaagaagaaatacatgggggtgtgaagggtagatgaagaaactattgctgtaaagatgagtaaatttccaagcaaggtaaagatgtatatgaataagaacaccacaaatagtagagtctccagtccttgtgtctggggtattcccaatagaataaattcatccagcaatgtatgattttccatggggcaggaaacctgttttggatatttccaaacatgaaaatatgaatgtaaaggttaatactagtaacatatt

SEQ ID NO: 2417 - DNA, 1200 bp, mus musculus
agagacagagacagagaaagagaaagagaaagagaaagagaaagagaaagagaaagaaaaagaaaaagaaaaagaaaaagaaagaaaaagaaaaagaacggatggacagagaaaacacagaggcatagaggggagagagagagaatatggatgatgcagaaaattattatcatttctctgttttaaacttagaagcttctgacaatataatgagaagataatggagtctggaaacctttcgatgataatcgaatttatcttgactggattcccaaccaaaccagagttgcagctgcccctgttcctcctcttccttggcatctacctggtcacagtgttggggaacctgggcatgatcatcctgatcgtgctcagctctggcctacacacacccatgtacttcttcctcagcagtctgtccttcattgacctctgccattccactgtcattacccctaaaatgctgttgaactttttgttagaggagaacatcatctcctaccctgaatgcatgacccagctctactttttctctctttttgcaattgcagagtgtcacatgttggctgtaatggcatatgaccgctatgttgccatctgtaaccctttgctttacaaggttgtcatgtctcatcatgtctgcttctggttcacagtgggagtttacactttgggtattcttggatcatcagttcacacaggacttatgttaaaattgtttttttgtaagaccaataaaattaaccactatttctgcgatctttttccactcttggagctatcatgctccagtatatacatcaatgaactcttggttcttttcttgagtgcactgaatatcttgacacctgcattgaccatccttatgtcctacatcttaatcattgtcagcatcctccgtattcgctccactgagggcaggtccaaagccttcagcacctgcagttcccatatctctgctgttgctctcttctatggttctgctgctttcacatacttacagccatcttcagtaagttcaatgaaccaagggaaagtgtcctctgtgttttacactactgttgttcccatgctgaacccactcatctacagtctgagaaataaggatgtcaaatcttccataaagaaaattcttaacagatgaacgtggcagattcatgaatggagttgttgtcatattagaaaaaggtgattttgcct

SEQ ID NO: 2418 - DNA, 1400 bp, mus musculus
tactcctcttgttaaaagtcaaccatttcatataaatttagcattcttttcttatggctaacaggggtatgaatggaataagaaatcaacaattcctttggactgtggtgtctatacaatatatataaaataattctattcggtgttctccatcagtgaaaataatccatatgaaggccataatccatatgaagaaatgtcaaacacaagcatagtgaccacattcttcctctcaggtcttccccacccaccagtcctggactccatgctctttgggatcttccttgtgatttatattcttactgtgttgggaaaccttctcatcctgacggtgatcagggtggattcccacctccacacaccaatgtactacttcctcaccaacctctcctttattgacatgtggttctccacagtcacagtgcctaaaatgctgatgactttggtgtccacagggggcggggctatctccttccacagctgtgtggcacagctctattgcttccacttcctgggtagcaccgagtgtttcctgtacacagtcatgtcctatgatcgctacttggccatcagttacccactcaggtacagcagcatgatgggtggcagaatgtgtgccctcctggcagcaggaacatggttcactggttccctgcactctgctgtccagactacattgaccttccatttgccctactgtggtcccaaccagatccagcattatttctgtgatgcacctcccatcctcaagctggcctgtgcagacacctcagccaatgagatggtcatctttgtgaatatcggggtagtggcttcggggtgtttttttctgatttcgctgtcctatgtgtccattgtctgctccatcctgaggattcgcacttcagagggccggcacagagctttccagacatgtgcctcacactgcatcgtggtcctctgtttctttggccctggtctcttcatctacctgaggccaggctccagggatgctgtagatggaattgtggccgttttctacactgtgttgacacccctactcaaccctgttgtgtacaccctgaggaacaaagaagtgaagaaagcactgttgaaaataaaatatgggtctgtgcttcctcaggataaataatacgtgaggatgaatactcttaacatctgcaacatctgtgtttaaactgtgtggctgatgtcaccatgagaatttcaaagagctattcaaacgtctagtcctaatttttaatgaagtgactgataatgttttcgtttcttgataaatacttgtaagaatcccaaagaaaataccctgtgaacctgtctcagcagaaagaccacactcttacctggcttttgcaggatggggagcacgtcaggaaaacagtttaattttaatactttac

SEQ ID NO: 2419 - DNA, 1200 bp, mus musculus
gaaaaaaaccttcattataattctaagagatgtgttaatttctaggaattattaagagcagcaaggattagaattacatcttcaagggaaaggagctggcaagagctagttaaggtgagaatccttctcaagtaggcaggctttgaggacaacatagcaactctgaaatctatcctgggtgtttttcaaagtcccaggcaaactacagaacagcacataaggtcccaggccagccccaatgcaagaatcccattaccagagcaacatgaagagtccaaaggctcagaggtctatcctgtctgaactcagctgaccaccagacactggcttctgtttagaaacagcccttaacccaagtcttgcctgatgggaagactgaactattagtatttctttttcctgccatgagacatgctatgtgcactggggcctggatccctgtggacagtggcctgtgtgtgttgatctggaggcctgaaaagggaccaggcaattttgtggccaaggggagtatgtgctccaacacagtcctgctaagagcagcaaagcctggtgggaaacatcacttcagagaccagcaggctcacaagagaagagataagaaaaggaatgccgggagtgatggtgcacgcctttaatcccagcacttgggaggcagaggcaggcagatttctgagtttgaggccagcctggtctacagagtgagttccaggacagccagggctatacagagaaaccctgtctcgaaaaatcaaaaaataataataataataaataaaaatgaataaaattaaaaaagaaagagaaggctggatgtgatggcacaaacctatcccaactcttaggagggagaagtaggaggaggtggggcctgtattaatgacctatagaggacctgctatcttgaggcccaaccttctctggctctcctgcctctgcctaccaagtgctggggctaaaggcgtgccactgccccagcattgcattttcttaactatgtctttggaagaccacaattttttcacttttgttgaggttcaacctcaccaaggaatcacattacagattatgcctttaatgccataaatattttttagacatttaattgttttatgtttcacaatagttttaagtttgtttaacactttgagtttttttttaatgggaatgtgggataaaatacagattgacgtacatttt

SEQ ID NO: 2420 - DNA, 1000 bp, mus musculus
caaattatcaaaagagatacacagacttactctgtgcactctccatgagagccacacaatatacaagacccaaggaaggggcaggtttgacgcttatacagcccacgcctctgagcttaggggcctgtagaatctgagaggtgatggcaaggttttgtaaaagaggaagcagactgcaaaggaaagtcttcttattccacagcaatagagccctagctagggtttcccagaatgtgcacaataggctgatgaaccatgcttgtgagttcgtctgtttggtgagacgccagtaaggatgttaaaggctatggcttgggttcttcttgagtaacttccgttggtcagataagggaacttcactgaaagctcctctcaggcttctgtgggggtgaggtgggggagggggggcagaagtcagccagcctttgtttctcaggctgcttctgagcccttttcagtgctgcagcccaaagggctcagcatgcggtcgccatattgagtggttccttttcggatctccaacagacccacgcagatgaatggagagcagaggtgatggagtgatgctgagtgatgtgaccagtgttgctgaccatgatgacacacacctgtaatcccagcacctttgcttcacaggcaagcctgaactacatagaaagaccctgtatcaaaacaagcaagcaaattaaatgaacaagccaacacacacaaagcaaagcccaggaaacagacagagtttgggatacggaggcatttagaacgcagccagcagcttagattctcacctttgaatacattaagttggtaaagacaagatgcttctggaaatagcagtaacttacctttgcatagcagtggttcacatttgcatatcattaagagggtcttaactcacggtgactctctgaacagagccaaggcctacgttgtagccagtagcatttgagaaactaagaacctgacagacaagaacacctgattcaaaactacatggggctat

SEQ ID NO: 2421 - DNA, 1400 bp, mus musculus
cctttgtctgtcttcggcactgtccacacatgcaggtagctgcttgtcctcctggctggaagattcctttcaaggcacatcccattctgcctggcttggatgactctctgagtcccttggaagcttaccaggcctttacctcgtcttctgacaggcccagtacctgccgtggtcagaacatgctgtcagcagaacatgccgtgccggtctgctatgagggtaaaggggtcatgtcaaggatagacatcaaagagtcagaacacttggcaaggcgcttgtgagaccccatctgaccacaaagatattctctctcagcctggtcaggctgcccatgggtgtacccgtgctctcctggaccaatgtcccctcagtgccccatggagctcacctgagctttggacaggacacatggacaagtcctactccagaaacagatgtagaaccctttcaggagcatctctttctcatggatgctgtgatcttgtcttctttggaaaggaatgctttttccagaccaggtcccgggtctcacgattctagaacagggtctgtggtcccttgacattcttgagagtgctactgaggatgaggaggatgttatagtgaccagaggatgatgggagagggtccagtaccccctgggagtccaacagtggttcagtgacctactcagccaggtgcaaggcttccaatgagcccagggcttgtccacttacccagggcctacaaagtcccctaactctaaggccagattagcatctacactttgccctgccagcccttcctcccttctgctgggaagcaaagtatagtcagactgggaaggagcacaacaatgatttgggggtgacttagtttctgtggcgtctttacccacacagtgaagcaatggtagcatcccgtcttcagtccgcctgagttgggtgtaatgctttatttcagactgtgcattttgcacaaaccctgcccacatcccatttcacagatgaggcgtatggacctggtgctggcagctgttggttttagcctcgagcctctccatccctctgctgtgttcctctgtatggtccctagaatctgtctcacttacacctagaagagaccagccctgtacctgaaggttgcaaaaaatgccattgtagctgcctggaacatcactctccactaagaagaaggtgtctgagagccttgccactgccttgaccgtttagatgagcctgcctgatagacagagcctcagctcagggggcgtgggggagggaggaggcgagataggcctgggcctgttcccatttggaagctttctcagggactatcaggatgtccaggaaggtgctaaggtcccagtgggttggcccagtttctgctcagacctcacctgggatatgagagaacgaaga

SEQ ID NO: 2422 - DNA, 1000 bp, mus musculus
tgtagtttttaagactgttatattaatgtttatgttatgcctgtgtgtttagacatactgcctcagtgaaactatttttatagcttcttaaatttctaaaagatggtgtgttcttattctctcttctcccgctcctttgttctttgctattttctagcaatggtgattgttcccactagagaacttgctctacaggtcagtcagatttgcatccaggtcagcaaacacatgggaggggccaaagtgatggcaaccaccggaggaaccaatttacgagatgacataatgaggcttgatgatacaggtaggaaatgaggcaggcagcagggctgtctgattatagctacaaatgtctcgtttatttttcagacttattcgtgattatgtggaggtggggtgtggctatgcacatgtgtgtgcaggaggtgcctatgtttgtgtatgggggggggcagtggatcccctggttctagaattagtagctactgccaattgaacttgaattctttacaggagcaatatgagctcttaaccactaagccacctctccagtctctaagggtttccttttaggaaataactaaaactttgttggttgttttgttttgttgagacagggtttctctgtgtagccctggctgtcctcaaacttaatttgtgaactaggcaggcttcaaattcagagatttaccggcctctgcctcccagttacttttataaaaagcatatgctaccactgtctggccctaaaatacgtctttaattaactaagggactgagggtggattagtaggtaaattgcttgcatagcacatacaaagccttgattatttccccaccaaacaaattggagttagtgacacacacctataattccagcactggggaagtgaaagttagaggatcaaaagtcaaggttatcctcgcctacataatgagttcaaggccagcctgtggcacatgataaccctgttttaacaaaataaggaatcaaaagaac

SEQ ID NO: 2423 - DNA, 1200 bp, mus musculus
ccagctgcctgtgtgtgcctggctcacactgccgccaacacatccttgcctcgcagcctcccccacactgaattaggtggagtctcttgagattctcactgtccccttagcaacccagctcttcacaccccagggccatctccctcctgtccacaaactcctaaccaagatccactgcgggccactgcaacagacaccacagattctcagcacagagcttgcaacactcaatgtgaacctctgtcatccacacctatatcctcctccaacggcaacagctatgtgccaggcacagaacaggcgctcgcttgctcgtggcaggatgactgagtcctaggaactgacacctgcaaagggatcctaggctcttgtgctaggaagttacaacgtggcgaggaggtacaggcacacagcctagttgcttgccagcgtggcttggagctcaggagtactctgccacatctgagggaaggaagaggtgtgaaaagcaagagcccattcagagcacccagcatagtctggcacggaactcggcatctgtcactacagcattacactccgggctgatgtcacacagcaaggcagggatgactgccggagtgctgaggagggtgggaacggttccaggtaaggtgagcgcctggaggggtttacccacgctaatctaatgtgctttcctgttgtaggaaggaggagggcgcgggtccaaccggcaagccacacccaggtcctggtgtagccctaaacccatctcagcatttcctcctggccatcctccagtggtattgtgctctgccccccttcttctttccctggaaatagtaacagggaaacagcaaccttcgtacactctgtcccgcccacctatccttggtcttgtgcaatctgacttctgcctgcttgcatggtggaaacccttctctccacaaatctcagacccggagtcaaatggcctttgggccacatcctgcttgaccctctggtggtatctatcatggctggtgacaccttgggcttacaaatgtctgttcccttggctggcttccttctgtttccgctcctcgtctaaacgtggtctcctttgtttcacaggcatgaaccaagattgcctttgccaagcgccagcccagcacctggcgcacagtcagagccagcttcctgcttccttttctgcctctgctgctttctatcctgcctctt

SEQ ID NO: 2424 - DNA, 1000 bp, mus musculus
tagttcatgctgaattgtttaatagccaagttctgatgacattagcgttcactgttggtgcttctggccttccctttctgtagaggagtccagatgaatactgatgtacctcaagttgttggtccaactgccttgctgtgctggaaatgctgtaccccaatatgacaggcaggataggttaaacagctgaagcttactgcttacagtccagactgaggaacataagctcagaatggtgggaagctcagctgcattctgggacccatttccttagctggtgggtcgctgccatctccattctatcatctgacctcgttattgggcacacacacacatgggtggggaaatgaagctaccagctgtctgatacctcttattagggcacaaatcccccataaatgctctacccccagggccttaccttacctactttcttcccaaaggtcccattccaagtaccatcacattgctaaggtcttcagtttaagaatatgggggtagacaacatacacagtagctgccttaagctctggcaatgtgtatcactctaaaaacccaaacaattcctccttaggagatgtaggttgagaactggaagaaacactttactggatcggtagaccagaaccttacctgtacttgtctccacagagaatctttattcctatcattctgtttgacgtgccaagaagttacttagttccactgtattaacaacagccaaatatctgtttgagtcaggagcatctggaaggaggaagggagggccaggaagatatgtatgtgttcagcatctcctcacatctaagtcttaagtgacaggtttgttgcctggaaagtggaagtgggtgaagcaagtgctgtggccgccctgtggaattacgccgtggagcttgggcgtgaccacgcctctgcagtcacttcaaattagaatcagaaccttgatcagatgcactgctgcctttcttacacaatgaggtggacgttcgtccctagaatg

SEQ ID NO: 2425 - DNA, 1000 bp, mus musculus
gcagcgaagactagaaacgtagactgtgacccagacgctgtcgtctgctgtggatcttcattactgtacagggttatctgcaagtgaggtgtgtcgcaatgagattgaatctgtcgttaattctttatctgtaggcggctcagtatagattaccccacgctgtgcagaaagtttttggagtggaaaggtctcctccttcctcgttgccctaaacagacccgacatgtgaggtctgtctgttttatgtaagtggacaaatttgagatgtcacaggaggggaagcagggagggggtacgacagttctgctctgattatttctactctcaacaattccatccacctttcccaattggccttactgctcactaatgcaggagagagcaagtccgtgtgccgtgtgactgactggaggggacaggctttgtttaggttttttttacccccactttggttttggttctgggttgttttgctttgttttgttttcctttgttcttattaaggacggcagtgggctgtgtcctgtgtgtactgtatgttacagacaccgtcctgctgggacacttgtcctgctgggattcccagctcccacccccaactcctctcattccttcagatttggcttgacaaaggcaggaggtacaaaagaagggccaattttgttctggaaaggtcagagcccagagtcgaggtgggaaagtggcatatagggatttccagttacttaatcaaaactcaaaatgtgagtgtttctgtctttcgtgcactaggcctggcctcttacctcagccttaagaaccatctgccaaaaactactcatctcgcatgatggcagccagagcgcatagctactaaaataagtttccgtgaacatatcttacaccggagcctgaggaaagatagaggcgcaaaggaaccctttgcattctctaaagctaagtgggggtttgcagaagtgctggggtcatctagcagtagttctgaaggacagaacctaaa

SEQ ID NO: 2426 - DNA, 1000 bp, mus musculus
catgtgcttcagctacatcaaatttctcagggcatactgtagtagcatagctgggctttagtggagacatatcgtcttggctgtcattgattgtgtttttatgtcggtatctaggcatctgagttcaggatgattgtagttctaggttctgatatctggtcttgttgcgcaggtgttcattactggtttcctgctaccctttctgcttcttaggagagtgtggaagttgtggattgcctgctaggaatttctgagatccttccatgtgtgttcagtatgggtgctgtttggaatatttttcttggtttgggggaggagggcagacacttagggatagagatgagctgggtggggcagctgagggggttcacaggagagacaaaaccaggatgtgccaccaggatcttgtttagttccctgagaataagagaggtaggtcaggtgacagctactaatctactacagagctgccaatgagactgggaggttacatttggaggagaggagggagaggggatatctgagaattgcctacctggtttcctgctctgtgtccttccctggctgatatagccatcagattcccagagggtgcatgcaggagttggaggctgtggtggagatgtaggtagagttgaaaggaaggccatagcaggtggtttgctaaagatctgcggatgagactggggtattggatttggaaaaggcagaatgaaggtctgaaggtcatctacctgctcccctgatagatgattggtgggttccatgtaggtgttggcagctgatacatggaatgcaagagagaatttgtttatattttctgataatcattttggggttcagaaagtttcgttttgtgtgttctagtatttatctttataccaataactttgagtgtcccaagtcccctctgcccatatatggactggttatcactgccaggcctataagagttaagtgataacctttggcttctattagcttatggaagccattcaat

SEQ ID NO: 2427 - DNA, 1000 bp, mus musculus
atggtgtcatggttagatgtttggttttgagtgagtgagtaccctttactgctgccatgacaaactctttccccaacatacacagacatggacatagactgagttatgcagccctatgtgggcttcttgcctagtgtgggagggtgagttgcaaaggcatcttcctcttagctgcagcaggatgcctgctgttgagttgaatgttggcccctgaaggccctcccggatgctatagccttgtttagctgtgtgtatgacagttcattttccctctacagagaatctgcagctgtgcttaggagagttcctacccaggcttctagatccttctgcagaaatcatcgtcctaaaggagcctccaactattcgaccgaattctccctatgatctttgcaaccggtttgcagctgtcatggagtccattcaaggagtttcaacagtaaccgtgaaataagccgctcatggacagtcaagactcagtctggtctccggtcccctgcctgttatgtggcagtctgttgtgacagatttccctggacagagggattgggtgtctgagcgagattcagaccctcccccctctcgtgatgtgtgtttaagggattaaggataaagttgcacattttaggtacagaaccacaagagctatttcactgaagaaggcaggagccagtgcattaaggttttgaattatcctagaagacctgaactgcctttgtaaatctcccataacacttgggtttgtctaaacctcgtgccacttttaaattacccttcaggcaccagtctttgacagcaaaagggtgactcatcagaactgagccaggggagcagtttctagttattttgtcaagttcaggtgacatttaaaagtcctcagctaccagagattggtagtaggggtcttgcctggctcttgccagtgatgaaaagaggtgctggtgagcccttccttccacataaggctgcgccatgaagccgccaagggaaagctgcatcc

SEQ ID NO: 2428 - DNA, 1200 bp, mus musculus
ggtgactcggtcttaagcactggatcttgtgagaattggcctggtaactgagaagtctgtctccttttgctgtgttgggtggggattgaacacagggactgtgcattgcagacaagtactgtcccaccgagttagatccccatcccaaggagaaggcttccagtgactggggcactgatatcacttatggtgcagatccactggacaaaggtaaaacccatctcggggtggggggatctggtggagcagcagagattttaactgctcctcagaatggctacagtgtaaaacatgaattagtcattgatgggattctccgttgaatactttaaaactgcggttggcagcgagccacccacactgtgaatccatgtggtgaaagggtgtgtataatacaatcttgttcttgagacaaggcttcactatgtagtccaagtgggtcttgaactcaggcctgtgctgtcctgtctcttgtattgggagtacagatgagtactgatacctcaggaactcttagatatgcagtggtcagagaggtgcagatcaggatccctaacatctgtttgaccaaaccatagatgagctggatttggcacaagttctcatgtggccagggcccctgctgttcagcatgcccttcctgtttctgattgcctgccagggtcacttctagaaggagtctattgcagacctctgctacctcctgactttgatcgcagcccccttgctggtgagattgaatggcggtggggttggtaactgttcaggcgcttctctggttgagtcttctgttgcctccccttccccatttctcctcccttttcctgttctggccaaggccgggccaggatgaagttatgaatcaaagctcagttggatgcctgggtctttctgacatttgtaagtctcagagcatcatgggctctcctgagcaccagcccgcatgcctctgcaccatgctgggctacaggcaagctgctgctcactgtggctgatgaagatcctgctggcttctacaactcggccctaaaagttcctctacccttcccttctgccaccaccagacctgaagatgccactcctagccttcctctgaatagctataattattatcatggaaaacatcagggctgttcttgcccaaacccaattttaatatgggaggctctaccagttataactctagttagttttatctat

SEQ ID NO: 2429 - DNA, 1600 bp, mus musculus
agttgtgtgtgtgtgtccatggagactgaaagaagatgtcagatctccttggagctggagttgtaggctgttgtgagatgggtcctggaaaacaaactcagtactgtggaagagaaaaagatgctctcaaccatggaagtctcaccagcttccccctccaccccccattaaatcttaccgtgaacatctacagctagacacttaaaagacagaattggaacagcatatccactgtctcccaacaggctgtttgtaccaaccaagtatattggcagttttactccgtgtctttaaatagtctgcttttatgtcttaaatacggcaaggcacacctgatcatcctgatgtcgcatacttcatccagccaatccattatagttgttgttcgttgtttgttaatgtaaaagtgagatgggcaactttacacgacaaactatacacaccaaaactttttagaaggtcagtcaataagaagtttctaatgaatattccaaatatatcttagaaaggtgtcatgagttcactgtcctatctacatgtatgaaggtaagtgatcaaggtcgtagaagcatcatcaccttggtaacaattccgttactcttgaaatggaccagattaaggtggctcttgctctagacaagccatttccaagttggtttcctcctctgccacttctgtgggaagaacatactccaacaactgtgaggctgggcttggcacgtgaacagggcttgacagaaggcttccatgtccctcagacggtggtgtgaaaagtcttattctgtgtagtgtttatttaccccaacaaggggcaaatctatgtccaatcacctgtttagagtcctaaccccagtccagcccacaccagtcccatgtgtgtgaacttagcaccttactcctgtgtgtcaccgaaatttggtggctgtcagttatgcaaaaacacttcagtgataactgatagctaaaaacccagccaggtattgaacatgcagagcacctagggcaagccaaccctttcctgctttttgtaggattcttctgatctttctgggaaagtgactgcttctaaggtttcaggtgccagcagacaaaggagccgaccttattaaacttttcaccttgctcctgccattttggtctcacgtgatttttccaatcttactttctctttgttatagacctcagtcccagctcggtgcaagaggctaatggactgtagaacagcttttggctttgaaaatgtcagcctgtaatgagaaatggaacatagttattaacagagccagacacagatgcccacagggtaccatccttttacccccttccttgcacatgcagggccaagagattatcaacagagcttaaatagaaaatacgaatgcaatggagaagcttcggtggtttcttaaatgcttgctaaaaaacacaaattttgggcctctctttccagtgatggccgactaggccatcttttgatacatatgcagctagagtcaagagctccggggtactggttagttcataatgttgatccacctatagggttgcagatccctttagctccttgggtactttctctagctcctccattgggagccct

SEQ ID NO: 2430 - DNA, 1000 bp, mus musculus
cccgcttctaccatttgctgacaatcctcatctgttaaacacaatttcaccaatttccacaacggcatgatccctgctttaagtttgccgttctgctgttccctaactagatctcctttcagtttgttccaagaggcgacagttaacgatcctgagcaagcataccatggtgccacacggtctatctccctgacaaatctctctaaggtcttagtggcgaattttaggccacacttcttcaggacgaagcataaggcaactactatagaatgggagattcccatactgcagctgtccagtcctgaccgcgactgaaactggtcgctgtccaggcgctgtccaggcctgaccgtgactaagaaccagtcagcagttacagcggtggaagcaaaacgaaaccaaaaggaaaagtgcaatcaccgtgcaaacaatcaaaagggcttctaactctggagaaatttcaagattgtacataccttgaagagtcttttgtcccgcagttctggttccaccccgcgaacgagggatcttccttgtgctggtgtgatggtagttcccgggttcctcagcgccacttattgcgtcccacttgaccagcaagaaagacgcaacaaaccggaatcttctgtggcaaaagctttattgtttgcttctcaggaagaccccgaaccgggaaaatggcactgcttatatagcccgcagcgtgatgtttcagcacctgatatggcgtgacagttcctgattcgttgctcgcccattaccccactacttcaccccgagaatgggcagtgactaggagtgaattcacgctcgcacctgcgtacaaggcttgtttactagttaggcacagaggaggccagtgccatcttataatggcgattgctcgcagcacggctctccacaatcagccttttcagaactcaaagcagttgcccacagaaaccctgagtacgtgttaatagtattatgtatatactcttgctttccaaattctgcaaaa

SEQ ID NO: 2431 - DNA, 1800 bp, mus musculus
aactttcaaatcatttgctcaaatgcataaagtctattagaactaataacagaagtcagcaagctaagtctcttggtgataaatacagaaaaacccagtcattaacagccatttagtaactgcaaaaaatgtgcatgctaatgactggagcttcatcccccagaagccatgtggaaggcgagaactcagaagttggtctctgacctctgcacatgcacactgactcacacaaaataaccaagaagcgaaatataagtgatatcaaaggatattcggtgagcaaaatgtgcaaatgttttataagcatgatcagaggacagagaaaatctgggcaaatggtgaggaaattgtggttaatgcatatgaagtttccacatcaaagacacgagtccacccccacttatcccagttatttggcttgccaggctctgctgatagccctagtgggttttatgtagcatctccccgatactgaaaggtagctagtggtacctacacagagtcatcatctcctaccccaggttttcctgtttgttgttttaccaccttttttgtaaccaatggtggaactacccagtgcaatcttgggaaataagaattatttggcatttctgtctcattcctaacttcaaaaaaattatctgtaaatctttcccatcaaatatgatgcctgctgtgattttcataagggttttatagtttttggaactataactttaacttttgtggaagctagtagtcatcacaatgaatagattataaaaggtcttaatctattaatcacaaatttagttctaacccagaggtgggcaaggaatggctgttctggagggctataatgagctcacactaaggtgacaagtctttggatctacacagtctctccacagagctgacattctcctcagccagtctctgcagatgcggctcctttttaggaggccttgtttacagtcccccttgttggccaatgcacttcatgcacacagtggctacattttgtttattaaatattatgaggtatctcatagctaggaggctcattcctaggatgtgaggttgatgaggctgagtggtgggcaggacagcagccttcaggtgaaaggatggatagctgggaaacgccattaagaaaggaacccttggattgttaggatttagatctgaattatttttatatcctctgtatctgacatacacttatgtgcgacagattaccatacttaaatttaagtaatcaagaacacagtatggcacaatggagtgaagtctacaggtgaatcaaacacctagaataaccaaaatgtatatatttacaatgagactgactatatacttccttctatacttatagctacttgtaatctatgagctttcttacttagatttagaagaccagaaatgagacttttgaagaagtcactgtagcatttctttttattacttaaatacaaatattatgaattaatttttaagccagtctaattatgttatagaacattttagatactaatcattaagaaacatcagtacttaaggtatagaaacatcttgactattattagccattgatgtcttttatataatctgattaaccaacctctgtggctatctctagtcagagtaaatggagttacagtttaatttaactagactttttctttaactcaagttatactaaaatataaagagaatgaaaaaactcgaatctttcacacgttcgtttcctgtaagatagatgggtttagggtaaacaaacagtcatggtgaaaggtttgaccaaatgaaaggacactatat

SEQ ID NO: 2432 - DNA, 1600 bp, mus musculus
caacttaaaaaaaatcaatattgttcttcttaataagggaccagtggatagggctgtttccttttaggtgtcaacaaatgattagcctgtttctctagatttagagagttaaggggaaaataaattgtgcctcagggtagagagtctttttgaggcactatatgagcaacagagtatcaaatgagagcatcaaatgagagcatctttatgagttacgggtgggtatctgagacttgctagatttggactttggtacccagctctcctttctctcttgcctctgatttctcatatttcaggatggaatctgcacaactgtatttggaaagcaaataagttgtctagctttacccagatatcagatagcaacgctgcagtaagttgaatcataccttaagtttcattcatatctcatttagagaacatgtagatgaggctttaaataagggctttagagttgatccttgggaataagacttttaaggcagttgggctgttaccctttctccagttcttccccagagggacctacggccttttacaagggtaactgtacactggggaaaaggaaataatcagactttcaatagatcgcagcgagggagctgctctgctatgtacgaaaccccgacccagaagcaggtcgtctacgaatggtttagcgccaggttccacacgaacgtgcgttcaacgtgacgggcgagagggcggccccctttccggccgcaccccgtttcccaagacgaacggctctccgcaccggaccccggtcccgacggggacgacgcggggaccccgccgagcggggacggacggggacccggctatccggggccaaccgaggctccttcggcgctgccgtatcgttccgcctgggcgggattctgacttagaggcgttcagtcataatcccacagatggtagcttcgccccattggctcctcagccaagcacatacaccaaatgcctgtgatagagacatgagagggagggactgaaggtagaatcctatggactgaattgtgtctcctcatttagacgctgaaactctgaagtgcaatgagggcatatctgaagatacagctcacaaagagagagatacttaagtaagtcatatagtttgggacctgaatacaataggaccagtgtctttctaagaaaagatagccctcttagtgacactcatcacatgtgaggactcagagagactagtccttaccaaaaaataaccaacttacaactctgactttggacttctcagcttctagaaacataagaaaatcaatttctattgttggaccagtggtttcaattggcagtcaggtgcttgtccagcacacacaagaccctaagttcaattcccagcaacacacacacacacacacacacacacacacacacacacacaacctatttaagccacctaattaatctataatattctgttatggcagcctgaaaaacctgacacaaagtaactatttcaatagcttaccactgcagtgaatgtggagtaggtagatccttttcctttcaagtggacttgtgttgcaatattttaagagagaagccctactaggctactctaaattcactaata

SEQ ID NO: 2433 - DNA, 1000 bp, mus musculus
tgcagaacctcacaaaatagcaataatgaaaacacagcttagcagcatctatgtgctactgtagaagcagttgtcaaaaagaaatgaagctgcagatatagctcaatggttaagaatgttgcctgggggctggaaagatgcctcagtggtaaagagcactgtctgctcttccaggggtccgagttcaattcccagcaaccacatggtggctcacaaccatctatatttggacttgatgcctttttcagctatacaagcagatagagcactcatatatgtaaaataaataaatcttaacaaaaaaagagtgcttgcttgtggactccacctcttggtacagacccagcctagctcttccccatgaccctctcagcattgtcttctgttcaatctcctttcctttgtttacctttcttcagaaatactttctgccagggaccggcagtgaccacacttggctgggactcaggtgggcaggtttctctatccctcctgccccattatgatttgtccaaacttattcttagtcctgttgtaggagctccttttccacctgtctccagtccctaaggactcttgtgacagatccctgtccccagggacccctctcagcctttctttccagcctatctccattcctttctgtcacccaaggacctgcagaagcctctctagcaaggaccccacagccaccacacatgctgaggaggatcccgagagggcaacatcgtccagagaatgaaacaccaagccaacaaagacgagcccagatagcaataccaagaaacacctcagacatcataactctgacacctagatcccagtgcaaaaccacaaacaaaaaatgaacagtcaagactatatgcctcttctagaagcttgtaacattacagtgagcctcccccaaatgcaataaggctgaagcacaagacaacgacctcaaaatagcaattatgagtgttcaagtaccttaagcaggataaaaatcaatcccttgaag

SEQ ID NO: 2434 - DNA, 1200 bp, mus musculus
ctcttccccacctccaggagcctgcggttccccaccagcccccacaccctccacctccactgccgccgccgcctccaccactgggttcggccactttcacaaggcgctgggtggctccctgtcatcctctgactccccgctgctcaccccactgcaaccaggcgctcgctctccacaggctgcccagccaccacccccactgcctggggcccgaggaggtctgggactcctggagcacttcttgccgcccccaccctcctccaggtcaccatcatccagccctgggcagctgggccagcctcctggagagttgtccctaggtctggcagctggtccatcaagtacaccagagacacccccacggcctgagcgaccatccttcatggcaggggcctctggaggggcttctcctgtagcctttaccccccgaggaggcctcagtcctccgggccacagcccggggcccccaagaactttcccgagtgccccaccccgggcctctggctcccatggttccctgctcctgccacctgcatccagccctccacctccccaggtcccacagcgcaggggcacaccacccctcacccctggccgcctcacacaggacctgaagctcatctcagcctctcagccagccctcccccaggatggggcacagactctccgcagggcctcgcctcactcctcaggggagtcggtggctgccttctcactctaccccagagctgggggtggcagtgggagtagtgggggccttgggcctcctggaaggccatatggtgccatcccaggccaacatgtcactttgcctcggaagacatcctcaggttctttgccacccccactttctttgtttggggcaagagccgcctcttctggagggccccctctgactactgctgcaccccagagggaacctggcgctaggtctgagccagtacgctccaaactgccgtctaatttatgagctgggccctccctccctcttctttttcttgctcctttcttccttcaggtttaactgtgattaggagatataccaacaacaataataaccataaaaaaacataccccagaaaaacaaaaagacagcagaaaataaccaggtattcttagagctatagatttttggtcacttgcttttatagactattttaatactcagcactagagggagagagggagggagggagggag

SEQ ID NO: 2435 - DNA, 1000 bp, mus musculus
agttactttagggtgatgcctcagtttccccatctgtcagctgctctgtcatgctgttcaaatgattttgaagaaggctggcttttgcctgcaagctctggacccactaagagctcatggttgggagtggtttgcctctcgctgggcttggcctgcggaagagactgtgggttatgcactatctacagctgtgctcaaaatggcacatccctctgggttgtgaaggctttgcacgtctccttctgagacagattgtctcatcagaaataccaacatatctggatgatctgctaaaccagctaccagctaaatttgctgcctcccaaaatagttctgggatatctctaggacaggcccagccccaaacgcattcatgaaggcagccaagactgaatccagtactcccacaccctccaggcctacggctctgctgctctccagcccccaccccagacacccagtacccttgtccccagccctcgaccggctctcccttgaggagggacttaaagcctcaccacggcagagggatatagtattggccagcagtgggttcgaacaaactgcccatttcccaggaagatgcacatttgaacgtgcaatcaagtattaagttaaagaagataaattctagtggtgaattaatgtagcaagtagacattaaggaagggtattttgggatgtgatgacatccaagctcttctaaaattatatcacacacatgaatacagttggaacgtctacttccacagaggcaaccatctgacaggccttgcttggaggccccagacagcgcctatggctaggagccttagtgctctgcagagtccttgcatggactctccacagaatgccctcctggtacaagagggcccttccacggatcccttgtgtgtggatattcactctctttagccccagaagagcccctcttccttccatggctaacctctcagtacagattgatggatgtttcttgttagaaaaatcctgtgtgacc

SEQ ID NO: 2436 - DNA, 1000 bp, mus musculus
acttatgatcaaccccattttccaaaggaaactgttgggcacccttgctctcccagggctaactgatgtcagcagcatgagacaagccagccagattttctgtccacctcttcccaagtgcatctgaatgggccacagcaggaagagtggcttcaaatagcccccttaccaagtctcagggcttcctgtagggcagggctaaccagacctggcaagcaccctccctatcaccagggcatttttctgctgtgtacctttaggcctgagaggacagaattgaagtgacttggaaaaaaaaatgtggagaagccagagtgaccagtatttgccacacccttgcctgcacctgggtcccaagccctcatctacaacttccttaaggtggggctggagtgggcaggcagaggcctggggcctccagtccctgacctctgaccactttgtagaattaagcattcagagttttgctagctaaagtcccttctgataggacaaagaaggaaagaaggagactctaatcagatcacacaaagcctatctggctccatctctgaagcaggtggagaggaggctggctccaggcagggacaaaagtagcttggtgagaacctaggtgctcactgtggtgggggcagcaactggccttctgtgagtctcacaggatctagttaatgaactcttgtaccgaagacttgtcaccctctacagaagccacccaagggtgcttggtggctaatattttcaacttcacagcctctagaaacacccaggagacagacctctgtgtgtgtctatgagagagtttctgtggtttaactgaaaaaggaagagaggccattccatgggccggggccctggactgaatgcgaagaatgcgagccaagtagcagcgttcatctctgctccctgactgtggacacaatgcaacccactgccccatgttgtgccaccatgccttccttccctttcctggcgggttgtaccctcaaagcataatcca

SEQ ID NO: 2437 - DNA, 1200 bp, mus musculus
ccgatttggaaaaaccataaccccaaattgattccagcttttaagtacaggactcaggaaatagcagcaagccatggggcttagtccatttggtttcttcttcgcctcttaaaaatactgctgttagttttccttcctctttaaaaaacagccagttcgttattttaaattagccaagaatgagggctcatttcatgttggctcctcctacccttcccaagcccgtctgtgttttgtgacctcacctggcttgggctgccttcctcccagtgctacggacaagatggggtctgtgctggctgggtgattcaaggctactgttagcttggagcattagttcagactgtgaggtggactttggtctaggaattggttttattgtttgcttattttctctgtgagaaattgatgtgaagacaaagccttagattttaatagctcctctgtcctgctgcgcgcccacctgggctgtcatggtgtgaggaacattgtatgtagctggctgctatggagttagcactaaataaagcgttgtaactgaaagtggaagtgaggcaggattgccaatttgttaaagaggtcaaaggtcagtttcagacatgggcacagatctgttcctttaagagaaatgactgacgcttgggcaaaaatgtaaggcaggggttggagagatggctcagtatgtaaagttcttgctggacatacaaggatttcaaagaccagcacccactgctgggtgtggccacacaagagggaggcatggctttaggcatggttgcaggtgcactcataacctcaggagagtcacaggggcctcctggacaccagcatagccagctgaaggtttgatgagagacgctgtctcaagggaataaggtggagagcggtaggtgtcctctccagcctctgtgtgtatatacagtgtgcaagctgcacaccctagtgcacatagaacacactcattcttcacctctgaataaggtgaaggtggtggggatggtgtggggtaggggagcttggctgggaaccttttcagtcacctctcccggttgtaaatgtgtggtgcagggaccagcgtgttcctacggctctgtgaccatagttctgtgtgttctgtgaccatagttctgtgtgttgtaaatgtgtggtgcagggaccagcatgttcctacggctctgtggccatagttctgtgtgttct

SEQ ID NO: 2438 - DNA, 1200 bp, mus musculus
caggacagccagggatacactgagaaaccctgtctcaaaaaactaaaaaaataaaatcacaaaaaatgtaaaatgatatgaatacgtaaagcagttgataaccaaggacttttggctctcaaggacattagcccaggccgtagctcattctgatagccaggatagccttggggttgtgcatatgtggctgtggacagatctggaaatattccctcactgggatacacttacacacaataactcacactcacacacccacattacttcatgctttcatacactcccacaaacagtcacacaccctcacactcaaactcccactcacaacacacactgaagcacactctcagatgtacacgtgttcaaacacatacttaggtatgaactcactcatgcactcatccacatacacccaaaacacatatgtatggatgctgccacgtatgcaaacaacctcttgtgccctcacactcaagcacactgacttgacacccatgctaacactaacatccttgtttgcttcctgttgctgtgataaacaccatggtgagaaaaaagcaacccctgaggaagaaagggtttacttcatcttacagtcccaagactcagttgaccattgaggagagtcagagcaggaactaagcaaaggccgtggacagccaccactcactggcttgctcagcctgcctttttatacatcccagtactacccacagtgagctgggccctccagcatcagttgtcaatcaagaaaatacctcacggacttgcccacagactggcctgatggaggaggcaattcctcaactgagattccttcttccccgatgattctagcctgtgtcaaattaacaaaacccaacgaccacagaagccaaggcaggactccatcggggcaagagcctaaagcagaatctgtggagaaacactgctgactggctcgttctcggattcaagcctaggggatagtgccacccatagtggcctgaacctctcacaacaattaacatgccccactgacacagacccatatgaggcaattcctcttcccaggtgtgacaaattgacaattaggacgagctatcacgctcctgtactctctctggtgtgcacattcaaacacactcgtgtatacacatcctcacacactttcacataccgattcccatactccccaaactccaacgtgctcaccccaac

SEQ ID NO: 2439 - DNA, 1600 bp, mus musculus
ttcagcatttgaagttcaatccttagcaatgaagaaaaacaaaaaccaaaaaaccttagcagttttaaacttcacctaataaagagttaataaaattctagttaaacatacagtatattgaaaggttcaaggccagcctggcctacagagcaagttccaggacagccagggctacacagtggaaaaaaacaaaaacaaaaaaacaaaaagtgatacaggatggtattacatgcatattaccataaagaaaaaaatacacctgaatgattttactatcatatactgaaaaaacaagtattaagtagaaggcagaattttcataaacagtacaagttatttataccactatatagtcgagttagaaaatgtgtaatgttgaagcttgctattccatattctgcttgctctagtaaaaaaaacaaacatacaacagggttttttctttttctttttttattgggtattttatttatttacatttaaaatgttatcccttttcctggtttcccctccagaaaccccctatctcatcctccctccccctgcttttatgagggtgctccccctccaacccatccactcctgcttccctgccctggcattcccttacaccaggccaatgcaccttcacaggaccaaggacctctcctcccactgatgtccaacaaggccagcctctgctacatatgtggctggagccatgggttcctccatgtgtactctttggttggtggtttagtccctgggagctctgggaagtctggttgattgatgttgttcttcctatggggttgcaaaccccttcagctccttcaatcctttctctaactgctccattggggactccgtgctcagtccaatggttggctgcaagcatccacctctgtatttgtcaggctctggcagagcctctcaggaagcagccctatcaggctcctgtcagcaagcacttcttggcatccacaatagtgtctgagtttggtgactctatatgggatggattcctcagtggggcagtctctggatggtctttgtttcagtctttgctccacactttgtctcagtatctcctcccatgggcattttgttcccccttctaagaaggactgaagtatccatggtcttccttcttcttgagcttcatttggtctatgaattctatgttgggtgttccgagattctgggctaatattcacttattattataagtgtgttcttttgtgattgggttacttcattcacgatgatattttctagttccatccatttacctaagaatttcataaattcatcatttttaatagctgagtagtatttcattgtgtaaatgtaccacatttcttgtatccattcctctattgagggacatctgggttctttccagcttctggctattataaataaggttgctatgaacatagtggagcatgtgtccttattacatgctggagcatcttctgggtatatgtccaggaatggtatagctgtatcctccggtagtactatgtccaattttctgaggaaccgccggactgatttccagagtggttgtaccagcttgcaatcccaccagcagtggaggaatgttcctctttctcta

SEQ ID NO: 2440 - DNA, 1000 bp, mus musculus
ggtatgttcttcccagaggaaaactatctctcccatttccggttttcctcagttccctacaactctgcattttggttggttgtggttttctgccgtctccatctattgctaagagaaattcccttgaggagtgcttggctttctaacatggcttctggggtgttgaacacaggcttgtatgcatttgcttcactggtgagctctccccagcctctgactgaacctgagtaaccctcttcctcattccagctccaattgcctatcccatagggcatttatcttagaagacatctaactctaaattctgcctttgtccttttgagatataagcctttaaaaagcttcttgtaagttctatagtctagaaatgctttcttaaggacctaatatttatccctttgaagtgtgatcctcaagggccatagtgccctcgagcccagtctttgtgggagagtaggcacccaacttcaatgggcgccacttagcaagcccagtgacccggtcactgaagacgggcacacacttgggtagctccgcatttgacacctgacattcctagtactttcagctagcttaccccagggctgaagaacacttctgccctttgtttctttgtagttgagtttagacctcaattttgccattctcgagtacttcagtgcatacctttgtcctccaattgtgtgcctttactcagaagagtttaaaataagactggagagatgactcagtagataagagcgcttcctgctcttgcagaggtcctgagttcagctcccagttccaatgcctcagagctgcttgcaactccagcttcaggggatatgatgctcttgattggcctctgtgggcacttatacctatgaagcatgcatgcacatgcatgcatacacacatgcataaacaaatacaaatctaacaaaacaaacaaacaaacaaacaaccttaaaatagccaggtgcgccagagtgtgcctgtaacctagtacttgggaggtgga

SEQ ID NO: 2441 - DNA, 1400 bp, mus musculus
ctctggacttcatttgcccctcatgtctgcccatttttattacttagatgtttagggagtctttacttttagtcccattgcgttttgttgcaatgctcaataccagactgtaaggatggcagaaaggaagaacagacagccacttttctcaacaaggatagttcttgtaatattagcagtggggacaatttgcccctaaggccttctgaatttctagggtgtgtcaatgtaattgggtcatatctgcagtattgatattgtgtgttcaaacactctgcaagtgggttttaattaattaccgattatatttgctttcattataagagttgctgtcatacatatgtgtgggaatctgtgtgacatatcaaatcttgtctgatctcagggctgcaaccctcctttatccacacggagtgcactgagatcagcaattgactggtaatattaaaaatcttggtgacagctgccaatttccatagtttcataaagatcctttgtctagctggagattgggcgaatgccaacataatgtacagttcctccaaacccaccttagagcacaaactatctgcagattctcctcatcccacggctcacacccaacttacagagatacttactttatgcccttgcccttgcctctgtagttttccctggcctgaccaatgtgtgttctctgcagtcaaggacccacactggataccacttgccttggcctgcagagctttggaatgaagaagtgacagattataaacagaaaagctgggattgggtgggtcatgtgttttgatggagacataccagcagcagccgggaaactcagaacttattatatccaggcgaacaagatggaggtgtgctaagtaatcctgatagggggtctctggagggagcagtctcagcctgtattcatcctggaggaggaagctgcggttgatactttctgcacatgttgtcaacattcatacttcaacttggggaggacttaccattcctctaagcttgacccagggaccatcttgccattcctctagcctaatcgaggggagtccttgctattcccatgaatcactgcgatccttgacatggctgggctcgtgtcaataacacagattccctcaagacttcatcctctccccacattttctgggtcacttgaatgccccagagttaatcattcccagtttaaacaatatttagaatgttattttgtgatcatagttttattctcaaatgctgaatgattaatgtatgctaaattttatatagtaacctcttgggagaaattagaaaggacattttttgtgtgaaaatatttatacttcagttgaaaatctcaactaaaaatgaaaagatataggagaagcggaacttttagaataattgttggactaagaaag

SEQ ID NO: 2442 - DNA, 1000 bp, mus musculus
ctattagtgttctttaaatttattatttcttttgagtactctcttagaatgtatatctcatgtagactcctgttaccaattacacccacctttttgaccctgaacctctccacggagggactcaagacccataccagcaactccacccatatctgcaacctgcctaaggaacccatattacaactgtctttttgcatatactgtccaggtagggatctctaactggtgccactagccccatccacttgtgttggaatgccatttccccacccctaacctgggatccttggtaccctgacaaatcaactctgcccactcttatttatctttagataaataaatctagtctcttctctaaaaatacatcagattcatgcaggaaattatactgactcctctgaccccagcacccctactttccatggggagcgaaggattcagctctgcaaatgtttagaggaccatatgtcaggcatctgctctccaccccactcagttcttgcctttctctttagatactatatcccagactaatacaactgattagttgtattagaaaaagagaaaaagttgtattagaaaatacaactgattagttaacaattagaaaatacaactgattagttgtattagaaaaagagaaaaagttgtattagaaaaagagaaaaagtctagaaccctttctcaaggttcctatgacagactatgagaattcaccatctctacaaaatgtctgctcctaggtttagaaaccttatatagctttaactgaactgagattgctcctgaaagcatatttaatcatgaacactgaataggccaaaacctgaaccctaagccacatgtagctggccaatcatctgacaagttggagtagcaacaacaacaacaacaacaacaaaaattagaatttcaaatacctattcaacaaactagagacaatatttccatataaagaaagaggaccaaggactttacccagatgcccatataccatcac

SEQ ID NO: 2443 - DNA, 1000 bp, mus musculus
agaataaagtatagcccataagaatacgaaacacaatattctctgagagttgagtttaggaaactgagaatataagacaactggaaaaagtagtcttttaaatgctgtcataaaattgcaggttacagtgaggtattcagttgagtgtttcaaaggtgaatctgaatggacatgtgagacacttgagggctgtgtggaagaactcccgtgcttctctgtcacgatgggtgaattgtgtcatctatgagggatgaggtgcagatctgcactgtcactactgagctcctttctccgtagaatcaatgtccagtgtctgcttgcgacattaaccagcctcaccaggcttctccatccagtttgtgagtcttcatcccatcatcattctttgccagacctgtctttgttttggtcttctttgagacagtgatacaggcagagttttaggcaatacatccacacaaagctctctctacttctatcttagttaagtcactgttccaagtatcctttcagtggtccacacaaagcaaggaagtgcctctgaataaattctggttcccagaactaacagaaataaacaggttctgctgacactgattctaaaaattctcacaattctgtgtcacccaagtcattgtgtcataagctattttgaatctaagcatcttcatttccatattggtcaactgacacagcatacaagtcaataaagactggcttatgtcatattccaatataggactttctaactttcctaaaataaaattcaaatccttgcctaaccttagagaatgctcttatatgtttttatcccaggatggcaatgggatcttcttgcctcaatctcttgaacgctagggttactagcaagtgccaccattcccagattatttttttggttcttcctggatatcttaccactggcctaagatattcaatcatacatttctcagacccttttgtccccagatctttgcagttgctctttcctggtaatact

SEQ ID NO: 2444 - DNA, 1000 bp, mus musculus
tgtaaattattttttcttttttattaattaattaattaattaatttttttacactccatattttatccccccttccctgtccaccctctgactgttccacatcccatacctcttccccatccccctgtctccacttggatgtctccatgccccaccctcctgacctctaaactccctggggcctccagtctcttgagggttaggtgcatcatctctgaatgaacacagacccaacagtcctctactgtatgtgtgttggggacctcatatcagctggtgtatactgcctgtttagtggtccaatgtttaagagatctcaggggatgggggtggggaggggagttccagattaattgagactactggtcctcctacaggattgtccttctcctcagcttctttcagacttccctaattcaacaacaagggtcacctgcttctgtccattggttgggtgcaaatatctgcatctgactctttcagctgcttgttcgatattctgcagtacagtcatttttggtccctttttgtgagtgctccatagcttcagtaatagtgtcaggccttgggaccttcccttgagctggatcccactttgggcctgtcactagaccttcttttcctcaggctcctctccattcccatccctgtagttctttcagacaggtacaattatgggtcagagttttgactgtggaatggcaacccctccctcatttgatgccctgtcttcctgctggaaatggatcttataagttccctctccctactattgggcatttcatctaaggtccctccctttgattcctgaaagactcttacctcccaggtctctggttcattctggaaggactcccaacctcctgccttcctaggttgcctgtttccattcttgctgctggccctcagggcttccatcattttcccttacccaataccagatcaggtccctcttatcctgtccactttctctcaggtccttctctccctccccagactt

SEQ ID NO: 2445 - DNA, 1200 bp, mus musculus
tacaagatacccatgctataatctacagacccaagaaactgaacgagaaggaaggcacaaaggaggatgcttgactctcacttagaaatgggagaaaatagtcataagaggcaggtggagggaggggcctgggtgggagagggaatggagagaggaagtggggttcaggattaggtgtggggaaagacaggagagatggccagatggctatgagaatgaatggaaatttgcaaatgtcagggatggggaagtggagagcatctccaggaggagatagaggcctggcataaaagaggtgcccaagaatcaatgggtgtgacattagctgtgaagtccagcattagagatatggaatctgaagaggttacctgaagttcacgaagaggaacctgaagaggcaggacccccagtggagcaataggaacaccaacctacccacaaaactttctacccaaagtatatcctctctaaaagaaacacaggggcagggggtagagaagagactatggaatggccaaccaattaactggcccaacttgagacacatcccatgggcaagcaccaatctctgatactgtttatgatactctgttatacatgaagacaggagtctatcatgtatgttctatgagagaaggatgcagacacccacagcaaaacattggatggagtttggggactcttatggaagaatagggggaaggatttcaagccctgaaggggatagcaactccacaggaagaccaacagattcaactaacctggacctttggggctctcagagactgaaccaacaagcatgtatagattggacctcagcctccccacacatatgtaacagatgtgcagcttgatctttatgtaggtgagtcccaaacaacttgagcagtgactatcccaaaagctgtttcttgtccataggatatgttcttctagctggactgctttgtctggtctcagtggaagaggatatgcctaaccccacagtaacttgatgttccaggttggagagatacccagggggccccacctgctcagaggagaatgggaggggcaggggaaattgttagaggggatgacagggagggcagcagagagaaggatgtaaagtgaataaattaaaaaagagaatatggaagtcaggataatataataaagactgggaggaatataggaggaaaaagttacactaaggatgct

SEQ ID NO: 2446 - DNA, 1000 bp, mus musculus
aaagttgtgtggctagaaatgagaaatatcttgaaagagttggggaatggaaataatataaacaaaatataacatagaaattaaaattatttgtcatgatctctttacgatagccgtgtcagagttgacgagtagtagctcatcatctaaaagcagtgcttcccattttttccttagtgggaagaaaggttagaccccttacaggaccgagaaagaaaggccattaaggctaatcaacaacacataatgaatgctactgacttcctaggttttcctagggatgttttcttacatagttaagcttgtcaatgtcctgccgagatggagagcggtgtaaagaggggtaccactgagtactcagtagttgagattccttgtcagcttgatctgattttgaaatctcttaggagacactgctggtgtggctatgggagtacctccagaaaggcttaactgatgagggcagaggacccacctggatgtaggcagcagaattcagtgaactggggttccaagcaaaagacaagataggagaagcctcattggtgacagcatccatcttctttctgcttcctgactgacagtacagtttagcaggctgcctcacactccagctgccttgccttactgagcatgttaaactgcacactcaaaccacaagccagaataaaccctttctctcttaaattgccttaggcaagtatttggctacaacaataaataactatctataataattaaaatatttatcctttcttctcctttggacaaaatagtcatttaatagttatcaagaaagaaaggatgatatgttgacctcacttccaggtgcttattcttgccctcattttcctatgaaatgatttggtctcctgaagtctatccaaaggaaattaaatagatttataggaaaggcttcagtatagcccacaggtacaaaacccattgacccttaataaacggccagtagccatatcttctaaagcatatacagtgatct

SEQ ID NO: 2447 - DNA, 1000 bp, mus musculus
atcatcccttcaataaacattgagtgaattgtggcaaaaattgcaagagcccactttgcaatcaggaagcctactgtgaaacagtctctcttagaaatgactacatagatcttgggtgcccagattcctccaagactggtctgtgcagttgagagtatggactgcagaggctaacagcttctggggcagaccttgtttcagactccagacacccgggcaccttccctgccagaggagaggtgtccaccccacacaggagggctgtgctacagcatctgggggagccatcttggttccgggattctgcctagactagtctgcacagcggagagtgtggactacagaagctacacagatttttgggaaaagccctgctactggccttcatcttctaccaggaagcaggtacaattgccagatatctgtccaccttccctgcaagaggagaccttgcctgcagagagtgctctaaccactgaaactcaggagagagctagtcttccaggtctgctgatagaggctaacagaatcacgagaggaacaagctctaacaagagacaactataacaactaactccagcaaaaggcaaacgtaagaatcttactaacagaaaccaagaccactcaccatcatcagaacccagcactcacacctcagcaagacccgtgtactccaacacacccgaaaagctagacccggatttaaaagcatatctcatgatgatggtagaggacatcaagaaaaactttaataacttacttaaagaaatacagaacactgccaaagagttacaaatccttaaagaaaaacaggaaaacacatccaaacaggtgatggaaatgaacaaagccatactagaactaaaaggggaagtagacacaataaagaaaacccaaagtgaggcaacaatggagatagaagccctaggaaagaaatctggaagcatagattcgagcatcagcaacagaatacaagagatgaaagagagaatctcaggtg

SEQ ID NO: 2448 - DNA, 1000 bp, mus musculus
ataaatactgagacatgaaagcactaagtgcatcaaacaaaacggaaattaggttaaaagtctaacaaaagttttctagatggcagggtacaaggagccggggcttttggagtcacattgtggtgtccctgaccacctagtgccaagacgctgaggttagacgcggccaggtctccctgagccaggcaaacgcaagagcaagccaaaggggtgcccggatcccagccgcctacaggctggaaaccctggcacccagccgagccacccctcccccacagctgggttgttctgggacgtgtgctttagaaaccttagaaccaaacgcaaacagcagggtcctctagatcgagtgagcacccactaggggtcagtttctgcttgtcactcatcccccgcccacccacctcccctagctactggcagtttgaaggttggctcctttgtctgaaagtctgcctacccaacctaatctgctcaaaaagaaaagaaaggaaaaccagacgctcggggctggcagtgttggagtcttttatttcatgttgtcaccaaggtcacagtcctgacccaggtgatccgctgctgatcctgtaaaggtgtccatattctgaggttcctggtgtccagatgtcgggaatcctcttgtcagagctggatacagttgttgccctatccaggggactgatcgtcaaggaaggcggcagtgcaggtggcagtgtggacagcacactgcagagacaagcgcaaggagaccacacagcactgtacagaatagtggaagcagaataaacgagctggacctttaaagttcagaaacggacacacctcagaaggcaggtgtttctctgaagaagagaaagcacctgagaagtgcagagaaaacagaccaagcaacagaagcaggagatgaaagtcttttcctttcttgaactctgcagtttcacttgtcataggagaagtaaaagcattttaccttctgcctcaatggaagacaggagtaggg

SEQ ID NO: 2449 - DNA, 1200 bp, mus musculus
aatctggtgggctaaaagcctttctaattcatgcaggagctacaggagactaaacctgtagtctttagaatatttggggaccactcatggaaagtttgtctgtaaaaagactagtctctgggaagcagagatctgtaagaatgagtgaactaaaatctggtcaaaaacttcatgaatttgtaagaagagaacagacatcgtggagatgaagtttcagattctactttctcccacttaagctttgcttttcttgtttgtaaaatatgggataataaaaatttcataaagtaaaaaaaaggaggagggggaccctatttgctttacaattgcacagttttcctgagaccactacaatcagtatattctttttggtctgttcatgtttcactcatgtgtaggtatatcatacttaaagacactgctgaatgctaccagtggccaaaaaggtttcaccaaattcacaaatgaagcagctgagcaagataggtagatgaaggtttattgttcagtcctacccttcaggagaacaaatgcatagatttttgaaaagaaagtagggtgacatgaccaagccagctcagtcagccaaacagggtctcaagggagagagtgaagattgaacagaaaaagaaaattagacaatgttataacgtaactccagccactgctgagactgaagcgggtttatttttctccagcctgcttttatagcattctaagtacatgcaaagaataaggtcagttctaggtcaaagaacagagagggtaataaacaaaaataatcaagaaacaaacaaggcaataaacaaagtcccctggtattcagggacttatcaagatgattaagaccttgagcttaattctttgtcctaccccaatgtcaaactcctgccaaattcctagaaagcagctccaaaagctctccacagtgatgcaatgtatagcattggcataaaataatagtttttcttcttatccacaaatgttatatgcagatttcagaactcccaatggctacaaatataacattctatatgtgcagcagccttataagatctgtacatgttacattaattttcacaataaacacgacatcatcatcagtattatgattgtcactgtcatctccatttccaaatgaagacactgaagcactagactagaaaagagtgacatttcatgttatagatgggttaaaga

SEQ ID NO: 2450 - DNA, 1000 bp, mus musculus
tacctttcaaatgctatcctatttcctggtttctactctgaaaaccccctttctcattcccctgcctttgctcactagccaacctactcccactccccagtcctgggattctcttacactggggcatccagtcatctcaggaccaaggcctctcttcccattgatgtccaacaaggccatcctctgctacatttgcagctgaaatcataggtccatccatgtatactctttgattggtgatttagtccctgggagctcttggggtactggttggttcatgttgttgttccttcaatggggctgcatgctccttcagctcctttggtactttctgtagcttctccattggggatcttgtgctcagtccaatggttggctgagagtatccacttctgtatttgtcaggcactagcagagcctctcagctatatcaggttcctgtcagcaagcacttgttggcctccacaatagtatctggatttggtgtctatatatggggtggggctgactctagtctttcctttagtttctgctacatactttgtctctgtacctcatcccataagcatttcattcttcattctacaaaggaccaaagtattcatactttggtcttccttctttttgagcttcagttggtctgtgaattgtatgttgggtattccgagtttctgggctaatatccacttaaaagtgaaggtatcatgtgtgttcttttgtgattggattaccttgctcatgatgatattttctagttccatccatttgcctaagaatttcatgaattcattgtttttaacagctgagtagtattccattgtgtaaatgtaccacattttctatatccatttctctgttgagggacatgtgggttctttccagcttctggcttttataaatatggctgatatgaccatagtagaacatgtgtccttatttcctgttgaagcatattctgggtatatgcccaggagtggtattgctgggtcctcaggtagta

SEQ ID NO: 2451 - DNA, 1000 bp, mus musculus
atttatttattgattgatttattttacactacagattttattccctgtcccagtccacattccatacctcctccacctcctccatctccacgaggatgcccccacctcccaccccccaccaaaacagtcctctaaactccctggagcctccagtctcttgagggttaggtgcatcttctcttctctggctaaacacagtcccagcagttctctgctgtatatgtgttgtggacctcatatcagctggtatatactgcctggttggtgttccagtgtttgaaagatctcaagagtccaggttaattgagactgcgtgtcctcctacagggtcaccctccttctcagcctcttccagcttttctctaattcaaccacagggattaggagtgtctgttagctgggtgcaaatatatacatctgactctttcagctgcttgttgggtcttctggcatgtggtcatgataggtccctttttgtgagtgctccatagcctcagtaatactatcagaccttgaggtgtccccttgagctggatcccactttgggcctgtctctggactgacttttcctcaggatcctcttcatttccatccctgcagttctttcagacaggaacaattatgggtcaaagttgttcctgtggaatgacagccccatccttcacttggtgttctgtattcctgatggaggtgggctctataagttccttctccctgctgtgggcatttcatctaaggtccctccttttgaatcctgcaagtctttcttacctcccaggtctctggtgcattctggagggttactcccaaactcctaactcctgaggttgcctgtttccactctctctgctggccctcagggcttcagtccttttccctcacccagtaacagatcatgttcccttctctgccccccactcccctgcccactttccatcccaggtccctccctctctcccccttgtgattgctttctttataaaacagttaatttgtgtta

SEQ ID NO: 2452 - DNA, 1000 bp, mus musculus
acccccacccacacacccactcctcaaccacctctttagaatcaccctatgctggggtatcaaacctccactggacccagggcctcccctcacattgatgtcagacaaggccagcctctgatacatatgtatctggagccatggaggcctccatgtacacttcttggttggtggtctagtcctgggaacactctgtggtctggccaacctacattgttctttctatcagttgcaatctccctccgcacctccagttcttctcccagatcccccatcagggtccctgagctcattctgatagttggctctgagcatttgcatctgcattagtcagatgctggcagaacctcccaaggaaaagccacgccaggttcctatcagcaagcacctcttggcaacagcaacagtgtcagggcttggtgtctgcagacagaattgatccccatgtgaggtggtcactgaatggcccttactttaatctctgctccattttgtttttatttttttaatttttgtccctgtctttcctgcgacaggaagttttctgggttgaaaattttgagatgagtaagtggccccatccctcaactgggggccatcctatctactggagggtgtctctacaggttctatctctacttcgctgagcattttggctaacatcatctcccactgggtcctgggaacctctcacttccctggtgtctgggatcccccaatggatgccccaagttccttatcccccactgctacatatttttatttaatttcctgacccagtgtacctctctccttctctgtccaatacctgatcctgccccccttttccctccccctcctctgtccctcccagggctccccatccctccacctcctgatcatcctgtgccccccatatgcaaaactgaagcatccacaccctggtcttccttcctcctaagctccatatggactgtgggttgtttcgtgggcactactgagcatatacccaaaagatgct

SEQ ID NO: 2453 - DNA, 1000 bp, mus musculus
caccctggggcctccagtcttttgagggttaggtgcatcttccctgactgaacccagacccagcagtcctctgctgtatatgtgttgggggcctcaggtcagctggtgtatgctgcctggttggtggtccagtttttgagaggtctcaggtgtccagattaattaagtttgctggtcctcttacagagttgttcttctcctcagcttctttcaggcttccctaattcaacaacaggggtcagctgcttctgtgcaatggttgggtgcaaatatctgcatctgactctttcagctgcttgttgggtcttcctgggtagggtcatgctaggtccctttttgtgagtactccatagcctcagtaatagtgtcaggccttgggacctccccttgagctggatcccactttgggcctgtctctggaccttcttttcctcaggctcctttccctgtaattctttcagataggaacaattataggtcagagatgtgactgtgggatggcaaccccatccctcatttgatgtcctaaccccatccctcatttgatgtcctgtcttcctgctgaaggtgggccatataagttctctctccctactgtctaacatttcatctaaggtccctccctttgagtcctaggagtctctcacctcccaggtctcttgtacattctggagggtcccccctcctatttcctgaggttgcctatttacattctttctgctggccctcaggacttcagtccttttccctcatccaatactggatcaggttcctgtcttccctccactcacctacctcctccactttccctcccaggtccctccctccctccccacttgtgattgttttcttctctctcccaagtggggttgaggcattctcacttgagcagttcagattgttgacatttttgagttctatggactgtgtcttgggtattctgcacttttttttttggctaatattcacttactagtgagtatataccatgcatatcctt

SEQ ID NO: 2454 - DNA, 1200 bp, mus musculus
tgagccaatagaaggactagaattcttctgagtcacttttaaaagtgtgtgatggtacagcccttttggaaaacaatctacaagtcatctgttcagttaagtcttcacttactatataactcagtaattctcactctactgtatttatcactaaatgaaaacatgagtctgaacaaatccatgaatgattaaattggatagaagctttcgttattgttgcctgaaacttgtcttggtaataccttggcttcatcagaaggtgagttgttataattaattttggtccagctacaggcccaaagtgggatacagcgcaaagggggttcccaaggcctgacactattactgaggctacggagagctcacaaaaaggaatctatcatgactgccctccgaaagaccaacaagcagctgaaagagtcagatgcagatatttgcacccaaccaatgggcagaaggagctgaccctgttgtggaattagggaaggctgaaagaagctgaggagaagggcgaccctgtaggagaaccagccctctcaattaatctggacccctgagatctctcaaacactggaccaccaaacagacagtatacaccagctgatatgaggcctccaacacacatacagtagaggacttccaggtctgtgttcattcagagatgatgcacctaaccctcaagaaattggaggccccagggagtttagaggtcagatgggttggaggtggggcattcatgtggagacagggttgggtggagaggagggaggtatgggatgggggcagagaatggaatatggagtgtaaaaaaataaattaaaaaaaaccacaactaattttgggccatacacagtggaattctacaaacagtagggaaaaccctaacatagaaaacaagctaaaaaaatatgccagtaattgtagccaggcataagagcaaacacaccattgtgctttttgtcaatatgcagaactagtctccagtgttagaaactaagtagtggtaggctgattgggtgcagctgactacaaagttttgggataacatcctgatggtaatggggatcttttgaattttgtcaaacttcattatcttaagatgggtttgtattattttatgtaaatttttaccaaataaagattatagaaatgtttttaaatgtcatttatgtctggcacaggtataaagttaaatatttt

SEQ ID NO: 2455 - DNA, 1400 bp, mus musculus
gtctagcttttcaggtgtgttggggtgccctggagagggcgaagtgggagtgctgggttctgatgatggtgagtggtcttggttcctgttagtaagattcctgcgtttacctttcgccatctggtaatctctggagttagttgttatagttgactctgtttagagattgttcttctggtgattctgttaccgtctatcagcagacctgggagacagactctctcctctgagtttcagtgctcagagcactctaggctggcaagctctcctcttacagggaaggtgcacagatatcttgcgtttggacctcctcctggccgaagaagaaggcccaaaacaggacctatcccagaagctgtgttgctttggcaggtcccagaagctgtcagcttctgtggtgcacactctcacctatacagactaagttcctaaattgggcggagacccggaaccaagatggcgtccgctgctcctgaggcacagggcttctgagccaggcagacacctgtcctctggccgggagggtggccggccgtctgtggcccgaaaagggtgctgcctcagcagctctgtagctcctgcctgtcccagaagctgtccgcttctgtggtgtacactctcacctgtgcagactaagttcctaagttcggcctagtcccagaaccaatatattttcaaatgtttgttttgtatctactgatattatcatgtgcttttctttttcaaacattttatatagtgagttatgttaatttttgatatataactagacttgaatgcctggagtaaatgttaaattccattttaaacatattaaattttacttgatcgtaacttgttaaggatttttgtgtttggatttctactcataaaacataaggactctgggtttcatttgagtaatgtgtgtgtgtgtgtgtgtgtgtgtgtgtgtgtgtgtgtgcgcacgcgtgcacgcgtgtgtgcatgcgtgctgtgtatacagggtcttgtgtatgttaagatgtgtatatgcatgtggaagtcaaaggacaacctcaggtatcctcagcaatagcatcaacctccttagattcaagcactctctttagccctgaacttagaaattgggctaattggcctgtcagagagcctccaccatcctttctctcagtccctctactactagaattccttgcacatgtctccattcctagctcttttacatgggtttttaaagaatcaaattcaaggctttacacttgataagtacggggtttactgacttggagatcagcctagcctaggctttcagttgcagtttccttgaattttcttttttttaaaatattttttattacatattttcctcaattacatttccaatgatatcccaaaagtcccccataccctcccccccc

SEQ ID NO: 2456 - DNA, 1000 bp, mus musculus
aatcctaccccagcctcccaagctactgggactacaggcgcgggccaccatgcccagctggttttgttcatttccatcacctgtttggatgtgttttcctgtttttctttaaggacttctacctgtttggttgtgttctcctgtttttctttaaggacttgccacactttagcagtgttctcctgtatttctttaagtgagttattaaagtccttcttgatgtcctctaccatcatcatgagatatgcctttaaatccaagtctagctttttgggtgtgttgggggtgcccaggacttgttgaggtgggaatgctgggttctgatgatggtgagtggtcttggtttttattagtaagattcttatgtctgtttttctccatctgataatctggactcagttgctatagttgtctctggttagagcttgttccttttgtgattctgttagcctctaccagcagacctgggagactagctctctcctgggtttcagtggttagagcactctctgcaggcaagctctcctcttgcagagaaggtgcacagatatctggcatttggacttgcctcctggcagaagatgaaagctcaaaaaagggcctgtcccagaagctgttagcttctgtagtccatactctcacctgtgcagactagtctcggtgggatctgggaaccaagatggctcccacagatgctcaggcaaagccctcctgggcagggtagacacctctcctctggcagggacggtgcccagatgtctagagcccaaaaaggagtctgccttagaagctctgtggctcctgcctgtcccataagctgttagcttctgtagtccacacactcacttgcacagactagtctccacaggatcagggaacaaagatggctcccgcagatcctgcctttatatgttacttgacatttttccattactgcttttaataatctatctttatttagtgcatttgttgttctgattattatgtgtcaggaggaatt

SEQ ID NO: 2457 - DNA, 1000 bp, mus musculus
gcacacaagctacataggggccagaagaaggcactggatcccctgggaactggagtgacagacagttttgagccaccatgtgagtgctaagaactgaacctggctcctctacaacatcactgtgcttaaccactgagccatctcgccagccctgatacacagtgtcgatgcaagaagtttcctagagatgtcaacggatcttgcatgaatagttcacaatgttctgaatatatccaggtactgcaactagaaacactgctgtttgtacttctgacatgttgcagggagagcttcagtgcttagctggatggtagctggtaaaaaccatgacttggtccctgcttgatttattgctggtccccgtcctttgcacttagatttattattgatagctgtgatcacacgatccctggtaaggagctgtggcccgttctgaactgtgtttataaatattcttagactgacttccagcagcaattggtctatgttgctgaatctgtttgagatctgcctcagatgcagtctcttgcctgtaagctcttaatgatgattacacctgctaagtacatcatctttcaggggctgtaatcttcccaggagccttgccacttactaggtatcagcaactcctgacactatcttttgtctgaacttcaactggccactatggaggtttccacacatccaccctcagctgctgcttcccacacagctgtgtttatggggaaccattgtaaggaaagggggctggccagtgaagcaactaactgctggagcgtctcaagggcagaaagtcagtgatacctgtgagttccaggtctcactctgcaaagtcgggcacagccctctgtagcttgatacctggcggagcccagacttggccagcttctgtgaggcctcttatacacagacagccacggtgtctttcagaagacagcaatcagcagaattgtttgagagattaatcggagttccctttgtgatgctagagatctcttgg

SEQ ID NO: 2458 - DNA, 1000 bp, mus musculus
agcttagctcttcaggcttcctgccaaaggtctttcatcacagtcgcctcaatagctaggtttcttatttgtgcgtgatgctctttgaggtaaaagtttcactgtgatacttctagctggcctggactttgcaccattaaccttgaatctgaattaactccagatctgcctagctctgcctcaaagtgctggtatataaggctcataccaccactgtgctatccctgatcccaaagtctttaagcttagtcttgaagttgaggaaactacctcccgagagtttgattaacacctggacataatggtaaatcaggaatttattgtatatgtatggactacactagtgagaccataaacaggttacagcaggactagaagcctctgcatggaccatccctgcctatggagatcaggctggccttgaactcacagaaatctgcctgcctttgcctcttgagtaatggaagtgaaggtctgctccagcatgcgcaggctgcagatgacattccttgggtttggtggaagttactgttgtgatcatactttagaaaaggtgaaggatttaccttgttataggtatggctacactgcggccccgacagcccaggatgactttgctttaaccacacacagtctccaaatgctaacaaagcaacctcattgtttgggttttgttattaaaacagggtctctaagtaacactgcctgctctagaatgctctatgcagaccaggttggccctcaaatctcagagatccacctgtcttcttcccaccacacccccagtgctgtcatcaaaggcaatggccacctgacttggttccctgtagaatcctccaaacagacaagggtgacatggaaatttatattcctgataacttcagttcctgagacagggattgatgttgtgaattcagtcagggatgtttcaataaattatccaatgcctataaaaaaaaaaaaaagattggtcactagtacaagctacttccttccactc

SEQ ID NO: 2459 - DNA, 1200 bp, mus musculus
catgtgtttgcccatagacaacattgaatgcacaatgaattttgaggtgaactgtctcaggccgctgtcctccatttgcataagcacacaattgtcatgaaccccagcctcatgggtgctccatcctgaagcaataaagcactcagtgagtgcagctcaatagccaaaagaattgaaaaggaatcccatgtcctgtttctagaggcccaggatcccaattcaaagtccagcacagctttaaatcccccattgtgcccaggtgcctttcctgcagctctgccttcacctgggctacccatctgacctctctcccatctgcttgaagtgaacttggcccaaacactgctatcatagagaacacttgccatcataagttaatatagtaattgtatgagagatagaacaacatccaagatgttgagaagcacgagaggccatatttaaaagacactagtcaaagaggcctgcctaccaccatgaggcatgggtgtggggaagacatccagaggccggcctgtcctatggtctgcccacacactacaacatgcaggtatgtggtggatggatgggagagaaagagaagtgccatgaagagaggtagaactggagacttgagggtagtgaggaacagcctgatgtaagtagcttctgatgccatggcctgaagccatggtaaagccctggcccaggctgccactgagggccatgtctgggtctacggccatgcagaagcaggggtttatgtcaatgtctgtggcccatgttaccaccaaaggccatgtggatatccacatctatcccacctatgaacttctggagagcatgaaggagcccatcctacaggtccaaagctataggatctctatgacaacaggatggatatccaagaggagtcccagtgaaaagccagtattgatagtgtagcagaagccagaagccctgaatcagacggatgacttattgcaatgaacattagcaagtaaagatgtttggacaaaagggcgtactatgtgacacactatgacaaactgcagcttccacaacaagatggtggtggtggtggtggtggtggtggtggtggtggtggtggtggtggtgatggtggtggtggtggtggtgatgatgttttctttgggggaaggttgcaaaagcagagagcaggtatgaaggcagatatgaagggacagggaggtgagtggg

SEQ ID NO: 2460 - DNA, 1200 bp, mus musculus
atgtggttatttgaccatcttttttttaccgtttcctacttaccatcatctagacagtatccttttgagtaacttctctagtggtcaccctgggaatttaaaaatacatacagtcgatttcaaatgcaaaactgtttgttcccatggcagatgagagaaatggagagctgtccataccagggacagctctcagagagggtggcacccttggcctccctcaacccaaaggccatgtcatgataaagccagttaaacttctgtttccctgcaagaaaactggcttctcggaaatcacgtgactggcggtccgctaacctagctgaaaggcttggaaggccccagcccccactgttgcacatcctcccttgtcctttctcctcctctctgactcaagctttctaatgtagaccctctctttcaataaacgaactgtctcccggatgtttatgcgcaccatactcgctgcggcaggaaaccctgtcccccagttcctccgcatcctgagactaaccagtgcacaacggcccatgggggacaagggacctacaagaaaccctttagtttgggggattctcgtggtggcggtggcaattttggaccaggaccaggaagcagcggggtggggggtgcggcagggggatgtgatggatacggaagtggacgtggatttggggatggctctagtgggtatggaggaggacctggaggtgccaattttggaggtagccctggttatggagagaaggatatggtggtggaggatcgggatatatcgggaccaggatgggggctacctacggaggtggttatgacagctatggaagaggaaattgtggaagtggaattataaccagaaagcttctaactatggccagtgaagagtcgaaacttcggtggtatcaggaacatgatcggaccatatggtggagggaactgtggtcctggaggaagtggaggaaatgggggctatggtggaaggagccgatattgagcttattggtataacttattgatacaagtagaaagtacttaccgtgggcttcactgtgtaaataggaggggatgagagcccagaggtaacaggacagattcagggtatcgaaataactaagttaaggagagtcttatctcagtatgcatgaatatgcagtgatacggcagacgacaccagaggagatgcagggagacagtttgtgaatg

SEQ ID NO: 2461 - DNA, 1200 bp, mus musculus
gatcagatttgtcaatttcctgtttgattatggttttctgtatttctttatatttattcctttcctctttaaaggactttatgtgtttgattgtattttcctgtatttgttcaaggggtttgtttcctctttgaatgtctctaccatcttcattagattagatttttcttgtgatacaggtgtgttaggatattcctagcttacttagtagtattgctgggttttaatggtgccatattgcccttttattttgttttgtttaaagctttatttatttatcatttgtaagtacactgtagctgtcttcagacacagcggaagaggttgtcagatcttattatggatggttgtgagctaccatgtggtttttgggatttgaacccaggaccttcagaaaagcagtcagtgctcttaaccactgagccatctctccagcccattttttgttttttgtttttggtttttgttgttgttgttgtttttggttgtttgttttgttttttcttatgctgacctttacccatcttgttattatttgttttttcaggcctaatagtccctgatggcagtaggcctctggggttgcaaatagagctggttggcccagatggcactaggcctcctgtgacgctgacagagctggtcatccctgatgacttcaagcctctgggtgtctgagtggcagcaggcctacagggatacagtcagaactcagggttcctgatggctacaagcctcttggattgcaggtaggaatgtggatcagtatatggagcaaagaggggatgaggcagaccttatggctgctgggcttgctggggaacacagtggtcagggaattcaggcatgaggatttcatctggttgtctcaggtgactgtaggcctccagggatgcagtcagcgctatattccaggcaataaagttcaaaagggacaaagtggaacttgctgctgctgagtttgctgggttcactttacatcactctattccttcttctccccaatcaaactcatcccagattctcccttcaaatatattatctcttctgttataactattgttacataaagataaaactatgtaatgttgctcttatgtatatatgtgtgtttagtgctgttagtttggaattaaatcatctatgaggggccccactcctggagaaaactgattctctctacacattgattacctgtag

SEQ ID NO: 2462 - DNA, 1000 bp, mus musculus
aaatgcacaagcaaaggaggaagcacttctcagcaggagggatggggcagcggaaaaagaggtagtacttctcagcaggaggggtggggcagcagaaatttttcttttggcaactacacagggaagcaggaacttggtggtatcagggtacatcttgtggtcaggacatccggcgctgacttagggctggaacaatctgtggttgttctcggaacagtgagtcggtagcccgctatcgacccccttttcttctcggggggagaggcccaattcagagatcaggacaattgtgtggtcttaatagctcccaacatatttcttaaagggattcattcattttctctttaaaggcctctataatctttacaagattgtatttaaggccatcttctagtgctttggctgggttaggctatcccccgggcttgctatagtaggataggtgggctctgatggtgccatattgctgtggctctttttgactgtgttcccataatgtgctttagccatctggtttttccttatgttggctggatgttcccaatgccagcaaggcccctcgggaaggctaggagagctgtgaaccagaccgtggaggtcaggggacaatacacagcttactacctatgttacctgagccctaggtggaatcgactggcaagggaataatgggaaaggattccataacaatcttggaggtcccaaatgtctcctaggaatggcagagcatgctcagagccagacaatggaggtcaggagacccagaacaactcatccatgctggctgtgttccagggggaccctattcatctagctggacctcaagtatacctgactggcaagggatttgtggcttgggtcagtttcaaatcttgttgttcctgaagcccccactcagtccaccacataggatcaggatgcattgtgggaacaagtttccttgagaaggcaggtcaaacccagaaccagacaatggaggtcagggaatcaagcataactt

SEQ ID NO: 2463 - DNA, 1200 bp, mus musculus
aggacttcccatgaaactttgaggtttaaaagataactctacatggtaaaccataaggaaaagctcatgtatagcagaaatgctctttgttaaatatcagatgtttgtcagaaatgagttttgttaaataccagaggaatttaggtagagtctggtgactgaactcagagtgagtgttccactggatccagatcggtgaacatgactgttgttgagttttcatttttttccctaatcatagcttttacaagtcatggagaacatatagtattgcattaactgagctgggaaatacagaatattgttcaacctcctatttttcacctttggctactatattatgtggggagcgggtgtggcggcagtcccaaaggcgccagggactgcagctaagtcatatgacttgcacctgacttcctcatataagacacaaacatcttgagtgctgcgcaggtgtaccaggatacaggtgaatccaatttggtggagatttgcccctgctgccctgattagctgaagctgcatgcctggtgaggtggcgtggcctgctgtgcgtggatgggaactgaaagtataaaagagtgagaggcccaggctagagggaggattattattcaagagaggattactattagtggggagatataaaaacaagggagatataaaaacaagggagatataaaaacaagggagatataaaaacaagggagatataaacaggggagatataaacaagggagatatataaacaagggagatatagaggaagaagaaataggactgaataaacatgtgcagaaggatcctgtagcagcgtcgttcttcctggcctgttgagcgcgcgcaacaagtggtgccgaaacccgggacaagaaacatcttcaggcacaagcgaagacctcctgctacaggaaggattcagaactgcatcacagggaagaaggggttaataaaggttcccataaaacagactgttgagaaggatctggcgtggattcagaactcttcagctggggaacggtactaatgaagagaaagaagaaagatgaggactgaataaactgctgttagaaggactggtggtcgcatcgttcttgctggtcgagagcaggcgcgacaattggtggcccgtacggggaaccgactcccccaccgagttcagaactttcagcagtcagtggttgctggcagggtaagttc

SEQ ID NO: 2464 - DNA, 1200 bp, mus musculus
gtgtagagagaatcagttttctccaggagtggggcccctcatagatgatttaattccaaactaacagcactaaacacacatatatacataagagcaacattacatagttttatctttatgtaacaatagttataacagaagagataatatatttgaagggagaatctgggatgagtttgattggggagaagaaggaatagagtgatgtaaagtgaacccagcaaactcagcagcagcaagttccactttgtcccttttgaactttattgcctggaatatagcgctgactgcatccctggaggcctacagtcacctgagacaaccagatgaaatcctcatgcctgaattccctgaccactgtgttccccagcaagcccagcagccataaggtctgcctcatcccctctttgctccatatactgatccacattcctacctgcaatccaagaggcttgtagccatcaggaaccctgagttctgactgtatccctgtaggcctgctgccactcagacacccagaggcttgaagtcatcagggatgaccagctctgtcagcgtcacaggaggcctagtgccatctgggccaaccagctctatttgcaaccccagaggcctactgccatcagggactattaggcctgaaaaaacaaataataacaagatgggtaaaggtcagcataagaaaaaacaaaacaaacaaccaaaaacaacaacaacaacaaaaaccaaaaacaaaaaacaaaaaatgggctggagagatggctcagtggttaagagcactgactgcttttctgaaggtcctgggttcaaatcccaaaaaccacatggtagctcacaaccatccataataagatctgacaacctcttccgctgtgtctgaagacagctacagtgtacttacaaatgataaataaataaagctttaaacaaaacaaaataaaaaagggcaatatggcaccattaaaacccagcaatactactaagtaagctaggaatatcctaacacacctgtatcacaagaaaaatctaatctaatgaagatggtagaggcattcaaagaggaaacaaaccccttgaacaaatacaggaaaatacaatcaatcacataaagtcctttaaagaggaaaggaataaatataaagaaatacagaaaacaataatcaaacaggaaattgacaaatctgatcaagaactgaaaat

SEQ ID NO: 2465 - DNA, 1400 bp, mus musculus
aggatcaagggcaaaaaaatggatgaaacagaagttaaaagaacaatgcaaagaatcaatgaaacaaagacttggttctttgaagtcataagtaaggttgatcaaccttaccctggcaaataaccttccttctgctgcaaaacatttcagaagctcctttgcccactcagaaattgactgctgtctctttagtgatgcccatggaagataatcccattgatttattattcctttctgtctgttttagtgttagtgagtgaataattctaaccctgtatgcaagctctgcccatggcccatgtggggtggtgagggatgactgcaaatgctctccactgacagtgaacttggtcttctctactacatcttacatgcggttctatgggacagaggaacagctctgtgtagacagtctaggagggctatgaagcctgcatttctatgtcttggctattccatctttgccatatggcatactaggaaaattatttaaatactctgaacctcctgtcttgatctagagatgttaaaatctaatttatagggcaatggggggtggggcattaatatgatgtcacattaaaagccagggcatcaagtaacagcttgtagttgggactgtattgctactggttaggaaatgtattaagtgtgtaagttaaattgggaactctggcagcacctaggagcttgaacccattcaccatttgttccagctttctgttacatttgggagattactcccttatttatccgtcctgcacttgctagttttatgatgactaatggctgacatttacagaagcttttccttgggtaaacccaaaaaggcacatcgtcgcccttagttctcttaacctgcctttgtatgagacactgtagatgcaaacatttcattgaagcttttggccttaaatgtcctgtccagggtctccttgccaaaagatggaaggaagactggaatcaagatgtctatccctttctctcatgttctagtgctaataaaaataagtcttaagaaaattgaatggtccttgcttccacctggcttatggtatgctgaatcatgaaacattttattcgttggtttccttaatgattactgtcatttttattgtttgtattggggggcatcattgacaatattttcattggccaactatggcctcaaagtcatgacctgggaaacagcagaaatcttcagagagaagagagcactactttggaaaaagtaagtagctagcaagaaggtgccatagcagaggatggttgccttcaggggtacagtcttagagaatgcttaatcaaggttctaaaacatgttagggcagatttaagtggctactctttatgtgtcttcttatccctagctccctcatttgaagttgcttggtgtttct

SEQ ID NO: 2466 - DNA, 1000 bp, mus musculus
ggtttgaataggtttggctcccataaattcatgtgtttgaatgcttggccaatagggagtggcactattaggaggtgtggtcttgttggagtaggtgtggccttgatggagaaagtatgtcactgtgggtttgctttgaggtctgctatgcttaagctctgcctagtgtgtaaattcagtctctataactttaattttttcagagcctacttttaatgatgcttaacttgacttaataatacttaatgctttaacctctcttctagcctatcacccaccagaggtagtggaaaagaaaggatatgggggaagtggatctgtctagaaatggttcagccaggcctcagcagaattggcacaagtcagcaggagggaccagggccaataggaactcaaagagttcatggctgtgcctttcagtgaagtgaaaatcagtgaagacctgaggccaacaactgttgcagctagctctacaagcaagctcaagctcccatcactgttcattgagtgctatttatactccctccaaacatcatgtgtcttccacgtgtcttgcctctgcacagtccatctttcttaggtgacatcactctgccaatcagcccaatacctcagaagcatcaagaaactgtagcataccactagaaggtttttggtgtgtatctttctatggagtcctgacaactgaaactcaactatgaaatgtaaggcagaccaatacttgtgtgtccttagcaaagaaccattaatcatatgtccttttacatgcttgctttatcagaacagtctttcacctgtgtctgtttcagcaaaacgtcccttcatgtgtttgccccagcaaaataccatccaacataactgaatttcctaagaactcttttaagtttccatttcaagtcgcctcctggctgccttcagatcaatatttagacctctcagcttctctagcatcatgtctgcctgcatgctgccttgatccctgccatgataataatggacc

SEQ ID NO: 2467 - DNA, 1000 bp, mus musculus
tgttaatcgccatccactatacgcaaaaacttctttttaaaattaattattttatttatttacatttcaaatgttgtccccattcctggtctcccctctgcaaactccatcccatttcctctcttctttgcctctgagagggtgctctcccacccacctacccactcctgcctcacccctctagcatccccctacactgggtccaaaagcttccataggaccaatggcattccttcccattgattccagaaaagccattcctctgctacatatgtagctggagccatgaatccatccatgtatgctctttggttgatggtttcgttcctgagaactctggggtttggacacaggaccttctttgatgaggtagagagacacattaatctatgtgtataactaagtcactgggggtccgtttaatactacatcatatccagcagaataatagcagtatattttctcttaaggtttatgacctgtcttagccacaggttcttggcctgataatgttgacacgtatggattttgacttacaaaggggcaatttataaaggagagcaattaattgggtttatgattacagatggttagagtgcttgatgatggagggaaggaggcacgatggtaggagcagctgagaggtcacacttggaacagaaagctgtgggcaaaaagcacacctggaaaggtatggatctttttaaagcttggcgcccacctccaagtgacacactttatccagcaaggccacacccctgaatcttccctcaacaatctccaaccggagatttattatttaattgccttagacttatagggggcatcttcttcaaaccaccacgtgagatctggcgattgtgattatgttaatttcctttttgttgctgatgttttcatgcttcgctgatattacaacccagcttggttagccttccatcatgcaccaaagaccaggacctttccaggattcctctaaacctttagcaacaggatgagg

SEQ ID NO: 2468 - DNA, 1400 bp, mus musculus
cgagtttcaagaaagataaaaaggctaccttctacttctgactactccttaattcccgtgcaatctttaccagcatagccttttttgtttatcataaacatatttcattttgcacgaaactttcatttttaaaatatggactggactagaatgattgtaaaaaaatacttatttcacaaaactgacaacctatgtttgatcctctaaactcaagcaaaagtgctaaagttttcctctgatccacatgtccacatgcacactatacacgtaaaaataatacatttaagaattaagcaataaaataaatagaaacacatggactacctacctatcattatctgttagttaactatttacatctatgttagccacatctttttaaaccttttttcttagcttgtaaattattttatttcctgacttaccaatttgaatgcagaaacatccacccacacaacccctccccaccccccacccccccacacacactgggtgggcataactaagctccttggtcagctatctttcccatatggacatattcgtttcttgtaaaaagggaaacaaagcaaagcaacagaaatatttacctttgcttcttcttggcttgccatggttctgaaaaggttttctctgtctgtctcataagaagttcgtgctccgtggtaatatcgccagcctgtgtcactgcactgccagttgagcagggagctggctcagctgcaggtgcagcagcttggtgttaagggtgcatgacaagtttactcatgggatatttctccaatataagggcatacagacacaaactcagggacatgtaacggctaagaaaagtggttgggtgaagatggatttagaaaaggagaaaaggagtaaggaaacttagtgagaagcagttgttcctttgcagtctttagtgggaacaagtatgcttgccttgcgagttgcggtcactgtacaggcgtcgctttcttatagaaggggaagaattttagatgttttcctgggtggctgggaacagtttgtctggctgtcagaaaaagacacacgtgaagacagctattctaactgtggatttcgttcttctcttctctgactgggtggatgagtaagcaaacatcgagttgctcatttctataccaaagataaagaaatttcaaaggaaatgaagtagtttcaccacgcccaacctccaaattctttgcatttgaaaacaaagactcatgcatgttttcacacacacacacacacacacacacacacacacacaaacacacacacaaacacacacacacacattctttaccatttattgcttaaataagtatactgtcttaactggagaattttaaagtgctttctaacttgtgtgtccttttctccatccaggaatctctttt

SEQ ID NO: 2469 - DNA, 1200 bp, mus musculus
gtggtgagtcttctgtgttatccaagtgaataacaggttaaggtgatagcctatcagatcatatgattgacccaaggcacactatagcagaatgatcaaatagtttttgttgttgttttggataataatccaatgttcagaagacatgagataaaaaaaattcagttcttttaagtagtgccttgagctgtcattttggaggctacaagtctggcataccagtatgggatggctggtattgcagtcaattaaattatttaataaagtgtttttattttctaatctccctctcgatctatctatctatctatctatctatctatctatctatccatctatctatctatctgaaaatgacagatgtttttggtagaaagaacagcagagttaggggtccgcccggcccgggagcacattgcctgagcattggcagcagacatcttggttctgggaccctgctgagagtattctgcacaggtgagtgtgcggaatacagaagctaacagcttctgggacggggggagccacagagcttctaaggcagcccccttttcgggccccagacatccggccacttcccggccagaggatagtagtccgcccggcccaggagcatttgcctgagcacggcagcagacatcttggttccaggaccccacctacagtattctgcacaggtgaaagtgtagaatacagaagctaacagcttctgggacaggccaaagcaacgtagccgagggacaggtcctgttttgggccttcatcttcggccaggagggaggtcctaatgccaaatatctgtgcaccttccctgtaagaggagagcttgcctgcagagagtgctctaaccactgaaactcagaggagagatttagtctccaaggtctgctgatagaggctaacagaatcacctgaggaacaagctctaaccagagacaactaaatcaactaactccagagattatcagatggagaaaggtaaacataagaatcttactaaaagaaaccaagaccactcaccatcaccagaacccagtactcccacctcgcccagtccagggcacaccaacacaccagaaaagctagacctggatctaaaagaatatctcatgatgatggtagaggacatcaagaaggacattaataactcattcaaagaaatacaggagaacactgctaaaatggtagaagatcttaaag

SEQ ID NO: 2470 - DNA, 1000 bp, mus musculus
tggaataactgggtctccaggatccagagatgcagggacccctgcccagccagtgacactggttatttccggtctgagcctgtgccctgagcaaacctggggcactctggctctgtttctacccactcctacaacacccagaaggagcacgactcccaggtactctgaaacacttagtatcacaggtgggtaggccacaacatctgacccaacacctagagtaactgggaccaccaggatccatggacaaaggaaagtttgcatgaccagtggctcaggttccttccagtttcaacctgcacccagagcagacctggggtggttgttctgaacccactcttacaacacccagagggaccccaactcccaagtgctctgaaacacccaggatcagaggattacagaggaatcttgactcccaggagatgagaaatacccaagagtgctggagctctgacagtcaggatctcaacatctttcccaacacccagcctaactgggacccccgccccataggaaccaggaaacacaaacctcatccagccagaggcatggattctttccagcttgcacctgtgcccacaggaaacttagggctctagacctgcacccaattctgcaacacccagagaaaaacttgactcccaggagctctgacacaacaggatgtcaggagcttggtcacaacaggatttctgaatcccagagggagctaaactaataggacctctgacacagccaggatctcaggaccacaggatcacagaatcacagagacagctaaactccgaggagttctgacacaactaggaacataggagggacaggctccagtcagagactgcaagggcatgtaggactagagataaccagatggcgagaggcaaacacaagaacataagcaacagaatccgaggctacttggcaccatcagaaaccagttttcccactacatcaagtcctggatttcccaacacaccagaaaagcaagatttggatt

SEQ ID NO: 2471 - DNA, 1000 bp, mus musculus
ctgtccctgtccctctccttctccctcttcttcctcctcctcctcttcctcctctttttcttcattctgctttagttctggttgtcttggaactccatctgtagtccaggtgatcctcttgcacctgcctcccaaaagctgggattaaaggcatgcacaaccactgaccagctaggagttcttaatccaaattcctgtttgagttttgtcctaatactaaacaacaacaacaacaacaaatagaagacaaacagacaaaaataaaaagcctttttatttgttctttgtgaatttcaagtcttgttccccagtcccactcatctccctattcccttatactcatcttctgccctttcaacaccatccacaaaagaaaaaaaaaatcgtatgtggaagctatagtatatatcacagagtgtcccacaatataccattttgtctacactttgctagcatgtgttcattgcaatgagtcattggtctggtttgaggcctctggcttctgctacactacaatactggaacctcggtggcacttctattgaatattccattgttgccttgtgccatggagatcctgtagctttggttctataggactaggcctttcatgtgttccaagagctcataggtggagtagatgttgggatgttccaattcaaagcactgaatctgggcctgccagctctcccatacccacaccaatgggcaatctctccaatactgccccagctagctcattcaatgccacagccagcaagggggcaaagccagttctttctctcaggccctcaaggccacccacaccgcatcaacagggccagctcttttgttctgctcaggcgaggtatggggcctggtccccaaggcccctgcacttcttaatgatgattatgtttttacatgtattgcttccttgtttactatctgatatgccccatctcttaaagaaaacagattctgtgcctcatttgctactataccttaggtttagattaac

SEQ ID NO: 2472 - DNA, 1800 bp, mus musculus
cagataaagatttggaagggtaataatatttaaaccagtgggatattagcatatatatgtaaaccattactttattggatttattttctgtgttggagtgattgacagctctttaatatgatttcataaatagtggtggaaagatattcagaaaaaaatcaaagtagcttaaagatattcctgagcatattttatttaaatatgtcctaaaatttggtggtaagcaatattatctgacaattaaaaaaatctgactataaaaagcttcattcttgaaataatatttgactgtttctagcacaagaataaaatggacattaatgttttctgatgaaaataacattattttaatgcttgaaacaaagttggcttctcttaagtgtcattttttttttttttgcattcttatagtaagtccacatgtaagattgggaacaattcttctcttccttatagttcatacttaggaacaggccctggttagtctattgtggtcactgatcataaaattatctcttcctttgtcaactatcagggattacaaggagcagtgcaacatgtcgaagtctggaggaagtggctaggaagagtgatgagaagaaaggcttttttttttcttgagtgagaagaatgaaattttattttaaagagacttatttattattttatgcatatgagtgtgtggtccacacgtgtgtttgtgcatacgataccagaagaggagaccagattccatggcactgtagttagagatggtgagctgctgcgtgaaggctggtcatcaaacccaggtcgtccgtaaacgaagctagtgctttaaatccagcagtggctcagccttctctctagcaaccaggaatccaatcttgtgagaacctgatgcttgcccgactaaaagcaggagacggcaatcctgatatttacttatacctggaactataatgaatgtaagccaatggaagatgatggagaaatgtagatatgtgaatgatacatatttaattaatgaatctgaaattcttacttgctcagacaattaagacagtttctgttttgtttaaagtagagggaaaatggatctgtaaatattttactggaaaaactgaaacagattactcttttggatttccacatttaacactgcaacaaatgaacatagctaatttgatttcatgaacagtgattcaactttatcatgtctatgacaattgaattaatcaaaacccataaattacgagggtagaataaaatgtattattttgtaatattttaatttaaaattctcattaaaagaaaatttaaaataaatccactttcagaaacattattttataattttataataaaattcagttgtcgtttttctcaagaattaaaatttgagtatggactttggataatactgtatcatttatttaaaatattctggtgtttccagtcattcaaatgttcatttggagacttcaaccaaggattttgcttgcctcaagaagcagatttaagatcaaatctctatatttatgatgaaagagaagatagccataaaattaacatttaattccctaaacaattattatatccctaaacaattagttcacatacttttctggtgtctgtaaatgaatgattttaaaatatgactaataagtaaatgggggaaaagactacattacttaggaattttattaggctgtcaatttaaacactcattcctcaggcaaagtgcaacttcacatttaaataaatgtatattaaacacttcaaattgatagcatcaagtcttccctggggtatgattca

SEQ ID NO: 2473 - DNA, 1400 bp, mus musculus
tcacctgctactccctctcattcattctatctacctaccatctattaatctgtcatcatcaaatcattatatgtagatatatatatatatgcatatatatatgtatgtgtataagcttttatgtatataaaatctaatctaggctcctggtatataagaaaatatggaatatttatattctgaatctggcttaattttctcaatgataatctgacattgcatttatttttattaaacaacataatgtcactctaatttatggctgaataaaactgtactatgcatgtatatttcttttattatactttaaaatatttgtattgacatatgctaattacatttaatagtggctttcatttggcattgacatacaaatatataatattttcacctttattgaactcaaatgaatacagataaaatataagaattttcacttttatgtaaaacttaatgaattgttcaaaccaaacaatttttctcttagctacttttctcattgctgtgaccaattcccggacaagaagtaaatgagtaagggtttggtttacaatgccattatgaaagccaaggcatggtggtagggacaggaggccagaaagtcatgttgtaatcacattttgccactagggaccatcttccctcaaaaaggctccgttccctaaaggtttacaaccttcccaaaaagcagctgaagaacaagctcatgtaccaggaaatgggatctcatcacccacccctttgccatccctctctccctcccttctgcctgtagtcaccagttattctcctacaggaataaccattatcttgaccagcatagatatttcttataccaattagctgtcaatggaaaatttggttgatctatagtttgactattatggacagtgctacaataaatagagacatgcaaatttctctgcgatatactgacaaaattctccaaatacgtagttagtggtgatatatttggaatctatgggaattcaatatttaggttttgaggaagctccatagtgatttctattgtaactgcctcatttccatcagcaaggtacgtgcattcattttcttttgcttatcacctacatgaactgtttgttctcttcatgatggccattccaaccaaggtgagagtgaatcactaagtgggtttaatttgcatttataaaggatagttgttaaaacaatttctgctcaggttatatatccatttattgattttcattattcattttagtaaggcttctttttgagatttttaatatgttctagatattaatcccatcagaagcacattttctgccattatgtaggctggtggtctctctattgtttctttatctgtgtggaaggtttttggtcctgtgtatttctattgatcttttcagaaagcc

SEQ ID NO: 2474 - DNA, 1000 bp, mus musculus
acgtaatgcttggctctctgtgttccaattcaccctaaagtgtgttaccaggggagaaaagaaggaaggcggagctagaggactgttaacctgtctttccagattgctgactcaacagcttaagtttcaattcctgttacagttcaccggtgtttgtgacgacgggcctcacaaactccagtattctgttacagttccatcccttaaacaaaactgagaatgatgaagttgatttcctcatgacatctgtaaacgagcttgcaatgaccagacctcaaatatactttattcttagccttgtgcctattctcgggctaattaggctttggatggacaagtaacagacaagcagagaatctagaaaaacaaataatagcaaaccattttcccagggagactccatgagctgagctctctggctcatgctccagccatgactcggattgacagtttatgcctcaggacctgaattcaaaagctgttgtgcccttattgagagccccaaaagaccaccaaggagccgattctaaggcaatcacagctagggtctttattcaagctcgagctcgggccacactattgtcactgacacagcctgacaggagggtgtagcaccccacccccctgagtccagtctcaaggaagcatctatagaggcaagcaagggagcgagggcatttccagcttggcacacgtcagattgggcgggggagctattaatggaatttgttgacttttaaaatgattggctggtgctgggagccaaaccataaactttcataagtaaatatctttaggtacaactgtaacttctgctttcttcctgattggtggttgttagggagtgacctggaggccaatgctaggtccaggccaggtgtttaacacgttcagccttaggtgaggttctctaagatggagcctgaacccaagacggagttggtctgatctctcaaagcaacttgtaccaagtgctatgtctttatcacatttactcagg

SEQ ID NO: 2475 - DNA, 1400 bp, mus musculus
ctcttccatctcttgtattctgttgctgatgcttgcatctatagttccagattcctttcctaggttttctatatccagtgttgcctcactttgggttttctttatagtgtctacttctctttcaggtcttggatggttttattcaattccatcacctgtttggtcgtgttttcttgcaatactttaagggatttttgtgcttcctctttaagttcttctacctgtttagcagtgttctcctgtatttctttaagtgagttattaaagtccttcttgatgtcctctaccatcattatgagatatgcttttaaatcagggtctagtttttcaggtgtgttgaggtgcccaggactgggtggggtgggagtgttgcgttctgatgatggtgagtggtcttggtttctgttagtaagattcttatgtttgtgtttcaccatctggtgatctctggagtttgttgttgtagttgtctctggttagatcttgttcctcgggtgtttatgttagcctctatcatcagacctgggtcactagctctctcctgagtttcagttttcagagtactctctgcaggtaggctctcctcttgcatggaaggtgcccagatatctggtgtttgaacctgcctcctggcagaagttgtgatccactcacagaggtcttaagatcccgtggatggtcctgtgtataccttacaggtgtctgtagactccacgcccaaggtacccctgtgctggcgtggaccggaagggagttgtgcccctcctcaggccgggttttctgctttcctaattaatgcattctcaggtccctcgagattggattggagcagatgctgtgttccactcatcaggggtctcaagatcccgtggcgtgtcttgtgggtagctggaaggtgtcagccgactctgtgccctatctaccataataagcatatcttaatgatagctttaaaattctttgggaaattatcttaatccatggtttcatagaaaattactgcttaattttctcatatttgtgaatttttcagcctctttcctgaaattgattttcagtttcatcccattgtttggggagtgcactggtatggtttcaatcaacttgtactactttgtatatgttctgatttcaatcttcttaaatttattaagactacatttaggacctaataaaatatctgtcttacagaatttctttatggccttaaaagaatggtgtcttgttgctgctagatgtaatgtttaagtcattcaaacccaatgctagatgatctgtatgctgttgatgatgattgactaaagtcctgtgattatcatcatcatcatcatcgtcaatataatcaccaccaacaccaccatcatcatcagttgtcaatttgcctgataatctgatcctaa

SEQ ID NO: 2476 - DNA, 1200 bp, mus musculus
gccttaggctttctcagatgttagcatggaaaagcttgcctgtggaaactcctccatgacaggcaaacaagggcagtttgtcgacttcttaaaacacaagcgaacctacttttctataaggcagacccaaccctaaagaccaatagcttatttgatgctgccctctagtggttgaacacactatcgctcgctacattgttttacttaaagaaaaataagccaggatggctggaatagtccctaaccatttagacttaaatttgtaactgcagcgacccccatttttaatttactgacatccttctccaaacacaacatctggtaggactgctgcagaggccataggaaacgccccttactaaggccgctcagtctcttccagggaatagagtggccagagcccctgtgtctacctaggctggactcaaggcagactatttagaaaagcattctcctctcttggaagactcacgcagcccatgtagggaggcaggactctcactcggctgacacatctgaagtcagccccaagggtatcctcctgctgagggtaccgcagccctgaggagttctgttcctcttggtgaccctttcctcacggatgctcatctgtcccagctgttagccaggcctcagcagctaggagggcctggtcatgcctgtgtattcggctgattcctcatggacagatttgtgactgagctagctcctggtaggtgtgaacacagggctacactcctgatactcagttgcaagtcttgagccatgaggatcgggctggcatcccactagccactactttaccctgtgtatctgcagctacattctatctaacacatcagggtgacctacccagcctgggatgctgaacccgcctcgaggggctttctgaagattcagcgaggcgtgtatccccacctttcctgtcctagttcttgggttctgaaaaagggatttaccgaagacttcttccaagtctaattctgctgagcctatgatgaaagaccttcgatcaggtgtttagtagttttcttggaaagccatttattattgctaattattaccaccaggccagcagcacaggcctgtactcaggaggctgaggcaggaggaccttgaggttacggtctgatgggaggctaaggccacctgggcacatcactgagctcctcttttgaaagaggaacacggttgtggatg

SEQ ID NO: 2477 - DNA, 1200 bp, mus musculus
gcaaacagaaacggaacaaaagggccgtgagtatcacagagctagagatactttctaggttggctgacattattcacaggtctccaatgataagatagccaagaaaatcctctaaaatacagcaaatgcctacttctcaatcttggcattaaaaaaggggagctacttagacacaagtagccgttgctttgcaccatacaataaattattcacgactgaaatagtgcagtgacttcaggatcctgagtgtggtctttcacaacaccgagttgtgtaagtacaatgtgcacgggccagccgcctcgctgcttcccattctcagaggcagaaccagccctgcctgcggtggaggagctctccatggtgcttactcacatctgctgtctcgtctaacagtggtaaaggttttctggtttctctctggatctacctgcctgtaacaatggcagtcgcacgagccaccgctcatctgtttttccactttggcctgtgcagagaccctcaagtatttttctagcttgactgtccagttagcctagctctggagcccttacagcggccaaagttcattttgtaggagagctcactgacatactctggacaaaaaagttaaaattcctcagattcaagtcccaaacatgatgttgttactttaggaccactcctcacaaaccatgcccttactagtggtttataaacaaacgtcaaacttctaaaatatgatgaacaaacttcactcttatatttaaactaaaaccaaaggaaggcaaatttctgcttagaggccagctgggtttaacttcgcggagttttctaattacggctaactgcccgcacaagagaacaaatcaataagcagcaacaaacaggaagaccaatagaacacaagtgtcaagaactgaacaataaaggctctggtcccccttgagttccttcttgtgtaaggcatgaggtagagatcaaagttctttttggagagaggtaccagccccaaggttcataaaatacttgtaaataaccactggataaatatataaattcatataaattcaataatcaaaaagcaagcagttcaattagagagtgagtataaaaagacacaaacatttccccttattccatgaaaagacttcagcattgctcttcattaagaaaatcaatacaaattaaaaggatgatacagtatcagtacacagctat

SEQ ID NO: 2478 - DNA, 1200 bp, mus musculus; identical to SEQ ID NO: 2477

SEQ ID NO: 2479 - DNA, 1400 bp, mus musculus
caagcacaacattgagtagaagcagagagaatagacaggcatgcctcattttcttctgtttaccatgagattggctactgatttatcatgaaggatgttggattttgtcagaggtctttttgtcatctgttgagatgatcatgcagtttctttctttgattgatttaagccatccccaattacacttcatgttaataattttatagactgtatttttgatactgtatattaaaatagcttgctttttagtgtcctcttttttttctccaaactgcacattttgtatttcttctccatttcctctttttcactgtagccccatataagagttactggttataacctttccactggttccatgttttactttcttgaaatttcttccattaaagaaactagcctactgctttttagtttggctgcctgagaattctcagggcatgggcaaaaagcattcagattcttttacaaaataacacacaaatggcttctagcccaattgctaacattctttccctctgaaatattttgagttaggcctctccttcctaaatttctttccgctctactgacttccagatcccttctagaatgatctgtcaagtattgcttacattattcagctgcttttctaatctaaaggtctaaagtctttcacatctctgcaataaaggttcttaatatcaacagccccactccttgtaccaatttctatccaaatttactttcggttgttagaacactacgacaaaaagcaacttggggaagtaaaagtgtatttctttttatacttctgggtaagcaaccaccagggattgctgccaattagcctcctcttatatagcccaggaccacatgcttaagaacaatgccgtccatagtaggatagtcccacctacctcaattaccaaccaggaaaatgcctaacagacattcccgtgggccaacctgatgtaggcaacttctcaattgaggttcttttcttaggtgtgtaaggttgacaattaaatgtagctatcagaaactacattgaaactatagtcaaaataaagagaattttaagaagtatgtgtgtgtgtgtgtgtgtgtgtgtgtgtactgtatgtatgtatgtacatgtatttacttttctgtgcacagatgtatgtacttggaagccaatgttggcatcatttgtcttcattgatctctctctttcggtagacattgagctcattagttcatttagactgactgtctagcaagctcctatgatccttgatcgctacctctctagtgctggttttagatctaggtcaccatgactaggcttttatgggggtctgaattcaagttcttatgcctttgtagtaagcagtttatggattgagccatttccccagacacccaaattgggaatt

SEQ ID NO: 2480 - DNA, 1000 bp, mus musculus
accgtcctgcatggagcctgggtctgaggacatgatggactgtaaagcaattgcaaaggaaagaccatcaggtagggagtgcaatgaaggtctcaatggcatcctggatgacacctttggggtaggtggacctcggtagacatactgcctcactgctggagtgactaagacatccaaagacacagcaccggcaaagcagcaccttctggggactgtggggggtttcactctacactcagtcctggtttctgtgtttggctaggagtctgtggtttacagacgcatcactccagtctcctctttcatcctcacatgggcagtctcccaatgatactgtcttcgctcttcaagtcctctctcccctaatctctctctcggtaaagatgacagttatatcagactaggtaggggcacacaataatgccttcattttaactcaactggttctttaaaaagaaaaaaatgtttctgtgccagaaagacgcctcagtgggtaagggtgcttgctgccaagcctggtgacccgagcttcacctcatgacccacatgatagaaaacagatgaccccacaagctgtgttctggccctgaagtgtgcactgcggcacatgcacctaccaagtaaagaaataggatgtaattcttaaacaaccctatctccaaataaagttgtactcaggtattgggagattaatcttggagttattacagttcacactgtaataagaatctgtctttctttctttgcccacacgacaacaccaagtgtcattgacaccaccaagtgtcactgaaaggctgcatgcaggcttacatgcacatcctgtagtgagtgatgtgcctctgcagtgagggatggtctctctgtgaggctggtgcggctctcagcgcagccatgtttgagatgagttgggagcacaggcactaagggaggaccagctccaacgttgacgtcactggtgatcgcctgtcctccaatcaggagcaagggcaccaactcc

SEQ ID NO: 2481 - DNA, 1000 bp, mus musculus
acttagaaaagaaagcgtttaattgaggacttgcttcagtttcagagggtgatccatggtcatcacggcagggagcaaggcagctggcaagtgggcacggcactggcgcagtagctgagagcttacatctcccacacccacaaggcccatcgagaacgaattacctcaaagccagtgacacacctcctctaacaaagccatacctcccgacccttactaaacagctccatcaactgtggaccaaacattcaaatgagccagtaagggccattctcatttaaactgccacagaaagtaattgaatttggttttagtgactttcaaaatgctgtatgcatatttaaatgcttttttaaaacctttaattttttttcacttactcttcatagaatatttaaacattgttgttgttgttgttgttgttgttgttgttgttgttgttgttagatgaagtcttagtgtattgtcttggatggcctggcctggaactcactgtgtagtatctacctgcctctgcctttgcctctgccttctaaatgctggggttcaaggcatgtaccaccttgcccacccttcatagaaaacttaaggagaaagaaaagaatacagggtacataaaaatcaagtataaccaatctattattcacttctgtcttagggttttattgctgagaagagacaccgtgaccaaggcaactcataaagaacaacagctcactggggctggggctggctgaccgtttcagaggttcagtccattatcaccacggtgggaagcacgcagtgtcaggcacacatggggctggagaaggagctgagagtttgacatcttgatctgcaggcagcagaaggagactgggcagagcttgcacagatatatgacctcaaagcccacccccacagtgacacacttcctctatcaaggccacacctcctaattatgccattcctcatgggccaggcattcaaacatgtgagtctatgggggccaagcctattc

SEQ ID NO: 2482 - DNA, 1000 bp, mus musculus
tcacatgtgttcaaatgctccaaccgcacttcctgcaacgtcatcaagcttacctgggggctggctgtcaagctggacagcgcagagcagtgctccaccactgaagaggacgtagcgggccagcactgacctagcccccaccccaccctcaccccagagcacttacctggagaaggcctgcaacctcactgactgctaactcacttgctctctttgacgtcagtacagggatcattgtctcattttcaacattagggatcttttgaaatcgtgcaacctaagaacaaaacaaagaaacttacttgaatatactagtagaatggagtctagaatgaaaatctaaaataatcacagcaatttcttttccacttaaggaagtatattaagatcgattgtgagtatctaagacaactcaatactgacattcttctttcaaaaccatggacacctgctaacaccaggtttaatacaaactcttcccatcacatagtttaaaggcactgtttctttcatttctccagcaacataagactcaaaacagatgcttttctctcaactcctgatgaataagcacaatcataatcctataaagtcattatgttaattccaggacaagagctctaagctctctccacttagctgctcccctgttcacttctcttttccagaaacctggctacacttccaaacatctcgacagcaagcaagtctaaaaggtaattctcacaccaggagaaaacggagacgctcaagagaccagccaagcagaggtgagagatggcacaggttagttggcgggttcggaacatgcagaggaagtcacaggaatggtagcaatgatagtcatttcattcgcttttataaacatgcatatcaaaagtgctcatcacaattctagcaacaaaatccattcagatttgtcttcagtgccagctgagattccttacagacacggacctgcagctacaggctcttcactactcaaactgagaacttttgc

SEQ ID NO: 2483 - DNA, 1800 bp, mus musculus
aatagtactgtcctaggcagaggaaatctcaagtgcaaatggcagaggtgggagagagtaaagtctccctacagacctagaggaagggactggagggagagattcaggcataagacagacaggaaaagtagaactcagattaggtgatgagaggactttaaccagaatcaggatgggttttagccaaagccactggagtattttaaacagagaaaagtacaagtagatggtttaggaagattccctgggttgaaatacggaggctgcggtgggaggatcgagagggcaggtggggagggagaacaggaagcccgtgttaggtaagagagaggtcgctgttggaacagggaatcactaaatgaggggctcaggaaggtttgctaagatctgtgggatccagttaaactgttgggaattaaaatcagaaactgatgagctggagtcattcatgggggttgggggaaaggacagggcttcagggctgctttctagagtggccactgagtggtaccattcgtgggaagaggggaaggggttgaatactgtgtgggactcgttgggggctgcagcatatgtgcagttcaagttccttgtggacagtcagagatccagaatggggtgctcaggagagacctgagggtgcagataagaaagtcatgcttaacaaacgatggctaccacagaggggactggaatgtcgtgccagaaggtggaggagccagcttcaccttcatgagcacatctgaaccacctctatgaacaacagaatgggattttgtggtatttctctagttatggggttacagcaagctcccttctgctcagagatcacaccaagacgaacggctctccgcaccgaaccccggtcccgacgcccggcggggggagaccccgcgccgccgcggggacgacgcggggaccttgcctagcggggacagatgaggatccagctatccagggccaaccaaggcttcctcggcgctgccatatcggtccgcctgggcgggattctgacttagaggcgttcagtcataatcccacagatggtagcttcgccccattggctcctcagccaagcacacacactgcctccctccatgttccaggacagtttcctaaatgccaacagggatttaggagcaaagtcaggaccaagaattccacggagccagacgcagtgaaacagctttagctacccgcagaattctgttctctagtctgaaagcaaggattccattcttactatttgactccaatggtattgaaaagatggctatagatcagtagagttgagctacccgaaccttccatgtgcactgaaatagcagcaagagtttccccaaaagcagaccctgaacaagagctcacatggccctgtgtcctagttcactttctgtttctgtgatgaaacactctgatcaaaagcaacttagacgatgatgggatttatttggtttgcacttctgggtcatagttctttactgaaggaagtcagggccagaattgaagcaagaactatggggaagcactgcttcccagtttggtcaatgacttatactcagatagcatccctatatagcccaagtgtctggctcctctccccccatgcctagggattggtgatacctccagtgggtccttccagatcaaccatacatcaagataaatgatcacagagttggtctaaggccaatcctactgaggcaattctttggcttaggttactatagattctgttgacattgacaataaaaaccaaccaggacaacaggaagtgactcctaaaagcatggaagcaga

SEQ ID NO: 2484 - DNA, 1800 bp, mus musculus
ggtttcctctgagcccacctccaatacttccacctctacgaagcccttccctaagcatattctccaagttgggggtctgatgtctcttctggtttccatgggcccctatgcagaatcaaccctgggccaggctcagctggccatcccctaggccaccttgggaacaggatgagttagttctgtatccgtctgtctgtgtgaactacactcgtgaggtattgcctaggtccctagagggttgtcccctttcacacggtgctgctccctgtctcccccccaccctgattgctcccctgcccttggctaggctccagccagagaaggttctggtcactcttgttcaaaaagatctgccattgcctcagctaagtggaggggtctggaagccacgctaattgattaattaaaccctctcggttaattagctacattcctccagggaaagaagtctagagctgagccaaagcctagttgggactgggggaggggttcattagctagggtcaggcccagcctgaagcttcaggcttgatggttggggaggcagaggagaggggagggctggagaggtgtgtagagtagttctgggctctggagccagctggtccacctaggggggtaggagagtgggggggtggggggggagaagaggcctttagctttgtcctggaccctgagctcaatcctgagcatacacactgtgagctagagactaggggttagttagccccgaggaagagagaagcagaaaatccaggagcagagggctgcatctggcaggataaagcccacacagggctggggggatccaggcaatcctgtccctgctgctgcttctacaccttcgggggaggctttgaatgcctgcacctgaacataaatctgggctgggggggggggggggcaggctgcagcaggtttgcagcagaggcagcacctgatcaggtttaggttttaaagagtccaggggcggggcttggagaaacaggagaagggtgggacctggcgcagaggggcttcaggcacccatgcagcaaggacacccatccggtctgagaatagcatcagataaactcccactgcgttgcctagggacacccaagttcttcctctggttctctttcctcatcggcaaggagccatgggggtggtgggtggggaggaggtgcccctgaggccacagccttgggatatgaatgtcacccagtatgtttccttgacccaggacaaagcaccttcttcacctctgcgctcgctctcgtggcgctgagatgcaccagctagggaagtgacatgcccagcccccaaggataagcattcaggaaatgcagaattctggttccagggtcgcagagggacacctgtgtctagcctggctcaagaggaagagggattggccatgggtcagaggcagaaagcccaggacatcccgagcagccacaggcagcaggcaagggctacagccttggcaagaagcctgccctgggctggtcctccagctccctgagtggctgcccaagtgggaacaatgaccctttcacgtcacgcctcctccagtcacagcaactttggcgccgcaggacaaaggggccatttcatcattgttggattggatcaacagcctgcgcgacagagctctgctgccccccacccagccaggcccaggactctgtctggtccaacctcatgggtcccagagaccctcttgatccttgtcttcctttttctgacttactgtgagaatgctagcccagcttcccagcctcagtcttcccgtgtggaaagagggtacggcagtgc

SEQ ID NO: 2485 - DNA, 1400 bp, mus musculus
gtacccaagaagctaaagggatctgcaaccctataggtggaacaacattatgaactaaccagtaccccggagctcttgactctagctgcatatgtatcaaaagatggcctaggcggccatcactggaaagagaggcccattggacacgcaaactttatatgccccagttcaggggaataccagggccaaaaaaggggagtgggtgggtaggggagtgggggtgggtggctatgggggacttttggtatagcattggaaatgtaaatgagctaaatacctaataaaaaatggaaaaaaatagaaaaaaaaaaaagaaatattagcaccgatgatttaattaaacctaagtgtttgtatagtcaaaaataggcagggagtcaggcacacaccattaattcagcactctggaggcagaggcaggtgcatctctgactttgaggccagcctggactacagccagtgctcttgacagccgagtcatctctccagccctggccagactttcaatttttctgcaagctccactgtaggaaagtcttcctggcatcgaggtcagctctgcaataccgagaagggtggaaagcaccaggaagggcaaatgatgcaacaacctgagcacctactatgctccctctcacaccaacccacaagtgtctagcagcatttctgtgcaaggccatggttcctgccatatcaagaattgtcttcaatcatcctggctttcacaatcctggtttctgactggctccccatgcccagaggccaggcctgctgggtgatccactccacacagggttcttggaagatgaggagaaggggaagggaagagagcagaagctataagttccacactggcccctcgtgatgtggaaggtggtgatggaaggacagaaactgggagccagaggacatgggtccttgctgggactcagtgtccctataccaaactatagaaggaacccttctacaattagggcctctctattgtaagctgatttctttttcttttcttttcttcttttttttaatgtgttacaaacctttgtaaagataattcatgccatttgtccaaaaaaagataggttttcaggacttattatattgtacccaataaatctttgagtgtataagttgagtcttcactatatcacatgatgtattcatgatgaaaaacattgagagtcttgctacatatctgtcttctagtcttctatttgacaatattctttctttttttttagatttttttttacctttttttcacttttttttttttttttttttttttttttttttttttttttttttggtttttcgagacagggttccgaacactcctccattgttggtgggattgcaagctggtacaaccactctggaaatcagtctggcggttcctc

SEQ ID NO: 2486 - DNA, 1000 bp, mus musculus
gtcatcacagaggacttaacataggaggggccactgcacgggtgtgtggctccagaagaggcctgtgaaagtggctttaaagtttccttagcttctagccggcggcctcagtaaatgggattaaaaggtcaggagggggctgggcataccttgcagaccctgtcggtcaaaaggggcgttgactttggccgcaccagcagtgcgagcagcacctcaaggttccccagctccagcaggaaggcggccaaggggtcttgcactggagaaccctgaagcagggttagcaacagctccagggtgcccaccacctgaggatacatggaatgtcaccctaggatgggttccccagctggcctagacacctctcacccaagcctcaccctccccaacctccagcctacctggccatcgtcaccggtagctgccaaaaagttcaatacaacctgcatgtcttccaccgagaagttcctaaccaagaactcacgcaccagacccaaaagggaagtctgtactgtacgcaggtcgtctgccgctagggggcgctcgcgctgcgggctggcaggtccgacaagcatagccagcgagtaggagaggtaaaatcggggtggggtgggatggggaaacaggcaggtaagctggggcagaacgtcatcctgtccccaaaccaatctctgctgagccggacctccaacatccgccagggcccgccagcctaacctgtagtgcgtgcgcagagcatcgaggaggaactgaactccgtacttcttccgaagtttctgtctgtgctcacggaccatgctagacatgtactggatgtgacctgggtggacatcagcagaaagcttcttcacgccctccagggcagggctctgccctctatgtcctctcagattatagagggaggctgtggcttctcgccctgcctgccctgtacccaggcctctttcccaagcccctcacctacccaggcgcacagcgaagtcactgagggtccagaggt

SEQ ID NO: 2487 - DNA, 1000 bp, mus musculus
gcactataaagtgctacaccaaaacaggggatttttagttgtttcaacttctgggttatcttcatgtcaaacattgtggactgcattgtgggaggagctgttggccacacaacactggaaaatgcttagttcaataaagctttggagcattattgaacacaagactgtctcagagtaaattgttacttttctctgacaaggagaagccccaggaaaggaaggcttgcttggctcagtctgcaggtacagtctgccacagcagggaaggaggcagggaagcagtgggctgagtctcagtggtgaggccactggacacacacatccacagccaggaagcagagagctgaatgcttatgctatgctggctttctcctgcccgtgggctgctgggcctcctctctcccattaggtctcttttagatgagtctaaatacagtccaattcacaaggagatgagctaccacacagagcagtctctattgtgcaagctgatttgactgtggccactctgattttgcaaacctatatgagtgtggccactctgaaaaaggcctcaagggtcttctcaccagggacaacctggggaatatgatgattgtaacacaggcaggaataattgcctgtggagtttgtattaaattgcacaccagttaagatgctaaagaattttgtaagaggcatcggatttaatgatcacacttataataattctgctagctgggcaccattaacattcccatcatatagggaaggaaactgaggttatgactcttcccccaacctacaaactaactagcagagacagacttcagaacctacacttctgtgtagtctcaggcactgtttcccatgtggcataaagacggtgtcactgtctgtggtggtttgaatgagactcctccatagtcttgggcatttgaatacttggtctccagttggtggtgctgtttaaggaggcttaggggtgtggcctaacttagtgaagtgtcaggacaattag

SEQ ID NO: 2488 - DNA, 1200 bp, mus musculus
gtataaatcaagggtttgtacaaatgaaaaacaatatctacaatgcagaaagtaaaagcccttcaataataaccgatgaatgatttcccatgcaacatgtttggaaaactgtttagttctagttttggatgtaaaggcaatgtgcaatacatgcctaagttcatgaaactatacagacattcctccatgtcgatcccataagttccaaagagcctgcaaagatggctgctattcagagtaattgtcagttttggaatcacagtgttggttgacatttgggactagctaaagataacttgagattctttgtatttcataaaacctcagtggtgtctctttaagtaagcctatgacccaatcacgtggtttccaccacacgtatgatatgctctgctcatgcttcctccgtcagcagcctccacacagacagaagacacacccctctgcatggggcttttccatggtttttcttccaacacttcattaatgagacaatttttgttcagttctatagtattaatttatggactttgttttaattctaaactgtttctcagtggtaataaacttataaaatgcttagaccccaactgtaccttatctatatcggtcttacataaagaatctcggggcagcaaaggggagagacatggtgtgcatataatcaaattactttgtatgaaatttgtcctagctagggtttttatttctttgatgaaacaccatgaccaaaagcaatttggggaggaaaggattcattttggcttatatttccatatcactgttcatcattgaaggaagttggaatagaaactcaagcagggcagaagcctggaagcaggagctgatgcagtggccatggaggagtgcttcttactggcttgcacagtcagctttcttaacaaaagcgaaccacgaggccagggatgacaccactcacagtgggctggaccctcccacgtcagtcactaattaagaaaatgtcctacaagttggccttatagactgacctcatggagacatgttctcacctgaggttctccgtcttagacagctttagcttgtgtcaagttgacataaaactaaccaacatgaaactctcaaagaattaatattttttaaatattgctagagtagtatattcaatgattctaacttctattccctattggaaatcccagtgtatttcaggatatgaat

SEQ ID NO: 2489 - DNA, 1200 bp, mus musculus; identical to SEQ ID NO: 2488

SEQ ID NO: 2490 - DNA, 1200 bp, mus musculus; identical to SEQ ID NO: 2488

SEQ ID NO: 2491 - DNA, 1200 bp, mus musculus; identical to SEQ ID NO: 2488

SEQ ID NO: 2492 - DNA, 1200 bp, mus musculus; identical to SEQ ID NO: 2488

SEQ ID NO: 2493 - DNA, 1200 bp, mus musculus; identical to SEQ ID NO: 2488

SEQ ID NO: 2494 - DNA, 1400 bp, mus musculus
  misc_feature (1382)..(1400): n is a, c, g, or t
ttgacatttttaaacatatgactctgtgggcttactgggaagttctttgggtctgaatcagatttgggtagactcagcagggctgaaagatgcaggagtcagagcagcaagtgggagaggggtgaaggacagattcttcggtgtctagtcattggctacctattggtagtaggtcactaccctccctctccagcataattcaatggatgtatttgcatgcacattgcaagagtccagtgtcaagaaaggctaagcatggagatgtcatttggtgggttttgctccattcctttgttgcatgtaagtctccaggagggtctggctttaggatgggagaaaagagactttgactgttcatagtagaaataacaagtcacttgcttagctgcatgggagctagatataattagggaagagttggagcgatcactagaattgtttagtgataaacattgcttgttctcaaaaacattttggataaggaatacctaactccatagcctcatggatgtggacacttgtttcccaaacagtgatgtcatagaacccttaagagatggaatttcactggaagaaatttgaggttgcctatcatagccctacttcctgtcttatctctttgcttcctgcatgtggatgaaatgtgacttctctgccttctaactaccagcgtggcctcgcactgatgggctttatctcctagctaccctccaccccgacactataaaccaaaaaccattcctttttttggtattgttcgtggtggtggggtgttgttttgtttttttgagacagggattctctgtatagccctggctgtcctggaactcactttgtagaccaggctgaccttaaactcacaaatctgactgcccctgcctcccaagtgctggcattaaaggtgtgtgccaccaacgtccggcttatcactttctgtcctaagtaactttgagtcagagtatttcatcacagcagtggaaatcaaactagaacatcagttaaaacaaaatctccaccgtgtctaagttctggggctaaaacttaaatgctattaaaatactgaagtcaggatagccatatttaaaagcatggtgttgagattctgagggggcgccatcttcagctccagataaccggccacctttttggtgagagcacaggggtccacccggtccgagaggtttctgcctcaggcttcgcgggagccaccttggttctgggactccacggaggccaggctgcacgggtgagggtgtggaatacagaggccagcagtttctgggacaggcgagctccagagaccttctgaggcggcaccattttcggctccagacaaccggccaccttcctggccaaagcaacacagcttctgggaaagatcnnnnnnnnnnnnnnnnnnn

SEQ ID NO: 2495 - DNA, 1200 bp, mus musculus
ttcacgaggctcaatggggttcctcccatttttgtgcaatatggaatcagggagaaaaaaaaccctcaggctttaaaagaacttccgcacttgcttgctcgctcgctcgctcgttaatgctgctgatttccctgctgcagttagttctgtttcctgcaccttgtaacatattccacagtctctaggattaatcaaacgagatgaggggatttataccctgctgtgagccgagagggaagcttaacagtctcccaaaataatatcatttgacattcagagccattaggcaaagacggcaaagggcatttgtgtttcagactgatttgtgttcagcgggtggcagaccccttcctgtccccttggcagctacagggcggtgacctttctcactccagagatgtgattgccttcacaccagaaatgcccagcaaatctcaagttagctccgtcccacgctagccctgctggccttttacgaccattgtggcgttcccggctgacaactctctaagaagaggttgctgtgcagaattaataacgtctgagctggccctctagttggtgttcacgaaattaacaagtaccgctttggacaatgacaaaagtcgcaaaatctgagcccagaggatgaaaaggatttggacagcttctgctctgaccccttcgattcccaaattaagggaactgggggtcagagaggggacggggctcttgtttccaggatctgagagcagggctggaactgtgttttctcacattggcagcatcaatgggtaacagaaatcctgtgtgcgcagctatgataagatgtaacagcgaagaacggaaaggagcaccaagtctcgaagcagggtagagcggaagccttgggctcctcagcctccccagctagtgtggagatactctgaggaagccccatccctgtggaaacagttagttacctgacaactgctggtccaggtacatgtctcacacttcaccttctctactgggaacagacaagccttgtcaactgacagagggtggatgaccctcacagccttcttgtttacaaaaggaaaacaacagcaaaggtggtcttagagaccaaccagataatgaaaatgagcgggcatcatgagtcccacaaagcatttcagccctgcagcagcatcacaatgtggttcagcaatattaaccccaccccagcctggatgagga

SEQ ID NO: 2496 - DNA, 1000 bp, mus musculus
agacggtgacaggaagctgctggtgctgtcctctggcccctgtgtgtgcacaaagcatgtgtacctacacacaggtgtgtgcatacagcacacacatgcacacactcggaagagaatgtgtgtgtatgacacatgcacacacactgagccactttcgagtgctcggtggccacactgggcagctgactgtgcactaggcagggctggtggagaacagttccgtgatcagagagagctccgctggacagagctggctcaagtatctgtgctgctaatggtttctaagccaggaatttcccagtgtcgtggttttgaagatgcttggcactatttggaggtgtggccttgttggaggaagcgtgtcactgtgggcatgggctttaaaactcttgtcctagctgtctttagaacaagaggtagacttctcagctcctcctgcaccatgcctgcctggatgctgccatgctcccaccttgaaccgcagaacctgtaagccagccctgattaaatgttgtccttataagacttgccttggacatggtgtctgttcacagcagtaaaaccctaactaagacacccagtgtctatttaatctcttgaactatataacgcctgtgtgggtttcttttaaaaaagtgaaatggacctttctcctccctccttctctccttccttctttccctcattccctccctcccttcttgtcttccttcttccctcttcctctcgcctatgagctctggtgctctctagggctgtggctttaagatcttggctgttgtccccctgtagttaccttgcccatgtgacaggaagagagctaacttacctgtgacatgacatctcacgcattggagttgtgtgtggagtagcagatggttgtgagctgccatgtggtgctgagtatcaacctttggagagagcagtcagtggtcttaacctctgaactacctcttcagctccataccttgtcaggcagcaatggggtgagtacagagtg

SEQ ID NO: 2497 - DNA, 1000 bp, mus musculus
aggaatccctgtgaaatctaccaagaataaaagcctctgtctccctacttgacctacagatcagaggtagaggtgggctgtgtcagggctgcaaactcgcatctgcactgtgtacagttaagatgtctggatgcatcttgtcattttcccatccctggttgacatggggtcttctggttccttgcctctcctgagacttgcatggcctgaagactctctctcctcctgggtatttccaatgcccaaggttaacttgtgaagctgctaagggcgggaaatggggaagtaggaccagggaggtaaggctgcagggggtaagcactgtggagggagaggtccccttaagccttagggtggcctatgacgtgtaaggcctcagaaggatccccaaggtccatgggaaccatagtcattactgagaatagactttctgcctggccttttagggcagtggtgcaatttggatttgatttttatttagacgaagtaaaggattgtgacatttcttgagcacctgcatttacagggcaaaattcatacccacagcacagccattaaagagattgcactggacacaatgaggatttattgttgcagaattaagaatggactctgtgctaaaggaaaaataaaggttctccgattatctttgaagctcttttgccagtgccaaagctgccccctgctggtggctcggctcattgctttgttcctggatggaaatcgacatgcagagctgtggactagccctgtggagacaatgtacagagttgcaggataaccaccatcaggaccaatcaaggaggcagtgcagggaatttgcaaaggataaacctgctatttctcttcccatcagtatacatgtgtgcctctatgctcctcctgtgcatgtgtgcctctgtgctcctcatgtgcatgtgtgtctctgattctcatgtgcatgtgtgtctctgtgctcctcatgtacatgtgtgcctctgtgctcctcatgtgcatgtgt

SEQ ID NO: 2498 - DNA, 1000 bp, mus musculus
taggagatggtgaaggccgcagccgaggcaaacttccccaccacagccagcacagtgaccaccgtgggaagatctggaggacgagcaggacagacacacacagagaaggacagccatcacctaagcctcaacacctccgtgtctactcaagtgcctcaccatctatacccacaccccgggaaacttagtcctgaagagggaagggcaatggatctagccatggcagggaggaagaggctgggaaacagcctggtacctcctgggatgaagatgataatgatgtacatgatgccagccagagtcagagtacacagctggctccacttgcgacccagcttctccatcatgaggacactgaggaagcggccaggcatttccactgctccaaatatcagctgtgtcacatagatatccaggccaaagtcccccacttggaagctgaggctgtagtacaccagactgtccacaaacctacaaagtacccaagcatccttgtcactgctaggtgtacatcaggtcacacccaaaggaacatcctggcttaatgcgttcagaccaggagacgtgggtcacctgaggagaaaccgtcacagttagagcctgtgtccacccctccagtgacacacagcagaagaacacaagtgccttctgggtctgtcctaacagagggacaaggtcctggacacttaccagacagctatgagaatcagagtcaccttcctgaggtgagggtgtctgaaaaggtccaaggcgttccccgaggggcctgtcttctcagggaccagctacaagaagggcagagtgaggggccaggactcaggcatggagattggcttgagttggggtgtgccttcacctgctcacaggtacctggttcaggagctccggggaaagtggccggccgttcaccaaggctgccttctggaccagttgtttggcctcttctgtccttccttgggacagaagccaccgtggagattctggcagaaccctgtcaacc

SEQ ID NO: 2499 - DNA, 1800 bp, mus musculus
ttactctaatctcagcacttgagaatctgaagtaggtagaccacgctaagtctgatgctagccagggctatatgataacactctgtctcaacaaaaacaaaattccagtgggacaacagagttcctatcttcatggatcttaaagaccagagagagacagaagaaagcaaaagaaggaaaagaataaacatgaacatatgtgctgtggaaagtgccagcattacattccaccctggaggctgagaagcagtaaatctcctgaaggctagccagcaagcctggccccgctgtacctgtgccaaacctggaccacaggaggcccatgctcagaaagaatgcttagcgtgagtctgagcaccctcacagcctgcctccctgtggactcccctcactctttctgttctttctctcctcagatcaacaacaaggcctgtggcaagatccctgtgccccagcatgttgcccaggaccaggacaaagtccatgaacttgttctccagagcgagctaggcatgaagctgctgcaggggagaagcatcaagaaggccttcctctcccccaggactgccctcatcaacttcttggtgcaggagtgaccagggcttctaggaccctccttctctgcccagatcaagggaaggaatgttaacgtgggaaaaaaggcaaacatcagggacattggcctttgtgccaggaccagcaggagtcagcaggaggcctaaggcgagctcagggaggacagaaacctcccgtggagcagaagggcaaaagctcgcttgatcttgattttcagtaggaatacagaccgtgaaagcggggcctcacgatccttctgaccttttgggttttaagcaggatgtgtcagaaaagttaccacagggataactggcttgtggcggccaagcgttcatagcgacgtcgctttttgatccttcgatgtcggctcttcctatcattgtgaagcagaattcaccaagcgttggattgttcacccactaatagggaacgtgagctgggattagaccgtcgtgagacaggttagttttaccctactgatgatgtgttgttgccatggtaatcctgctcagtacgagaggaaccgcagctagcttgtgtctccagtgtcttttaccatcacaggccctggctctgtgctacctccctagaatacctgtggttcatcaccttcagctcacactccattcagacaatgctcacttaggcctacaagcaagggagaggcttaagcacaaggtctttaagcttgatactgtgcctggtctcaatgcctagaaattccaacttaactgtcgctatcataaaggattttaaatttttttacaagtgagaacctagcatgtcaaggtcctaggttccatctccaacacgaaaaaagcaaggcaactctaccaaagaaactaattacatacttgtattcccaatatgtgagaagctgaggaaggaggatcatgagtttaaagccatccttggttacatgagactcttgtctcaaagaactaccagggatcctaatggacaacaaaggttgaaaaccattgaattaataaatgttgtgaaccataatttctacccagtccttcttccttcattttcatctcatctgggataagtttagcccagtaccgtgaggaagtagagttggaagagattaggactagaagggaaggcagggctacaactctggagaggtgatttaagaggatcctcaagacacaaatgacagtcccatgacacacaggaagcacatgagggttaaagtgagggttttttgtttttgtt

SEQ ID NO: 2500 - DNA, 1400 bp, mus musculus
aaaaaaaaaaaacaaaacaaaaaacaggtgcaaacctagactacttataaatcactaaactctcaatcaccatggatggagaaaacaagatatttcaagaccaaaccaaattcaaaaatatctacccacaaatctaggcctacagaaaacaataaaaggaaaaccccaatccaggaaggatagctatatccaagaaaacttagaaaataaataattccctagtagcaaaaataagagaagcacacacaaactctctctgtgtctgtctctctctgtgtctgtctctctctgtctctctctgtctctctgtctctctctctttctcacacacacacacacacacacacacacacacacacacacacacacagagggcgaggataataacaagaaaaggatgaaaataacaggaaataccattcactgttcattaatacctctcaacatcaatggactcaattccccaataaaaggatacaggctcccttccagtttccatctgtgcaatggagctgcccctgtgccacaacactccacaccccaatcctgcccagagatagcttatctcccagttgtgctgacacaactaagctcactggtcagaccaccactactgccccaatacctgacccaagtggaaccagaaaccagtgaggagttggagacaggatacttgtgatttccatctacaccccccctctcccagagctgatcctgtgccatagttctctgtactccagtcccacctggagatagcttgtcttccaggagtgccaacacacctaaaattacaggactgttgatacacccaggctaacaccctcataggagaaataagctccagccagagacagcaagaccagctaacacaaaaaataaccaaatggcaagcacaagaaaataagcaatagaaaccaaggagacttggcatcatcagaacccatttctcccaccacagcaagccctggatgctctaacataccaaaaaaagcaaatttctgatttataatcacatctcatgatgctgataaataattcccttaaaggaatacaggagaacacaggtaaacaggtagaagaccttgaagaggaaacacataaattccttaaagagttacaggaaaacacaatgaaatagctgaaggaattgaacaaaaccatccacaatctaaaactggaaatagaaaaaaaaaaaagaattcacaaagcaagacagccatggatatagaaaacctaggaaagagatcaggagtcatcgatgcaagcatcaccagcagaatatgagagatagaagagagaatctcaggtgcagaaaacactgacacaacagtcaaagaaaatgcaaaatgcataaaaatcctaactcaaaacatcctggaattccaggacataaataactt

SEQ ID NO: 2501 - DNA, 1000 bp, mus musculus
tctacatatctaagtcctcattaattgcctatagctctttatctagacatgggacaccatgatatttcctttatctacaacggcaagttgttataattttccagttcttatttaagcagccacatgatttagatccattgttgtagtttccttataacaattagaagacaatcactcagtagagttcttggtccttcagatgcaatctttacaattttcttgtgcagtgtttctttagacttcttgcagaggagttgaattgtgataaagaaaatacagctatacacttcatgaccagttgttttctgcattttggtattttttttccttttttaaaaattagatattttcttcatttacatttcaaatgttatccccttccctaggttccctccttcaattgcccccctcccagtgctcctgaacccaccatgtcccacttcctggcactggcattcccctatactggggcatataatcttacaggaccaaggtcctctcctcccattgatgacctactaggccattctctgctacatatgcagcctgaaccacaagtcccaccatgtgttttctttgattggtggtttagtccaagggagctctggaggtactggttagttcataatgttgttcctcctatggggctgcaaaccccttcaactccttggtactttctctaattccttcactggggaccctgtgcttcatccaatggatggcttcatccacttctgtatttgtcaggcactggcagagcctctcaggagacagctttatcaggctcctgtcagcgagctcttgttggcatctgcaatagtgtctggatttggtgggtttttataggatggatccccatgtggggcagtatctggatggtcattccttcagtctctgctcagacctttgtctctacaactcattccatgggaattttgttccccattctaagaagcaacaaagtatctccactttggtattcttgagtttcatgtgtttt

SEQ ID NO: 2502 - DNA, 1200 bp, mus musculus
aaattataattcaatattaagaaagcaaacctccagattgattttcagcatggttgtaccagtttacaatcctaccagcaatggaggagtgttcctctttcttcacatccttgccaacatgtgttgtcacatgagaatttgattttagccattctgattgctgtcattttgatttgcatttctctgatcactgaggtctttgaacatttcttttgatgtttctcagccatcctaaattcctctgttttgaattccctgagggccaacagaaagaatggaaacaggcaataggagtaggaggttggaggaaccctccagaatgcaccagagacatgggaggtgagagactctgaggactctcacctcccatgaaatgccctacagtaaggagagggaaattatagagcccacctccagcaggaaaataggacatcaagtgagggagggggttgccatcccacagtcaaaaccctgacctataattgttcctatctgaagaattatagggatggaaatggagaggagctggaggaaaagaaggtccagcaacaggcccaaagtgagatccagctcaaggggaggtctcaaggcctgacactattactgaagctatggagcactcacacaaagggatctatcatgattgccctccaaaagacccaacaagctgctaaaagagtgagatgcagatatttgcacccaaccaatggacagaaacagctgacccctgatgttgaattaaggaaagactatcataagctgaggagggtgaccctgtaggaggaccagcagttccaatctggaccccggagttctcttatacactggaccaccaaacaggcagcatacaccagctgataagaggtccccaacacatatacagcggaggactgccaggtctgtgttcattcaaagaagatgtacctaaccctcaagagactggaggcctcagggagtttagaggtcaggtggggtggggtgggggtggagacatccatgtggagacaggggcgtggggaggaggtatgggatgtggaacgtcagagggtggaccggggagttgagggaaaaatctggagtgtaaaataataaataataaaaaagaaagtgattattttgaataaaatcaaacaaaaatatgaacagattatgaaaaaggaagaggaataagaattggtaatttcttacaatggacatgtc

SEQ ID NO: 2503 - DNA, 1200 bp, mus musculus
gttggtggtgttgctgatggtggtagtggtggtgatggtgaaattttttgtttatttgtttgtttgttttaataatggttatcacagttatcctggatacctagtggaattacaattttcctgacaagagcccagaggattcaatggcagaaaacaaacaaacaaacaaacaaacaaacaaacaaacaaaaaaccaacaaacaaaaagaaaacttaattatggttgggagtctatgttgccctcacacctgaaactgccaatacatttttcaggtaggaatcagggcttaatggcagtaaaagtagctacttatatagggaaactaaaaagtcctaggaagtagacagagaaaaaaaaaatactggttagggcagtaggtgaggaggggaatggagatgaagcagagactgagggaacaaccaaccaatgactgccccaacttgagacctattccatatgagagaaccaacctttgacactattaatgacactctgctatgcttgcagacaggaaagtagcataactgtctcctgagaggtttcgtccagcaacagatggaggcagatacagagacccacatccaaacatcaggtggaacctagggagtcttgtggaagagtagcgaatggaagtgagcaaattggaggggtcaaggacaccacaagaaggcccaaagagcctgggccaccaaccaaggaatgtgtaagagttgaacctaaactccctatacatttgtagcaaatgtgcagcttggttttcatgtggttcccctaacaaatggaactagggttgtcttggtctctcttccctgccattggatccccttcctcactgcttggactgtctggttgggcctcagtgggagaggatatgcctagacatccttggactagatgccccagggtggagtggtatccaagagagtctctccttctctgaggagaagggagcaatggagggatggacttgtggtggttggactgggaggaaaagagggaagatcctgtggttgatacataaagtaagtttaaacatgaataaacaaaaagtaaataatattgcatatgatattgatttatagaatcttgagtatatttccatcaatatctcatatgtaatatctggagactttcataaagtaataatactgaatttcatttgataatgtcgtgaaaattatatgattttttttcattat

SEQ ID NO: 2504 - DNA, 1200 bp, mus musculus
acattttctttgattgttgtgctgatgttctctatggaatcttctgcacctaaaattctctcttccatctcttgtattctgttgctgatcctcgcatctatggttccagatttctttcctagggtttctatctccagcgttgtctcactttgggttttctttattttttctacttccctttttaggtcttatatgattttgttcaattccttcacctctttggttgtgttttcctgtatttctttaaggacttctacctctttagcagtgttcttctgcctttctttaagtgagttattaaagtccttcttgatgtcctctatcatcatcatgagatatgcttttaaatctgagtctagcttttcgggtgtgttcgggtattcaggacaggaagaggtgggagtgctggtgctaatggtgagtggtcttggtttctgttagtaagattcttacgtttgcctttaaccatcttgtaatctctggagttagttgttatagttgtctctggttggagcttgttactcctgtgattctgttagcatctgtcagcagacctgggagtctagctctctcctgagtttcagtggtcagtgtactctctgcaggcaatctctcctcttgcaggaaagttgcactgacatctggcattcagacctgcctcctggcagaagatgaaggcccgaaacagagcctgtccagaagctgtgtagcttctgtagtccgcactctcacccgcatagactagactctgagagcttgaggaccagaaatcgctcccccaagtgctcaggcaaagttctcccaggcggggcggacacctctcctctggcagggaaggtaccggcatgtctggagcctgaaaaggtgtctgacccagaatctgtatcgcttctgcctgtcacacaagctgtgtctcttttgtagtccacactctcacatgtgcagactagtctctgagagatcctggaaccaagatggctcctcaacttgcttttgatcatcatagaagccccataaacagttgccaccaatgagtggcccaacttgccataagaggtatttaattcttgacattgcctcaatagctagggagcagaggctatccatccctgatatagaggatagaaccaaatactatgaataaataaataaataaataaagtcaatgaaatgatacctaatgatattctgctatgcaga

SEQ ID NO: 2505 - DNA, 1200 bp, mus musculus
gttcttgtacatagttgtaaaactcctcaagaaagcattagcaaattgaatctatcaacacgtggtataataaaacaccccaagttttgttcgagtatattaacaaatttaagataaataaaatgactgtgttaccagccatgaaaaaatgctgtaaataaaaaccatttgccaaaattttagaattaaggataacttttattttctgtgttttaaaactttttagacatatttattttacatatatgagcgtattgcctggtgtgcatggaggtcagaagaattcactgagttctcaggaactagagttctgaaccatctctcctgcaatggcctggcttttaagttaaaaacgtattctctctctctctctttttaaaattttatatttttgatttttgagacagggtttctctgtgtagccctggctgtcctggagctcactctgtagaccaggctggccttgaactcagaaatcctccagcctctgcctcccaagtgctgggattaaaggcgtgcgccaccactgcccagctaaacatttctgctctttggtccactagatgtgaccttagttctgagtttgaagtctcactgggagaaagtcaggcagtgcttaagtcatactcatattttccatgtaacttttcttgaaaaaagatgtaggcagatgcgtaggtacctaaatgtgatttgccagtcaggacagggcctcgtagcctcgagaacagcagtgagctgaggtgagagaggtcagctgacccaagctaagccaataggaatcgcccaggctgagcactaagtttgaaaaggaaccgttgacctcagcctcatctgggttccgggactccgcgggacctaggaaattagtctgaacaggtgagagggtgcgccagagaaccggacagcttctgggacgggcagaagcacagagccgctgaggcagcagcctgggcgggccgcagacaaccggccaccatccggaccagaggacaggtgtccgcctggcttgggaggcgacctcagcctcagcagcagcggtcgccatcttggttccgggactcagcagaacttaggaaattagtctgaacaggtgagagggtgcgccagagaaccggacagcttctgggacgggcggaagcacagagccgctgaggcagcagcctgggcgggccgcagataaccggccaccatccggac

SEQ ID NO: 2506 - DNA, 1400 bp, mus musculus
agagtctcattcagagcatttataccaggattaggttctgggttggtaagcaagcacgaaccacctgaagttagttttgtactaacaggcccataacactaaagcaggactcccagtctcacgttcaaaagggatccatttcctcaagtaaattctatctcttctccctgatcatttctcaccactttcagttttttcaatttttccagtttgtttttactttttttcctttttttttttttttttttttttttggacagggtcatactatctatctgcaactgacctggaatttgctatgtgaccttgaactcaggtgtcccctttcctctgccacctgagtgctgctggcattgaagacgaatgttcccatgtcttttttttctcactgttattttcatcttgtaaaactggcaatgttttcattacattcatacagatgcaggaaggtgaatccagtgccacatctgcctgcctccctccctgcctgcctgctaccactctccagtggaatggccttggactaaccctctaaacctgtaagctagccccaattgagtgatttctaagtttcactagttatgttgtcttttcacagcaatacaacagtaactaagagaggaagggggaacaggaagagtaggagcataactgatttctttccccaatggggagaattctaccttgtgctttattctctacaactgtccctccatgaatcagagaagcctagatattcctaaatggcacattttccttattcatttgatttctatttctctaacctccataggcaaccaaatacctgtctctgactctacttctatagaatctgatacaagataacaaatatgcttctcagtatcaactcacctggacccccagcatctctcagacactgagccaccaaccaggaagcatacacaggctggtccaaggcccctgacacacataacagaagaggactgccccatctggactcagtgagagaagatgcatctgaccctcaagagactggaggccccagggagtggggaggtctggtagaatagtggtgggggagtggggacatcctcttggagacagggagaagtggggtgggggaggaggaatgggaggtgggatagtcagagggtggaccagaagggggataatgactgaactgtaaaaaaataaaaagaataataattttttaaaaaacaaagatgcttctgtgtagcaagcaattgtgacagaatgttattcttatcaggcagtatctcagagaatactgaaagtgtcaagataagattgacgtttgtatttacctcataacttgggagactttgtgtttccattactctgtggtttactcatatttttagctacttaaattctccaaaagacattgaaagtgataa

SEQ ID NO: 2507 - DNA, 1000 bp, mus musculus
ctaatgttcccttttctaattcagtctgaaatctcatgaacttctgcacaaaataaatacagtggtagtggtgggaggggttggtggcggtgcagatctgtgtggttccagcactcaggaggcggagaaaggaggattgctgggagttgagtccagcttaggctacattgcaagattttgtcacaagaactatttaactaattacaggtacttctgcagggtccaaagtgagggccaaactcagttcttattgttgggactttgtttgttctgggatcttatgccatgccagaccttgggaagatgttgaagacaatctgccattacaatattaatgaggaatattgttcatctgtcatttttagattggcaagcttgccgtggcttccaagtacacagaaatctttctcaatatcttcagcctcaagccttgcattctggtctggcagatgaattaagcaatggttcctctcaagggtctcacctggaggctaagggaagctggactcaggtcccagctgccttctcacccacttcttcaacccaagggacagttcctttttaaccttagggattaaaattccttcaagggggctggcgagatggctcagcgggtaagagcactgactgctcttccgaaggtcctgagttcaaattccagcaaccacatggtggctcacaaccacccataatgagatcttataccctcttctggcgcatctgaagacagctacagtgtacttatgtagaatagtaaataaatctttgggctggagcaagcagggactgagcgagcggagttgaccagagtgaacggggccgaccggaatgagtggggttgacggagtgagcagaggtcgtaaaaattcaattcctaacaaccacatgaaggctaaacaaccatctgtacagatacagtgtactcatatacataaaataaacaaacaaacaaataaatctttttaaaaacagtccttcaattccacaatttcttcaagct

SEQ ID NO: 2508 - DNA, 1400 bp, mus musculus
tgagaacatgtacaagaacaactcaccagctccagagctgaccacaattaacacgaggaaagtaataaaaagaacagactggggtctcctagggagcatgaaggacaggcacctagcccaggcacaccatacagagtacagtggtcaagacactttcatccctccttcactagagtctcacctgacttctgtctgagacaaggcccagtctctggctgcagcacgggatggcaaatgatttatacaaagcccaaggacacacaggcagcagtctgcaggctaaggatgcttccatcagaagcagagtggacgaggtttcagaagctccaaacacagatgatgagtggcttctatgtcacaggaagggccagagaagcctggcacaggtaatcaaagaggcttgtcaccacccctgaaggcacatgtttgtcagtccctctcaaggggtaggcagcaaaggaatccaggggagaggtcagcacacagcattctgggccagagccacacaagtggcagacctgagacaagaccctgcttctttctccacatccccagactgccttatactaggctgccctgccatctgttatggcttaccaatgcccactcccagggcctctgccttcaaaggaaatgtgactttcagccccagccatcaattccatgcagagggagagagacccactcaatctgctcaattcataggaggttcctcttagcagttcctcaactccaggaaagtcagctagggagtaggagagcctgtagcagaaaggttgctccagtatttcatgagtgccaggggagggccacatttggttttgccaagccaggatgatcaatgggccagttttacaaaagtgccagctagctcagggccagatgtgatttatgtccatctaaagcctgcctgagtatgttgatggtgtcttgggagtaaaggtccaaatgcctaatatgcttatcagtgagtacaggcccatagcctgatgaagacccagagtgggactaccctttccttatgagggggaggggagaacaggagtaagcctgcagctttactctgtaccagagatagaagctggaattcccaaagctccagcagaaagctctgtcctgcttacatgtggaagcagagggtagggtggcctgctttgccccggggcagaaactccaaggggctctgctcatctgcctccaggatcagttctcccgccatactactgaagtagtgcaaagggccccttcctttgctggagtaagaactgagggaggcaagatgcccagtggctgtgagaagattgaaaaggagagccaggcaaagggactcctggcacaggatgagcaaaagagcatgtgcgtggtaaaatccacaaaaaatttcagccttgagtcctatg

SEQ ID NO: 2509 - DNA, 1800 bp, mus musculus
ccaagaggttctcacaaaacctacaacctccatcccaagagcctgtgtctgacagagctggtatgagaaaaggagacaattcttccccaggttttagccagactttgagtacacaatgggatagtgaggagcccagtgaaagcaattagtgatttggcctgtgaccctctagcacaatgttttgcaggtccagttggacatgacatgttttcattggaaaggcacatttatagtacctaatgacagcccatgtcaagtggcatattggttttgtgtttgtttgtttgtttgtttgttattggtagacatacatttttgttatgtatattcttcatttacatttcaaatggtatcccgaaagtcccctataccctcccccctgccctgctctccttcccacccactcccacttcttggccctggcattcccctgtactggggcatataaagtttgcaagaccaaagggcctctcttcccaatgagggtcaactaggccatcttctgctacatatgctgctagagacacgagctctggggagtactggttagttcatattgttgttcaatctataaggttgcagaccccttgagctccttgggtactttctctagctattccattgggggccctgtgttcaatccaatagatgactatgagcatccacttctgtatttgccaggcactggcatagcctcacaagagacaactatatcagggtcctttcagcaaaatcttgctggcatatgcaatagtgtctgtttggtggctgattatgggatggatccctgggtggggcagtttctggatggtcattgtactggctaattttgtgtcaacttgacacagctggagttatcacagagaaagcagcttcagttgaggaaatgcctccatgagatccaactgtaaggcattttctcaattagtgatcaagggttaaaggccccttgtgggtgggaccatctctgggctggcagtcttgggttctataagagagcaggctgagcaagccaggggaggcaagtcaataaagaacattcctccatggcctctgtatcagttcctgctccctgacctgcttgagttccagtcctgacttcctttggtgatgaacagcagcatggaagtgtaagccgaataaaccctttcctccccaacttgtttcttggtcatgatgtttgtgcaggaatagaaaccctgactaagacaaattggtaccagcagaatggggtattcctgtgacaacctgaccatgttttggggaggactgtggaaggactttggaactttgggcttgaagatccatccgatgttaaaagctctgtcagatgttgtgtaggagcttggaagataatgttgagaacactgcggaagatggatgtctggtttgtgaaatttcagagggaacattaaagacttttttcagggccattgctgttttgattgtgaagattctgtagttctggttagctggggctgaagaatcagctgtgattaacaagataccagaactattaaagcaaaaactttgcattactgggactattgatgctggttagctggagctaagaaattagtggtgattaagaagagaccagcatcattgaggtgacatcttcttggaagtgttttctgaaagcacagaggctgtgttccagagatagccaaggttgtaccttgtgctgtggctggacttggtaatgtgtaagagtcacccaggtggtactggttttgaaggcatgaaggggtcacacagagcagctgaggctcggcactgtgagaggccatggaaggccat

SEQ ID NO: 2510 - DNA, 1400 bp, mus musculus
tatgacattcaaagaagagctaattctaacactcctcaaactatttcacaaaatagaaaccgagggtctactgccaaacttattctatgaagccatagccaccctgatttctaaaccacacaaagattaaaaggaaaaggaatttaaggacaatttcttttatgagcattgatgcaagcatacttaataaagtactcacaaactgaatcttggaacacatcaaaaacctgatccatcaagaagaagtaggctagatcagtggcccaatacctgcccaaatgtaacagcctagttacctcccagaaggtccaaagtaaccaaagaaacaggggactctcttcctcaaatttccacacaggctggaacatgtacacagcccagctgacaggggacttaccccccacttctacctcaacccccaagctccactttccttcggcaccttttcctcaccagggtcagatcagtagcccaatacctgcacaaatactacagcctggaaacatcccaggagctccatagtaaccaagggctcaggacatcttaagtaaaaggggcacaggatttctgaagtaaccagagacacagaaggtctaacctaaccagaggcactggaagcctactctaatcagaggcaacactgcctgtctccaaggagatcagccctaactcagattacagagctctctgcctccaaggagaccagttacaatcagagacacccgggccaattaacaccagagtgaaccagatggccagagtcaagcagaagatcatatgtggcaagcccaatgcaattgggcacaatcagaacccagttcttccaccagagcaatccctggatactctaacatgactgaaaagcaatatagtggcctcacttcccatttttgaagatgacagatgcctttaaggaagatataacaaactccctttaaagaaacaggaaaacaaaggcaaacaggtagaaacaaacaaatcccttaaagaaatactggaaaatatgagagagcaggtaaaggagttgaataagacagtcttagaactataatttgaaatagaaacaatatggaaacaacaaaatgtggaaacccaggagatggacaacttagacaagatatcaggagttacagatgcaaatattaccaacagaatatgagagatagaatagagaatcctaggcatagaaaatacaaagtgtaaaaagcttcaaacccaatggaggtgcttgagaatgtacctaaggagctgaaggtgtctgcaaccctatgggtggaacaacaatatgaactaaccagtatcccggagctcttgtctctagctgcatatgtagcaaaagatggactagtcagccatcaatgggaagagaggccccttggtcttgcaaactttatatgtcc

SEQ ID NO: 2511 - DNA, 1200 bp, mus musculus
tcacatgctgattatatagtgcactctatagaaatatccattcaaatgcccactgccatcactgcattatacagaaacacacattcacatccccacaagtgtccttcattctacacaaaaacacattcacatgcacactgccatctctgcaatctacagaaacacatattcacatgcccactgatatctttcactctgcagaaatacactttctcatgctcattgctctcatgcactctacagaagcacacattcatatgtccattgcatacttcacagtacagtcacatatactcacatgcccagtgacacactgccctctgcagaaatccacattcatatggccattgccaacctgcactctacagtaacaaacactcacatgcccactgttatcctgcattctacagaaatattcatttccatgtcccctgcatggtgtactctacagagacacacactcacttgccttctgccaagagtgcactcctcacaatcacacatttacaggcacattgtgtactgaaacacaaattcacatgtccactgctcttcttcattctaaagaaacacatattcacatgcccactgcaaatgtacattttacagacacacacttccatgaccactgcatactgcactccacagaaacacttattcacatgactggtgcaatcaatgcacccaaaagaatcacatattcacatgcccactgccatcaacgcactctacagaaatacacattcacaggcccactggatacttcactctacagatgcacacattccaatgcccactgctgtcctgcactctacagacacacattcctattcccactgctgtcctgcactctgcagagatacacattcacactcctactgcctacttcactcttcacaagcacagttcacatgccgactatgtagtgcactttgtagaaatatacattcaaatgccaactgccatcacatcattctaaagaaacatatattcacatgcccacagctttcctgcactctatacacaaaaatattcacatgtctactgccatcactgcagtctacagaagcacataatcacatgcacactgttatctttcagtctacagaaacacactttcccatgtctactgctcccctgcattctacagaaacattcatatgcccattgcatacttcactcttcagtcccatatacaca

SEQ ID NO: 2512 - DNA, 1200 bp, mus musculus
actttgtgcctacttcctggcaactttatgctcacctctattttatccaaggtccttcccaaactcctgggttactttgtgcctacttcctggcaactttatgctcacctctattttatccgaggtccttcccaaactcctggggtcccaagtttcactcaccatgaacttaccctgccggcaaccactgactgctgaaagttctgaactcggtgggggagtcagttccccgtacgggccaccaattgtcgcgcccgctctcgaccagcaagaacgacgcgaccaccagtccttctaacagcagtttattcagtcctcatctctcttctttctcttcatcagtaccattccccagctgaagagttctgaatccacgccagatccttctcaacagtctgttttacgggaacactttattaccacctttccccgtgatgcagttctgaatcctccctgtagcagggggtcttcgctcgtgcctgaagatgtttcttgtcccgggtttcggcaccacttcttgcgcgcgctcaactggccaggaagaacgacgctgctacaggatccttctgcacacatttattcagtcctgtttcttcttgtttatatctcccttgtttatatctcccttgtttttatatcttccttgtttatatctcccccttgtttttatatctcccccttttatatctcccctgtttatatcgcccttgtttttatatctcccttgtttttatatctcccttgtttttatatctcccccttgtttttatatctcccctgcttatatctcccttgtttatatctcccaataataacaatcctctctcgaataataatcctccctctaacccgggcctctcactcttttatactctcagttcccatccacacacagcaggccacgccacctcaccaggcacgcagcttcagctaatcagggcagcaggggcaaatctccaccaaattggattcacctgtatcctggtacacctgcgcagcactcaagatgtttgtgtcttatatgaggaagtcaggtgcaagtcatatgacttagctgcagtccctggcgcctttaggactgccgccacacctgctcctaacagtccccagaggagataccacttccaggcactctaacaaacccaggattgtaggaccccaggatcccaggggcttggtcacaccaggatctcagaggaa

SEQ ID NO: 2513 - DNA, 1600 bp, mus musculus
gtggaaatgagagaatgtgtgtttctgtaaaattctttattctgtagtgatgttaatatgtttttatgtaaagtgcagtatgtagtgtgcatgggaatgtgttctttttagaatgcagtatgacagttggtatgtgaatatgtgtttctgtagacttcatggatggcagttggcatgtaaatgtatgtttctataaagtgtagcaatgcagtgactatgtgaatatgtatttctctagagtgtagtatggcagtggtcatgtgaattagtggtttttttggaatgcaggataaaagtaggcatatgaagttttgtgtgtagagtgcagctttgcagtggtcatgtcaatatatgtttctgtagagtgcttgatatcagtgggcatgtgagtggaggtgcctacagagaccatcatgtattttgtagttacacattttacagagttcagatgtgagaaatgtgcctgtgagtgtttttcctggggagtagaaatgggcacagtaggcatgtgggtcctgatccctactgatgccacaacttggcagtgtacttgtgagtccatgtaaccccagagcagagttcagcttggaactctgagtgtatgtgcctgcagtttcatggtggtgagtaagtggcttcagttgcacaaggcccagttcttgataaacatgtgagataagatgcctgctgacagaggacataggtgggcattggacatgtgagtgtgggtgctggtagagaaaaatggatgctatggatatgggactgcagtcacatatcaattcttgagctgggttgtcgacatgttactgcagattccttcacaggccagacagtcattggtttgtgagtacaggtgtctctagagtacagagaggtgcagtgggagacttcatgcaggggtatgcagagatcagagggaactgagcatgtgagtgcaagtgctatagagaccagcaaagggctgtgtgtgtaggcatgtagttgcctgtagaatccagggaagagctgtaggtacgtgagtgcaggtgcatgcagaggaaagagaaggcaagtggacctggagcccaggtgcctgcagagggcaagtgtgactggaaatgggtatagaaatacctgcagagaacagagaggtcagcatgtgagttcatgttcctcctgaggacaggattgcagtttacccatgagtgtatatgtctccaaagttcagaagggggattttggcttgtgaatgcaggtgcctacagaagcaagggaagggaagtgtgcatttgagtgcaggacccttctgagggctaagttaagcagtaggtatttgaggttccatgcctgaagatgccatgaatgcagtgggcatgtgaggacaggtgctagcagacaccatgaggacaatggccttgtgagcatagtgaagggccatgaccagaggtgggcagtagacatgtttgttcagattcatacagaagccaagtagtcactgtgtatatgaatgttgtgtatggagtgccagaaaggtgtaattggcaggggaggctgggtaagtgcaggggcataggtcatgttgttcatgtacctgcagaggccagaatggactggttgc

SEQ ID NO: 2514 - DNA, 1600 bp, mus musculus
tcttgcactctggctcctgaagatgtaagcaataaagctttgccgcagaagattctggtttgttgcgtctttcctggccggtcgtgagaacgcgattaataacacagatctctgagttcaaggtcaatctacagagcaaattccaggacagctaagcttaagcagtgacagagtttgaaaacagaaagctggtgataatgtaattgaagggggaccatgctccagctccagcaaacagcagaactcagcagctttcgtcatgtgtctctgactttaaagtcaagaatagaagagactattgggaaatatcaattaatgctggtaagttcgaactaagaaattagcagtgattatgaagagaccaacatcactgaggtcaaatcttctggcaagtattttctgagaacacaaagaagttgtggttcagatatatccaaggttgtacctcatgcttcagctgaacttagtaatgtgtgaaaatcacctagatagtactggttttgaaggcatgaaggagtcatggagagcaaatgaggcttgacattgtgagaggacagagaaggccattggtgaaagtgcagccacagttgcaattgacagcccaggactggaggagtagtgtaaagaagttgagatttggcaccatgaagggagcctatcagtgtcttttgttgaagcctcgttacagtagaacatcccagtgtgtttgggaaaacagtatcatggtatgaccaccaataacaacagcagcagtggaaaggagtcaacagaaatgctacagaaggcagagctggagatgtgaccctttggaggagatgagatgatcatctatagatcccagacattggaacaagaatctgtaaacttgagaggataggtgtctgcccagcccgggatggatttgcctgagcatcggcagcagacatcttggttccaggactctgtgtagtagtgtggactacagaagcaacaaagcttctgggacaagtcctgttttgggccttcatcttcagccaggagggaggtctgactgccagatatgtgtgcaccttccctgtaagaggaaagcttgcctgcagagagtgctctgaccactgaaactcaaaggagagagctcttctccaaggtctgctgatagaggctaacagaatcacgagaggaaaaatctctaacaagagacaactaaaacaactaactccagagattaccagatgttgaaaggtaaacataagaatcttactaacagaaaccaagaccaatcaccatcatcagaacccagcactcccacctcgcccagtccagggcacaccaacacacctgaaaagctagacctggatttaaaagcatatctcatgatgatagtagaggacttcaagaaggacgttaataactcactcaaagaaatacaggagaacactgctaaacaggtagaagaccataaagaggaagcacaaaaatcccttaaagaattgcaggaaaacacgaccaaaaaggtgatggaattgaataaagccatccaagacctaaaaagggaagtagacacaatagagaaaacacaaagtgagacaacactggagatagaaaatctaggaaagaaatc

SEQ ID NO: 2515 - DNA, 1000 bp, mus musculus
tctcctatattatcccatattcatgcccaagcatcccaatgggtctgggttatgatattaaacccatgagacttctctgcccttgctcactcatctcatcgtcttcttgtttaacactctctctctctctctctctctctctctctctctctctctctctctctccatatgtatatatatatatattatatatatacacagtcaggttgatgggttcttgttcttacttctcctccttccccttccccaaattcctctttcttcttacatggggtgcccccattggaggccagactttggtacacaataaattccagactgggaaactgtcccacctccatgctggaatttgtaactggcttgatattgagtaggtcttgtacagcagtcacatcatttccagaggataccagaaggtacaaggaaagagtctgatgcaggtgtagcaacccgggatttgcacagtgcttttcccaatcctctggctcttgcattctttgtactccaccttccttgatattccctgagtttgtcccatctattgttgaatcctcccattcatttcttctaagcactttgaacagtaattcatctctatattaattactgcccagttagcacaagaagcttctctgcctttggttaggagcagcactaacctattgatataaacaaatatatttagaaggcattttaataacatgactagttaggaaaacatcaatcagtaggttctttcctaggacctttgacttccctagccatgggtttcgaccatttttaaaatgacaggcatgaattttctagtgtggaagagacctcaagtacaatagaagaagagttggttaacccttataagctgtctaagcattattgcagtactggacacaccttgcatggtaggtcattgttaactttaatttttttcaaatcttattttcaatgatactctttaaatgctttatcctcccttctatcccaccaactaccagaggtagta

SEQ ID NO: 2516 - DNA, 1000 bp, mus musculus
ttgtgatggcatatccaggacttgctatggtgggagagtttggttctgatgattccaagtaaccttggtttctgttgcttctgttcttatgcttgccccctgccatctgtttatctcgagtgcttgctgccctcaatatatctgattggagcctgtccttcctgtaatcccagttgattcaagaatcctcagagttcagctttctctggaatcctgtgattctgggatcccgtgaacctgagattctgggtgtgtcagaattcttggcagtcaagcttcctggagaccctgagatcctggtgtgaccaagctcctggtatcctggaatcctttgaatcctaaggtccttggcatgttacagcacctggaagtggtgtctcctctggagaccatggggctgtctgctgtgttcaaaaccaaagtattccagcactgaccagaaggaaccagagctgctggtcaggcagggctcctgtgtccttgttgctgctctcacaggcttgtcatggttcatttggaacagatgttctgttccacttgccagtgatcctaccatttaccagtgatcctaggtgtgctagagcgccttcagcatggtgagtcctctggggaccatgggagtttgcactcaaggtggcctggagctggcaccgactggacggtacctgagtctctggccaggcaggtttcctggcacaggcccattatgattggtttgaaacagatgttgtgttccactcaccagtgatcctaagatcctgggcatgctaggatgcctgcagcatggagagtcctctggggaccatgggaccctctgcagagttcatgccccaggtgtccctgagatggcaccgaccggaaaggcataaatagatctcttaaggaaatacaggaaaacacaatcaaacatgtgaaggaaatgaaaatggataaaatggtccaagaaaaaaaatgaaatagaaaccataaagaaaacatacatggagacaaccctggagat

SEQ ID NO: 2517 - DNA, 1000 bp, mus musculus
tcatggtgtgttacacagtacacccttttacacaaacaacttcacttgcaaatgttcattgcaatgagtcattagtctggttccaggcgtctggcttctgcaacagtattaatactggatcctcacctggactcctcttggatattctgttattctgtgtcatggagatcctgcagctttggttctacaggactggctccttcatatgctctagcatgtcatagctgggttagatattggggtggaccaattcaaagccatggtcctgggcctgggtggtagctgagttagtcaggtgagtggtgtggggactgggccagctctcttgtttgttacagcctgcaaggggctggactggctctcctttactcatgccaccagagctggatctccagcattgtctaggtgggcatggctggtaaggagctgggccagctctcccccacacatgccttctgggcatgctcacccatgcctaggtcacccgggccagctctactgtactgcccaggtgaagtgcggggcctctctcctgaatgctgtagctggtcctccttttctgatgtccttacagcaaggtctctcacattgtccaggaaaggaacagagccagctctcccaacagctgatgagaggcagggccagcttttcacaactcttggatatcaagatgtccctaggaggcagtgcagaccagggatgtccacatgatctttggtggtaacatggaccaaggacattgacacagactcctgctgcttcagagccatggacccaaacatggcccttggtggcagcatggtctggtaccttaccatgaacttaggtggcaccacaggctactcacatcaggctattcctcaccacccttgtgtttccagttcctcctctcttcatagtgcacaaaccactctgtttctctttcactcccaactctctactgcacacttgctcatcataatggtgccctgagtgccacacagcagtgggcatgcctctg

SEQ ID NO: 2518 - DNA, 1200 bp, mus musculus
tttgtttgtttgttttgttcctgaactccttatgtgatttcttctttttgttctagaacctttaggtgtgttaagttgctagtatgagatctctctaagtttttccatgtaggcaattaggtctatgaattttcctcatagaactaccttcattgtgtcccataagtttggatatgttgtgtattcattttaatttaagaagtctttgatttatttcttgacccagttttcattcagcagacaactgttccgtttccatgagtttgtaagttccctgttgttgttgacaatcagttttgatccatgatgatctgttccaggaaatatttaaaaagaacccgcacattcccatgcttgagcctctgccctgaaggcctggccagccatgtattggtgggcaatggccaacctgtttatatctcatggagactctctggcccggatctcccaaaacgtctccacccagctcactaggtctccactggcaagttgctaccacgccaaccaagtgcttcaaatcccgcaaggcctttgtggtagacttcaggcagctttgctgccatacctttctctcttgaagctggaagagccacagtgtgaaggaaaacacaacataaacttagttcagaaaggacggtaactcaatctctgggcacagtaactaaaatcctaatcttgtaagccttattaaatctaaatcctctgggccttattacatctaaatcctctggtgacgaatcctgatggatccaccactaaaacctagagacacttgtagctacattttgtcctcacactgctatgcctgtccaaaaggacctaactctctcttcctttctcttttcctccttccaacccggaagtcccgcctactcgcccagtgattggcttctttattcattagggcattggttcacaagaagtcacctgagtacacgactcactcctcatctgcaacccctcccaagagagcagaattagcatcaaaatgcaaacagcaccaggcccatccacagcaatggtcaaataggatatcaagtgttatttctcctcctcctcctcctcctcctcctcctcctcctcctcctcctcctcctcctcctcctccttctccttgtatcctttgagacttgcttcgtatctgagtaagtggtcatttttggagaaactccatgaggtgccaaatagaaattatatttt

SEQ ID NO: 2519 - DNA, 1000 bp, mus musculus
tggtatgtactcactgataagtggatattagcctcaaaactcacaatgcccatgatacaacccacagaccataatggagcttaggaggaaggaagaccagggtatggatgcttcagccctgaattggagtgggggacagaggatgatcacaggaggtggagggggacctggaagggagagaagagggggaggaaataagggtgcagtatcaggtactggagaggactggagagaagtacagagggtcaggaaattgaataaaaatatgtagcagtcagggatgaggaagtggggatagccagtggagggtcccagatgctagggaaacgagaggctcccaggacccagtgggaatgactttaaccgaaatgtgcagagaagagaagatagagcctgtagacaccatctccgtggccctgggtcgagggatgaaaccacccacccatctcaaagtttttaacccagaaatgttcctgtccaaaggatgaacagggacacacaaaaaaaatggaacagagactgaaggaagggctattcgaggaccaccccacctggggatccatcctgtgtgtagacaccaaaccccaacactgttgctgttgccaagaagcacttgctgacaggaacctggtgtggctgttccctgggaggttcagctagcaactgaccgatgtagatgtggatggttggagccaatcatcggactgagcttagagactccggtgagtgagctgggggaaggactggaggagcagagggggactgcaacctcataggaagaacatcggctggacggaccacccagtgctcccatggactataccaccaaccaaggagtgcacagggagggatccatggctccagacacatagacacatatgtagcagaggatggcatcaatgggagtggacacccttggtcctgtggaggattgatccccagcgaacggggatgctcgagcagtggggcagaagtgggggagtaccctcataaagtcaga

SEQ ID NO: 2520 - DNA, 1000 bp, mus musculus
ttgcaatcccaccagcaatggaggagtgttcctctttctctacatcctcaccagcatctgctgtcacctgaatttttgatgttagccattctgactggtgtgcggtagaatctcagggctgttttgatttgcatttgcctgatgattaaggatgttgaacattttttcaggtacttctcagccatttggtattcctcagttgagaattctttgtttagctctgtatcccattttgtaatggggttaaggacttccttctaagcatccctttctttttcagaagtactgtcttcccaggttcattctttagggaggaattgccttaattctgtctcgtctccttcctcaagagccttcaggaacctgtgatcagctcctcatctcttctttctaaatgaaagtattccccattcctacttgtggctacaaggttgggagaagttaggatgtaaaattatggagcagaagtcagctcaccacctgcttcctgtttttttctctgcaacacagattgaagatggaggcaaggcagccttgtctcagaagatgcggactggtgatgagctggtgaatatcaatggcactccattgtatggctcccgccaagaggccctcatccttatcaaaggctccttcaggatcctcaagctgattgtcaggaggtaaggcacaggcatagaggccattgaaaagtactctatcattatcatcaagaaaacaggtatttcatctgtgcagaatagtgcagacaactaaagaagaatggacaaagggcctttggttcatattttgacactgctgtacactcattgcatgcattcatgtaaatgcttcttcagaactcatttgttcttctgaggactcagtgactcaacacatgcaaggcacttccactctgggctcctggagctcaggcttcccttctcagtggtcgttttcctgtctttatcttatatacataccaaagcttctacatcattgttattattaaaaagtgatt

SEQ ID NO: 2521 - DNA, 1000 bp, mus musculus
tcagtttggaaaatgtgaaccagcagactaaactcattagtagacagaacaaatgacaactcctaattgagaaaaatctgtatttgagataagcttaaagggatattgttccaaagatgtaaaaatgattatatatttaaagactttttacaaatatagaaacattacttatcttctagcaaagtagataagagtaaataaaggcagacagagaaaagtaatcagagtgtgaatgaattatataatgctatctattttggacatgattttgtcacattcccacatgctggtaactattttctttatcaaataagcctgtcataagaattaaacaattagtaaaaatcttttataaactgttacatatttcacaaagtgtagtctggtatggaagcaatctcagtcttcaagaccttgcaggaatggcactcagaagtcataaacctgacattgtctctgccacgctcagcaactgatgttcccctcacttcagtaaaaggagtaccgtggtggtcattaaagaggtaactctctgccttaggcttattctcagagaataaggtgtttacaacatggtggtcacatctggccctcaagcaggcaactgacccaacctctttcaaatggtcttgccgctcagagaatgaagttcaaagtctttccatatgctttgttttctgtagatgtctctggctcacactcctgacggcttcctaggcttcctgacacgcatcctaggctcaagctcggtctgcttataaactatgacacctcattgctcggggccctcccggtctgaaaaggtctccttcagtatttcctcacaaagctgaatccactttatactacaatatcaactcatatttttcactcattcagatgtagtccttcataatgttaataacactttctgtgaaaaacagtctcggacttttgatgggaattacattaaatctataagttgctttttggtaggatggccattctcacaatatttatc

SEQ ID NO: 2522 - DNA, 1000 bp, mus musculus
aacctaccaaaggacatagtttatattcccctcttcccctccctgttccctttcccacccaggtattgaggggaacaggattgaagccctgagggtcaccagaaagagtgcaagcaggcaacctaggaggtaaggagaccctctagaatgtaccagagacctgggaggtgagagattctcaggtctcaaagggaggggacattagataaaatgccctacagtggggaaagggaccttgtagaatccacctccagtaaaataacagggcatcaagtggaaagatggggttgccatcccacagtcaaaacctctgacccagaattgctcctgtctgaaagaactgcagggtcaaaatggagaaaagcctgagggaaaggaggtccagtgacagctcagggggaagccccaaggcctgacactattactgatactaaggtcagcttataaacaggagcctagcatgactgtccagagaaaggcccaacaagcagctgaaagagtcagatgcaaatattggacccaaccaatggacagaaactgttgacccctgtggttgaattagggaaaagctggaagaagctgaggaggagggcaaccctataggaagaccatcagtctcaactaacctggatttctcagacactgagccaccaaccaggcagcacacaacagctgatattaggcccccaacaacctgtacagcagaggactgcagtgtcgtgactcaatgagagaagatgcacctaaccctcaagagacttgaggtcccagggagtgggaggtctggtgggatggagggtggggggaggggagtagggacatcctcttagagatgagtggggaggaattatgggatatggaacagtcagagggcagactgggagggggataaatactggactataaacaaagattaaagaagaaaaaaaagagcatagtttagcagtatacagtgtagagattgctcatttaatacaggttgcatggctgtgtggaaccc

SEQ ID NO: 2523 - DNA, 1000 bp, mus musculus
ccatggctaatggcagaaaggaaacaagacaacccaggtgcctgtcccctaggtctgtggactgacttggttgtcagtgtatgcttctcagtgaggacctggagaagcagggcagggcttacttcactttcaaggatactgaattaactttgtcaaaattcaaatgctgaaatgtaaccccagtgacccctagctcacatgacgctccttagagattgaactctttgggagaggttatcatgacggtgaggttttcacaagagaatcaacggccttctcaaaaaaagagagcagagagcttgctaatgctatcaccccacaaccttggaaataaaaaaacaaaacaaaacaaaacaaacaaacaaacaaaaccacggtgtgacattggccaatcagctaaccatgtagagggagacacttctagatcctgactatcctcatatccttctcttgaacttgcatctctcatgactgctaggaataactgcctgttgtttcagcaccctagactagggtgttttgttatgatagcccgagctgactaaatatccttctacactctctcctacaccattagtaatgaatgacaatagtatatgccatcaaatctactctcacttctgctaattcttttgctcaagaaaaaagtctcaaatgacgttgagatctttgtttttcttctttatcctttctaggttgtattcaagtgaccaattcaagacatttgcagtttcatgtcctctattcctaaggaaatagaggaattgccgatagggccacattttcctgatttccacctggaccttctatttctcccacaagcaagttttaaagtagaataaagctgcaacgttcccagatgaacattctgggaagtaaagcacaggagaggagctttgagatcggagacaagaagaggaagagacacttaaaagaatcgagagtcagtgtgactaaagagatgatatgtcttcccaaaagtgtggaagtagcaagaaag

SEQ ID NO: 2524 - DNA, 1000 bp, mus musculus
aggatcaagtatgaattctaattataggtatctacaagtgtttggaggctttctacctgaaaggtagcgatacaggcatggcctgttatccaaatggacagatccttgcactagcctacagcctctgggtcagtgtttctcactctgtgtgtgtgtgtgtgtgtgtgtgtgtgtgtgtgtgtgtgtgcctgtgtgtgtacctgtgtgtgtatcttgtgtgtgtacctgtttgtgtgtgtacctgtgtgtatacatgcacaactcataggagaattttcaggtatcctgcgctatcattgtccaccttattactttgagacagactgtctcactgaccctcaagccaagctggcagccagcaagtttccaatgattctcttgatgcccctccccaacttcccccaacacacacacacacacacacacacacacacacacacacgactaggggcacaatcaagcctggttacatgtagctttttacatgggtgctggggatttgaacttagaacttagtgcctgagccaccccatctatttacacaattgctgagattcctcatatagagggccaagatgaaagaggctgcagctagctttgaaggcctctcttcaatatactcatattcttgcagggtcatctcacagatgaagcgggataaggttagtgtcttcatgctagcatggatgcactaaaggaaacaagaagaatggttagcaatcaattcagaaaatcagtcgcaggatgaagaatctctttcaagttatctcatccctagtccacatggctctctgcttgaacaatgtactacttctgcccttttgcagactcctgcctacaaaaatgcagacattctaggagaagcttatggtactggcatggcgggggagggggggttgagatctttaaggctcctaaacaaccaagtgactcttcttgctatagtagtcatcctttgatgggtcacagtctcctaactgactctgcacatagccctaca

SEQ ID NO: 2525 - DNA, 1000 bp, mus musculus
gaatgattaaaagttgtagtttcttttctattggtgtgataaaatactctcaacaaaagcaacttaggggaagggctgaaaagctggctcagaggttaagaacatacactgctcttgctgaggacacaaaatcagctctcagcaccatgtctggctctcacaaccatctatataactccagctccaggggatctgaggccctcttctggattccacacagacttgcactcatgcacataaccatatacagatgcacacagagacataattaaaaataaaatcaacatactttcaagatttattttaagtgtgtgtgtgtgtgtgtgtgtgtgtgtgtgtgtgtgtgtgtgtgtttacaggtccccacagaagccagaggtatcagaacatagagtttgggttacagtccattgtgagttgccccacatgggtgctaggcagatatgggtcctcttagaagggcagtatgtgctctttatggctgagccatctctccagcacaaaataaaatgagtattcctttttaaaaacaacttaaaggaagaaagggttcattattttagctcacagttccaagttgcagtccattgtggtagggaagtcaaggcaccaggagcctgaagcagccagtcacactgtctaaagacaagggcgaggactgcgtgcatggcagtgctcagctagcttttcccactactactaggaccccgtgcctagggcatgatgttcctcagtgaacagatcttcctactacaactaattccccaggacatgctcagatcctccccctggtgattccagatttatgtatcaagctggcagctgaaactgaacatcacagtgttggagaagatagagaattgtaacctgagttcaagtttatacagtgtactaatgtaccaaacactccatggtaccctagtaacatatgcatgtttatccttttattcctaagtgctgttaagataaaacgtgtaagaacatattgagtgaaaaaagg

SEQ ID NO: 2526 - DNA, 1000 bp, mus musculus
ggctgcacagaatcaggaagactcaaagaggaggcaaaagggttcggagaagaagcggaaacactctcccgaccggtaggagctaatccactggacttgcatggtataaggtggctcaaggagtcaaggcaaagcagggcatagaagggactgggaacagcagtaggggcaggttttacagcatggcttttaaagataggccagctacaacatgagtataacaagctaagctagcttctggctttctccacagacaggatggacctgtgcccaagactgagaaagcagcccctagaaacaagcactggttgcacagggacctacgtgtgcggttcattgacaaactacacaagagtggccgctattataacaccaaggtatgattccccaccaccggaggcccctccttcacccaggactgtaccctctaactttctttttgtttggttggttttttttttttgtttgttttttgtttgctttgagacagggtttctctgtgtagccctagctgtcctggaactcactctgtagaccaggctggcctcgaactcagaaatacacctgcccagccaccctttaactttctaacatcttacttctattcatctctctagatgacaattgaagatgtcctgagcccagacacatgtgtgtgtcggacggatgaaggccgagttctggaaggtaaatcgagctactatacctgggatgttcccatcttagaggatgataaagaacgggtctatttgaggagctggagcgatggctcagtggttaagaaagagcactggctgcttttccagaggattcaagttcaattcccagcacccatgtggcagctcataactgtctggaactccagttccagaggatctgtctgccgccctcttctgacatctgtgaacagcaggcacacacatggtgctacaggcataacatgcaagtaaaatactcatgcatataaaaaaatctaagccgggcgtggtggcgcacgcct

SEQ ID NO: 2527 - DNA, 1200 bp, mus musculus
ctgtgtagccctggctgtcctggaactcactctgtagaccaggctggcctcgaactcagaaatccacctccctctgcctcccaagagctgggattaaaggcatgcaccacctcgtccggctgtgcttacctttcttgttcttggggtaaggagccagttcctctctgcgatggtggcgtcggtctttgccctcttcccggtctgccttgtcaaatgcccgctctcgttccctgtcccgatctctctctctatccactttgtcgtagttgcgctctcgttctctgtcattcttctcgtggtttcggtctgccttctcgtggctcctgtctggcttctcatgactacgatctgacttctcatgatttctgtccaccttttcaagattccggtccgacttgtcctcagcatctatggtaacacacaaatcctgaagcctctctcttacacatatggtctctcttcagcctctctccgagactgcaagaatcactaaagcatccctgcatctgccaactcacctgcattattgttcctgactttcttggcggatttggtaacgacaaagttaggatcatgtggtgagagccacgacacaaggtctgtctccacattccaatagtaagggagtccgctgtgggcagtgagagggagggagtgtcagctcagatgtcccttataccacctgtcacctcaacctgcgtccagatctgcttcatggtcccacatgcacatctcgtccctctcgacccacagtaagagagaacacaggaagggcaaggccaccatgttgtccatgaagtccatcccaccatgttggtaggctcaccaagaagggtcaaacaccttgtaccagctcggtggcagaccctctatccgggtggcctcatagtcaacaggatcatcatcgtagtcttcagcaataatctcttcctctggctctggaagaatggggaaggagaaaagcagttgaattacccgatagtgatggtgtgtgtgtgggggttctcctcctattctcaggcatggagacatgactgaccactcacatctacaccaccatgcagggaagacagaagtacatgctcagcgttgataatcttcaaaaatttgatatccaatcaattcctgagttcagataccatgtggcattgtattatcccaacgtatttcaatgaaatggcttggaacagtaggggggtt

SEQ ID NO: 2528 - DNA, 1200 bp, mus musculus; identical to SEQ ID NO: 2527

SEQ ID NO: 2529 - DNA, 1400 bp, mus musculus
gcatcacttgccaccaaatgtatcttctggtgccagaaccgggttatatctaattgtgttgttggccatgggaatccctaaataacccagttgggtgctaagactacagactgcatttcacaatgagagcaaggcttactgctgaagacacctgcacaactcttctccctcttcccagtgttatctctgtaaaatatggaaaaataagtgtctgcatgtgtgtacataggatggcatgtgactgcattaggatgggatacaggacagtgtgcattcaaactgaatgtggtatatgtttgccactcactcattatctataataatatgcattctttattcttattgtagaattttatgtgatatgccttccagataatcctgcaaatgaaatcctgtccacctggccatggcatgtagaagaagaaaggagcagattgtaaccttctcaggcatcttgagtgaaaaacatatcatttttagtgatgagggttcagatgtttgttggatacagcaggcaaggaaggcagaaatcacaatgttcgaatccatatgtggaaaatgaaaactttccttctatagaagacaagcatcttatcttccctcccccaataccagatcaggttcccctctgtccccccacgcccctcaccattcaacctttcctcccaggtccctttgttcccaattgtaatagctttctgagggtcagcagaaaaaatgtaacagggagataggaggttggaggacccctccagaatgcacctgagttctgggaggtgagagattctcaggacccaaagcgagggaccttagatgcagtgcccaagagtagggagagggaactaatagagcccacctccagcaggaagacagggcatcaagtaagggatggagttgccatcccacagtgatacctctgtcccatagttgtttctgtctgaaataattacagggatggaaatggagaggagcctgaggaaaagaaggtccagtgacaggcctaaaatgggatccagctcaaggggaggccccaaggcctgacactattactgagggtatggagtgctcacaaaaaaatggacctagcatgactgctttctgaaagacccaacaagcagctgaaaaaaatcagagacagatatttgcagaaaacaaatgaatagaagcacctaaccactgttgttggattagggaaggctgagagaagctgaggagaagggtgatcttgtaggaggatcagcagtgtcaattaatctggacccctgggatctctcaaacaatggataatcaaacagacaggatacaccagctgatatgaggcccccaacacacataaaagagaggacttccgggactgtgttcaatcagagatgatgcacttaaccttcaagagactggag

SEQ ID NO: 2530 - DNA, 1200 bp, mus musculus
tcattttgcattttgcattttctttgattgttgtgccaatgttctctatggaatcttctgaacctgagattctctcttccatctcttgtattctgttgctgatgctctcatctatggttgcagatttctttcctaggttttctatctccagcgttgcctcagtttgggatttctttattgtgtctacttctcttgttatgtatagtatggttttgttcatttccttcacctgtttggatgtgttttcctgtttttctttagggacttctacatatttggttgtgttttcctgtttttctttaaggacttgtaactctttagctgtgttctcctgtatttctttaaatgagttattaaagtccttcttaatgtcctctaccatcatcatgagatatgcttttaaatccgggtctagattttcaggtgtgttggggtacccaggactggctgaggtgggagtgctgggttctgatgatggtgagtggtcctgttttctgttagtaagagtcttacgatggctttcaccatctggtaatctctggagttagttgttatacttgtctctggttagagcaggttcctctcgtgattctgttagcctctatcagcaggcctgggagactagatctctcctgagtttcagtggttagagcactctctgcaggcaagctctcctcttgtaggaagggtgcacagatatctgccattttgaccttcctcccagcagaagatgaaggcctgaaacagggcctgtcccagaagctgttagcttctgtagtccacaatctcacctatgcagactagtctcagagttaatcgggaatcaagatggctacccctggtgctccggcaaggcctcctggatggggcagtcgcctctcttctggcagggaaggtgcccagatgtctggagccggaaacgaggtctgcctcagaaactctatggcttccgtctgtcccagaatctgtgaacttctgtagtcctcactctcacttgtgcaaattagtctcagcaggttccggtaaccaataccatgctgttttaattactctacctctatagtaaacattgaagttgtgaataatgagacctttgacagttcttttattcttcaggactgttttaagtatcctgtgggttttgtgtttccatatgaacctgaacattgtccatttaatgtctctaaagaattgtgttac

SEQ ID NO: 2531 - DNA, 1400 bp, mus musculus
ttgaagttctcctgggccacgtcatcacggtcaaagtagactgccatcgacatgtacacgtaggaggcatagaggcgcagctggatgtgggtgttgatagcatcctcacactgccagtcatagttctgccgcactcgagagggcgcttcggccatggcgggcgcttgagctgtacaaccacagactcagcgattccccacccgctcacagggggcagggcgtgagcaaagaacacagtcccacagtcccaaagtacctcagaacagatgatcgccagagcagctcaaccgctaggctgcaggcagtgatccaaatggctgttcctgcccaccgaccacagtatttgagcgccaggatttataggaagaggcggggcatcaccggaaatgagggttgacacccaatcacgacagggtttaagtcccagggcaaatgggagtggtgggcatcagcggaaatgagtgttagtgcccaatcaagatgtggtctcagcaggagggcttaagggaggggggggcatcagtggaaaggagggttggggcccaatcatgacaagacatggtttcggcaggatggtaatgggaggggtggggctttagtggaattgcggtttggtgcccaatcatgacacggattcagcctcaggtctaatgggagaggagggccatcagcagaaatgagtgttggggcccaatcatgacagggattaagccccagggctaatgagagtggcgggcctcagcagaaatgagggttggtgcccaatcaggacagggattcagccccagggctaatgtaaggggcagcgcatcagtgttaatgagagttggtgcctactcatgacatggattcagccttagggctaattggaggagtggggcctcagccgaaatgagggttggggcccaatcatgacagggatcagcccgaggacaaatgggaggggctgggcctcagcaaaaatgagggttcaagtccaattatgacagggattcagtcccgggctaatgggagaggcagggcatcagaggaaatcagtgttggcgcccaattatgacacggattaagcctaaggataatgggagtcagggtatcaggagaaatgtgggttggagcacaatcatgacagggatttaggcccaagggtaatggcatggacggggcatcagcagaaatgagtgttggtgtctagtggtgacagagatgcagccccagggctaatgggaggggctgggcctcagcagaaatgagggttggggcccaatcgtgacagagattcagccacagggctgatgggaggagctgagcatcacctgaaatgaggattggagcccaatcatgacaggggttcagcctcaggactaatgggagggccggggcatcagtggaaatgagtgttg

SEQ ID NO: 2532 - DNA, 1200 bp, mus musculus
ggcactgtgatgcacaatgcactgtctttcactcttagttttttatcatgtcacttttgctaagacttggccagtttctttttctattattttttctttctttctttctttctttctttctttctttctttctttctttctttctttctttctttctttctttctttctttctttgctttttgttgttgtttgtttgtttttgttttttgagacagggttttttctcatgtagccctggctctcctggaacttgctctgtagagcaggctgtccttgaactcacagagatcctcctgcctctgcctgattaatgagtgcttcgattaaaggcatgggtcatcactacccagctttattggtttttcttttcctcaggaaccagcttttttgtttttccttggagcctcaagtctttacaggattaagtttttcttctcccactgaggccgcacaaggcagtcctctgctacatatgtgtctggaggtctcagaccatcccgtgtatgctctttggttggtgacttagtctctgggagctcccaggcgtctgggttagtgacactgttggtcttcctatggtattgccatcctctttagctcttttaatccttcctctaactcttccataggggtcccaacctcagtgcaatgattggctgtaagtatctacatctgtctcagtcagctgctggtagagtttctcagaaaacagtcatggctaggctccttctgcaagcacaatatagcatcagtaatagtgtcagggtttggtccctgcccatgggatgaatctcaagttgggccaatcactggatgacctttccttcagtctttgctccatttttgcccctgcatttcctttagacaggaacaagtctgggtcaaaaaatttgaaggagggttggtgacccccattcctccactgggtgccctatctactggaggtggtctctttaggttccatcttcccactgttgggcattttggataaggtcatccccattgggtcctgggagcctctcacatcccaggtctctgggactttctggaggttccctccactccatgttttccattgttgtaatttatttttctgctttgtttttctcttccttttctttctgctggaggtgggagctcagcttaatgatatgggagcattctttctaactaatgctgtacattttcctcttggcatc

SEQ ID NO: 2533 - DNA, 1200 bp, mus musculus
catatacttctggtctgttttagccaccacacttatatttttttttctttatttacatcccaaatgctgacccatcttggacctccctcctagaatctctctaccgtcttcttctcctctaagaggggggatcccataggtatcccctgaatactggcacatcaatctctgcaggattaggcacctgctctcccattgaggccagacaaggcagccctatcagggaatatgtaccacagtcaagctacacctccaggagcacctctactccagttgctgtggttaccacatggagatatctgctacctatgtgatgggggccttggttcatccccaagtatgctctttggttcgtggctcagtctccaagatctcccagcagtccagcttagttgactcagttggttttcctgtggagttcctttggggcccacaatctttcccacagctcttccacaagagttcccgagccccatcccatatttgtctatgccactctgcatctgtttcagatggctctgaatggagcctctcagaggacagttatgttagtctcctgtctgcaagcataacagtaccattactagtgtcagggattggtgcttgcccataggctaggtctcaagttgagtcgactattggttcaccattccttcagtctctgtttcatctttgaccctgaatttttttagataggataaattttgggttgaaaatcttgtgggcatgtgagtattcttatcactcccctggggatcctgcctgactacaggagctggcctctttaggatccatgaagacattattaggcatcttaattaaggtcacctgcattgacttttggaagtctccccatcctaggcctctgggacttccctcacctctccactccaccccgaccttccagcagctgcagatttccattcattctcctggccctctgggcctctttcctgtctctccctatacctgtcctgccctccatttcgctccccctcccctcttccacccaggtccctcccttcccctgtctcccatgactattgtgttcccccttctaagtgagattcaagcttcctttattgtgccttccttcttgtttaacttctttgaatctgtggggtatgtcatggatatactgtgttttatggttaacatccacttattagtgactacatactcgggatgatattttctagt

SEQ ID NO: 2534 - DNA, 1400 bp, mus musculus
cagctgagggaggggcagtgtgcacaacctgttatttaagatgcgtttaggccccagcggccacagttcagtgtttatgggattagagtaagtggaaccctttcctacagcaggaaagtcccttgacaggaaaagtgtatcactgactggccagtggtaaatgcctggatcccaccattagtgacatattcctttgtttattaatgccaccattttgaggttacaatttttttttgagtgaaaatgtcccagaggagtaacatgtgaagacctgacagtttttataagtgagtgttttgggtctaattccagacagaaagtgaacattggctttctgatgggagcactgatgcccacagaggagaagggggatggaaggaaggggtgggaacaaacatggacagctgggccattcttagaaatgtcttttattcactggtgtggtattggagcttgagttaatgactttgcctatgtaaggcatgtgctccaccacagagctatgtcttccccccttcacctagttctgatgctttggaaacaaatctcctgcatgtgcatgtgcgtgtttgtgtgtgtctttgtgtgtgcatgcatatgtgtacacgcgtgagtgcacttagagatgtgtgtgcatgagttgtgtgaagttcagaagtcaacctcgggtatcactcctcaggtatcaccttatttttggaggcagggtctctcactggctagaggatctctggtgaggcaaggctagctagcctgtaagttctgcctttctctgccttcctggtactaggattatacacccacacctccattatcacctttttttaaaagacttattttattattatacataagtacactgtaggtgtcttcagacacaccagaagagggtgtcaaaccccattacagatggttgtgagccaccatgtggttgctgggatttgaactcaggaagagcagtcagtgctcttaaccactgagccatctcaacagctccattctcacctttttatgtgggtgatgtggatcaaaatgagggcctcatgctcacatgacaagcactctaccaactcaagccctcgcctcagtgttttgacattccttccagtaaccagtggggtcttggtactctcctgtcgaatcaggaaagcaggcttaagtcccataaggacgggcgaagcgcctctttgcttccctctaaagctggctcatgcaaggtcaggcagcttcttcctgctgttggggcacttgctgttcaagctccacttctctaagtctggatgcttgaaagaccattctggaagatggtagtggataaacctgccttgtcagctatgatccctacctggcttctaggtagataagcaaaccctctagaaccttctctaccagccaaatag

SEQ ID NO: 2535 - DNA, 1200 bp, mus musculus
gtgtctgaagacagtgacagttgtactcacatatgaaataaataaatcgtttaaaaaaaatctttaaagcaaggatcctgtaagcaaggatctaagcaaagattaaccccttccttctctgggcttcgtctcattctgttaggtggtctgacaagtccttagaactgtgtgaaatctcttgcttggagccaagttccccctctgatggtgccctttccttctcacagcatgaggttgctggggagtgggggtgcggtgttcctgtttcttttgggtcagttatttcaacagtccagtggtcagatcgagaatatctgcattctgctaggcctgttagagtttcacaaattttcccttcatgggaaggggggtggtgctggggggaagggtcgctgtagcaggggcagggaggagcaaagctgttcactttgtggtgcctaggatgcaaagagagattaggaggggtcaggacaaaataccttccagagacacgcccccaggggctcacttcctccaactgcgctgtcccgaatcgcttccatgccctctgaaaatagccccagaaggcaactaggcttttaacacatgagtctgtggggacattttatattcaaactgcaacaggggacagtgactcctttcacagagtcgttataagggtaaactgaagtcacgtgttcaaagaatgcctggctgacgtagatgagtatttcattaccgcaatgtaatagccagggcggggtattcatagaaagaaacgtggtttatttaactctcagttccggaggctcaagggtatggtactgttaccagctcagccctggaagaggtctctcagctgtctgacgtcatagcagatggcagcgacaggagcactcataggtcgtgtgatgagaaaccacagcaacactgaccatgtggggtcagattcaaccttttagaataatcctcttgcaaggactacccccagtcattccccatcaacataggacctgccatctaggccccatctcggggaagctcctgctgtttccattttgtcacaccggggaccaatctctcaacccaattaacctttgagagggacagatgacatccaaggcacagcagcaccaaacaaaagcctctcttgctgtttctgtaagcgtggttattacaacctccattgtatttcatgtaatcctttttaatgcaaatatg

SEQ ID NO: 2536 - DNA, 1000 bp, mus musculus
tgttaggatatccagggcttgctgtagtaggcaagttttgccatagacatgccatagtgctatagcttttgttgactgtgttcttacgctggcctttagccatctggttgtccctggatggtcctggtgtagcaggtctcagtaagggggtctaacctggatgtttccagggtagtagtccttgggtgggcatccttgagcttgacaatggtactcaggtgacagtgcatgtctcagggcagctgagtatgccacagggaattggggtaggaagggatctaacctggctattcctggtgtatcaggcctggcagatctgtggctggacaatggagttgggcggacaggggattgggtcagggtcaggggtggtgtgaagtgaagatctaacctgaatgttcctggtgcagcaggcctggtgaacatgggcagggtcatggccagactatggagctgggggttgggggtcacagcactgaatctttcagttttgttgttgttgttgttgttgtttttgtttttgtatttcaagataaggtttctctgtgtagtcctggctgtcctggaactcactctgtaaaccaggctggcaggcagattcacctgcgtctgccccccgccccaagtgctagaattaaaggtgtgcaccactacccagtgaagttatgaatcttagaggcacatctaacactgctgctttgctagaccagcataattcctaactacattttaaatcttatccttatatgaacagagaaccatagctaccacccctcatcaaagaagcttctttttacagcaaatgaagtccatcacaggaaacttcagctggacacaatgggtaaatcaatgaggtcatggggagcccagcctcaatggatacatttacatgatggttcctgcatctgtggctcagggaacttcaggaggaaagggtctaagggccaggatgaaaaaaaaaaaaaaaagaaaagaaaaggaagaaagaaaagaagaaaga

SEQ ID NO: 2537 - DNA, 1000 bp, mus musculus
tgattgaagatagtttgagttgaattttcatttttatgcagcttaaaaaacattaagtgggatcttccctctgagcccagcacaggctgctaagggccccagagttctcttcacaccgcaggaccttgggatcacctcgggattatgggtgagtggaacgcaacatcagctcctaagaatcgtggagggtcttgtgctggcaggaacagggacaaaggaaccccacctgaccagaggttgggattcattctggtcagggctacccctgccagcttctgcgtgaaccccagccaagagcgtctaggaaaccagaagattctccatgctgcaggacccctagcacacccaggacctcctgatcacctgagagcacatgggcaatagaagcaacagagcttcttggtcaggccttcatcctcagtcaagaggcacagctgagacccagaaccctgggcaccttccttgccagaggagagtcagcctacagggagggctctgaccccaggactcaggaggtggatcagagctccagacttctggacacctgccctgcaagaggagagcctgcctgcagagagtgctctgaccactggaactcaggtgagagttagactctcaggagtgctgacagaggctaacagaattacaggaggatcaagctccagccagagacagcttgaacattaacaccaagagataaccagatggcaaaaggcaaacataagaatcttactaacacccttttggttggtgccaggactgggtcaccttgtgcacggagtcagcagacacccccatggtccgtagaggactctccaggtgatcttaggaccactgaccagatagctccatgctcctcaaaggagacaccacttccaggcactgtaacatgcccaggatctttgacaacatgatcccaggataaaaggagtttggtcacaccagtatttcagggtctcagtggaacttgactgccaagaactctgacacacccagaatc

SEQ ID NO: 2538 - DNA, 1000 bp, mus musculus
tgattgatgacatttttataatcctaccaatgctggccagtttcttccatattccttggggaggtggagttgtaaagaacagaaactgaatcagagggtgaatggtgctgatgttggctctccatgacaaggctccaaattatgtttatccctaagataagccgagatagagtatttttaccttacctaacactgaaaatacactcaaagtatcattttaatatgaatacatgttgaagatttattaacttattaataagaaaatcagtaacatgttaaaaatgtctggacatccgggtaccttccctgccagaggagagctgtctgcccgggagggctctgtctgagcaggtaggggagccatcttgggtcccggacccctcaaagactagtctgcacaggcaagggtgcggattacagaagcaacatagcttctggaacaggcagaagaaacacagcttctgggacagatccagtttcgggcttcagacaaatgggcaccttctccaacagagaagaggtgtctgcgtggaggagctctgccagagcaggggaaggggacccatcttgggtccaagatctctcagagactagtctgcacaggtgagagtgcagactatagaagcaacagagcttctgggataggcagaagcaacacagcttctgggacacactgtttcaggccttcatcttgagccaggaggcaggtctcaatgccagatatttgtgcacattccctgcaagaagagagcttgcctgcagagagtactctgaccactgaggctcaggagagagctggactcccaggtctgatgacaggggctaacagaatcacaggaggaacaagctccaaccagagaaaacaataacaactgactccagagattacaagacagcaaatggcaaacataaggatcttagtaagagaaaccaagaccactcaccatcatcagaacgcagcactcccacctcagccagtcctggataccgaaacacacct

SEQ ID NO: 2539 - DNA, 1200 bp, mus musculus
cactgtcaaagaggtcaggacattatcagggaaagtattgtatgagatggcacctttcattgacagtcaacctgctaggtctcagagtgtctaaatatccaggaatgagctcaacatgtactattgaaagatttttggtggttagataaaaccaacattcttcagtgaaactggttcccatctgtgaaaaggactcatttcccttacctctggcagaaaggatatatggctctttattgacacttgcctgtgactgcatatcaaaccccatgctggcctccaggctccctcaccccagtccccattgagtccttatttacaagtactttttacacatttcaaagcttcctcactggtctactggacctccccaccatcagctacttaccctccatgtaaccactattcatttattctctctctctctctctctctctctctctctctctctctctctctctctctctctctcctcctcctcctcctcctcctcctcctcctcctcctccttcttcttcttcttcttcttcttcttcttcttcttcttcttccctttccccaccactacctctatctccactattctctcctattctcctaaccttgttcagtctgctggccatgttcagtctactattttctctctctgctccacactcttccagatgcctctggctgtatttggtttcttacgaacaataaaaaaccttccttaataatgaagcagtaataacaacactttttttttttactcctccccctcacatatgaaaatgtccatggtaactaactgctgtagatgaaatgatcttgaagcattcattaagaatcttcaataagtgctaaaaagaataaacttactgtccacttccccacctcccgaccccatccccgaacttgggagcattgtgctgccctgagttgggaccttatctacttagaggtcttggccctccttaaggtgactcatgatgctcatagaggacaccactcagcttagtcctctactcactcttcctgtttcctgagagcctcttattctcacaccccctcggtgattagtctattcttgctgaaccttccctgcagacccagagttgttcagtccaccttagctattaaatgctatttcttcagctgcttactgcttctggttttccttcagtcatacttactatccatagtaaatttgctacggta

SEQ ID NO: 2540 - DNA, 1200 bp, mus musculus
tcttcttcttcttcttcttcttctttaattaatcattccattcgtttacatctcaaatgatatcccacttcctggttacccctccaccacctcccatcccacatccaccctctcacctcccctttgcctgtatgagggtgttcccccacccacccacactttcctgccccactgctccagcatctccatacgctgggaagtcaaactctccaggatcaagggcttccctcccattgctgtcaggcaagggtatcctctgctacatatgtatgtggagccatggaaccctccaggtacatttttgggttggtagtctagactctgggagaactgggtggttaggccagccttgttattcttccaatggggttgcagtctctctcagctcctccagtccttctgccagctcccccatcaggttccctaagctcagtctgatggttggtttcaagcatccacatctgcattggtcatttgctggctggaccttccaaggaaccaccacactagattcctgtcatcaggcgcctcttgaccacagcaacaatgttgattttggtgtctgcagacatgatgggccactaggtggagcaggttcccattggcccttccttcagtctctgctccattttttttttttttctccttgttcttcctttggacaggaacatttctgggttaaaaactttgagatgagtgggtggccctgtcccctgactagggactgtgcctatctactggaggtagtttcaacaggttctaactccccattccttgtgccttttggctaaagtcatcaccattggggcctgggagcctcatgtttccctggtttttgggaccctccagtggctatctccagttcttcatccttcctgatacatatttttttgttcaatttcctaacccctctgtgcctctctaacatctcttccagtttctgatattgccccctcatttcctccccttctctctctctctcccacattcccctctccctccagctctcatgatcatcctgttcccccctcaatgcaggactgaagcatccacgcccaactcttaagaggaaaacatttaattgggtctggcttatagtttcagagattcagtccattatcataatggcagaaagcatgccagcatgtaggcagacatggtacaagagaagctgagaggtctacatcttgatccaaaggc

SEQ ID NO: 2541 - DNA, 1000 bp, mus musculus
tatgtgcttctacctgcttagcagttttctcttgtatttcattaagtgagttattaatgcccttcttaaaatcttctaccactatcatgagatatgattttaaatccttgtcttgctttttgggtatgttgggggtatccaggactccttgtggtgggcatactgggttctgatgatgcccattgttcttggttcctgttagtaagattcttacttttgcctttcaccatctgaaaatctctggtgttaatgttcaagctgtctctggttggagattgatcctcctgtgattctgttagcctctgtcagcattcctgggagttcaactctcttctgagttccagtggtcagaacactctcttgagtcaaactctcctctttcagggcaggtgtccagcagtctggagctctgatctacctcctgcgttctggggtcagaactctccctgtaggcagactctcctctgttaaggaatgtgcccagggatctgggtctcagctctgcctcctggctgaggttgaagacctgaaaggaccgtgaccaagaagctgtgttgcttctcttgcccaggtgctctcaggtgatcaggaggtcctgggtgtgctaggggtcctgcggtgtagagagtcctctggtgccctagactcccacggccgggttcacgcagaagatggcagggctgtctgagacctgaatggatcccagcctctagtcgggcggggttcctttgtccctgttcctgctggcacaagacgctccacaattcttcagagctgatgttgcgttctactcacctgtgatcccgaagtgatcccgaggtcctgtggcttggagagcactctggagccccataaacactttttataagggccttaaaattttaatatttatactttattacagataaaaaattgctattagtaaccgttttagcaagatatcagtgtataagtccaagtacattattagtgaatgctgggggtctttatccagagttta

SEQ ID NO: 2542 - DNA, 1400 bp, mus musculus
ttccaaattttagtaaaattgctttgagtttttctccgtttaatttgatattggctatatgtttgttttaaactacttttattatatttaagtatatcccttatatatctgatctctgagacttttatcatgaagtattgttggattttgtcaaagtcttttcctgaatctaatgatatgctcctgtgttttttttctttcagtttcttcatatggtagattacattgatagatttttatgtattgaaccatccctatatctgtaggatgaagcttacttgatcagaatggatgatctttttaatgtgttcttgtatttgtcttgcatgtattttatttttttgcatctacgttcatatgggaaattgctatgaaattctctctattgatttttttacgtggcttgtgtatcagggtatctatggcctcataaaatgaacagagcaatgtaggcacgtttttgcaacctacttttaataaggattcaacttctctaacccatcacccagcagaggtagtggaaaagaaaagttattaggatatggggaagtggacctgctcagcaatcgttctttgagggtgagcttaatcttctttcgccataattcagtcctgtagcaagcaccaaacacaacctagaagctgcagatgactcctctaggcaggcaaataataggcatgaaccagcagctacagtccagtcctatcagcgagcagacaacagcagctgtatttcaatcctgaagaaacagtcaggcttgtcaactggcctgagatgaggccacagaacctgcatgctgctgtaggaacctcatgagcagttcttgggcaagctgttttcaatggcagtattttcacaagttgtgtttaacaacactttgcatgtctttagtagaaagtaaaggcagagcaagccaaaccaaagctcagtgcccatctcccactgtctgtggggtcttatttatattcttccatcaagagtcctttcacttgtctgttatatagaaatatcttttcacctgtgtctacttcaggaaaatggtctttcatgtttttgctttagcaagacatcctttcacctgtgtgacccaggaaaacaccatctggcataactaactttccaaaagatctagaagtttccacttcagagcaatattcatttggcttttgattttgtggagtaatttgagaagtattgggttaagattaactattcttcctttcttcctgccccttttcttcttctgcttgagagattttaatgattgcttctgtttcactaggtgttataggtctatttaaattgtttatctgatctccatttaagtttggtaagtggtacctatcaagaaaattatccatttctcttaaaatttctaatttggtgcagtacatgcttt

SEQ ID NO: 2543 - DNA, 1000 bp, mus musculus
gggacttgtggatgctaagcaagaagcctatgctgaggtacatccacattcagctcaaccttttattttgatacaagttctctcattcaattgcctaggctgtctttgaaattgtattccttgtgcttatcttcctaggtaactatgactaagagactgggccatcaggacaagtctgatctcctattttaaacacattgttttagtagcttttttttctataaatgaatagtgcaaaatgattttttttaagtaaatggaagttgccaagtgtggtgaagtatgcttgtaactgtggcattgcggaggctaaggtaagaatggtaaagaagaggtcatagtgaaatcttgtctgaaaaccctaaattaataatctgtgaactagagtaacaactagtctagcaagatatatgtatattagtgaaatactggcttgaagttcttgggcataaccagcagctttctgatttcactccacaagcaggtattcacacctggtacagtaaacctagtcaagtatacaaagttatgaaggtcatatccctttgggggaaaaaactgctattgttgttttgctatatggacacagcatgaaacagccttttcaacatatagtatagttctcaccccacatcaaatgttgcttattatagtgtacagaggttaacacagatacaaccagtcaaagtgtacagaatgactgtgaagtgctcaggccacaatatgacatctatatcaccactccctccaagctatagggattattgtagaagaggcaacataagtattgtaagacaaagagatcaagaaatactgctttgaaataatttcctctgaataggacaagtctattgctttcatgagttcattgcaactctggctgcctgtgcacaaaatcaagacagtgcaaaatctgcacaagatcaaaccaggcaatactacagcaaacatgaaagaggggttcacacaatcccaaccttagtttaagagttgtggaaga

SEQ ID NO: 2544 - DNA, 1400 bp, mus musculus
tgtcctggatttcctggatattttgagttaggatctttttgaattttgcattttctttaattgttgtgtctgtgttttctatggaatcttctgcacctgagattgtctcttgtattctgttgttcatgcttgcatctatggttcctcatttctttcctaaaatttctatctccagagttgtccccctttgtgttttctttattgtttctacttcccatttcagatcctggatggtttattcaattccatcacctgttggttgtgttttcctgtaattcgttaagggaatttttgtgtttcctctttaagacttccacctgtttagcaatgttctcctgtatttctttaagggagttattaatgccctttttaaaatcctctaccagcatcataagatatgattgtaatctaaatcttgcttttctggtgtgttggggtattcagactcactgtggtgggagtactaggctctgatgatgccaagtaatctttgcttctgtaggtgagattcttacatttgccttttgccatctggttatctctggtgttagatgttctagttgtctctggctggagcttgttccttctgtgagtctgttagcctgtgccagcacttctgggagatcatctttctcctggctagaccagtgcacagagggattcagaaaagccctacctcctggctacagatgtagacatatatgaccttgtcctagaagctctgttgcttgtgctctcctgagagtacctgcctcagagagacactggagggaaaatggtgatctcacctgagtccttgagtcagagcactccctggtggcaagctctcctttgtcagggtaggtgcacagaggactgaggatcagctccaccacctggctgaggatgggggcccccaaagtaccactgtggtcaagaagctccattgcttctgtggggtgtactctcctgtgcagaccagcctcagagagaccatgcattttgaatattagccctctattggatgttgggttagtgaagttttttttttcctcaatctgtatgttgctgatttatcctattgattatatacttttccttacagaagcttttcagtttcatgaggttccataaacagatccacttctccagtatcctttctcttgcaatacctcttgtcagtggtagggtagaagggaggtaaataatttaagaaccctcattaaaaataggctttaaaaaattaaagttacacttcttccttccctctcatgcattctttgatattgtcatcactcacacacaaacacacacacttaaatctagacttgatcctagcttttattattttacttacacaatgatttctaatcacatgtactatcatgcaaattttattatagttttattttctgctgaat

SEQ ID NO: 2545 - DNA, 1400 bp, mus musculus
gtccctgggagctctgggggacctggttggttgatattattcttcctatgggcttgtaaaccccttcagctccttgtgtccttcccttaactcctccatgctcagttcaatggttggctgcaagcatacgcatttgtattagtcagggtctggcagagcctctcaggagacagctatatcaggttcctatcagcaagcaatttctactcttataacaacctgtattcttccttctttgccacaagttgtagaaagaagagcagataaggcatcatgttattacacagtgatcgatggcactgcacaatggacattggtgagttactcccctctgcttagttaaaatggatgttgtgaggaaggccttccatcgggagattagaaatggctcattaacttggttccgggactccgccgaccttaggaccttagtctgcacaggtgagagtgtgcaccacagaactggacagcttctgggacaggcagagccacagagccgctgaggcagcacccttttcgggccacagacatccggccaccctccccaccagaggacaggtgtccgcctggcttagaagccctctgcctaaggagcagcgggcaccatcttggttccgggaatccggggaacttaagaaattagtatgcacaggtgagagcgtgcactacagaactggacagcttctgggacaggcagagccacagagcctctgaggcaccacccttttcaggccacagacatccggccaccctcccgaccagaggataggtgtccgcctggctcggaagacctctggcataggagcagtgagcaccatcgtggttctgggactccgccaaacttaggaacttagtctgcacaggtgagagtctgtaccacagaagttgacagcttctgggacctgccaaagcaacacagcgtctggggaaggtcctgttttgggccttcttcttcggccaggaggaggtccaaacacaagatatctgtacaccttccctgtaagaggagagcttgccagcagagagtcctctgagcactgaaactcagaggagagagtctgactcccaggtctgctgatagacggtgacagaatcacaagaagaacaatctctaaacagagtcaactatagcaactaattccagagattactagatggctaaaggtaaacataggaatcttactaacaggaaccaagaccactcaccatcatcaaatcccagcactcccacttcgcccagtccagggcaccccaacacactcgaaaagctagacccggatttaaaagcatatctcatgatgatggtagaggacatcaaggaggactttaaaaactcacttaaagaaatacaggagaacactgctaaagagttacaagtccttaaagaaaaacaggaaaac

SEQ ID NO: 2546 - DNA, 1200 bp, mus musculus
gtccaaatgtcccaagaggaggcatgctcctcttttcccagaagtcctagtaaggtgagaggtatcaagctaatctcatttcctgcattctgtagccatccgtccctcgaagattttctcatgccttctataaacttcacatctacctctgccccttctcatgaatccccatctacattctatctttgtctcaaaccagtgccctgatgacattagtatgtagttctttcagataacaagggagggtgagagatctcttcaacagactactggtacaaaggctaagaaattcttcagcactagaattcttgaagagacttgagaaccagttctgggtttggtcgttcaagagctaatgaatgagaatgcaaatttgacagtaccagagaaagcctcaccatgccccaacagtgaccaggttcataatgaagaccatgccagctcatcaaccgcgagtggatcttatgcttgcttgccaccctctgattatctcaagtgctccctgatgtcaatatatctgattggagcctgtctttcctgtaatcccagttaaggtagaacttctcagagtatagctttctttgtgatcctgtgaatttggatcctgtgattctgagattctgagtgtgtcagagttcttggcagtcaatattcctctgtgacactgagatcctgctgtgactaagcttctgggatcctggtatcctaagatcttgagcttgttagagtgcctggaagtgatacctcctctggggaccttggggttctccactgagtttgaacccaaggtagaccagcactgaccagaaggaacctgagccactcgtcaggagtggttcctgcatctgtgttccagttggcctcaggcactcccagttctgttggaacagatgttgtgttccactcaccagtgatcctaatatcctgggcatactagtgtgtctggcgtttggagtgttctctagggaccatgggactgtcttctgagttcaggtcactgaaattctcttttttgttgttgttttttttttttgtgtgtgtgtgtgtgtgtgtgtgtgtgtgtgtgtgtgtgagtgtgtgtgtggtttaggtatcagattaattgtggcttaatagaatgtattagctagtgccccttctctttttattttatggaatagtttgaggagtgttggtattggctcttcctttgcaggtata

SEQ ID NO: 2547 - DNA, 1200 bp, mus musculus
tatatatatatatatacacacacacactgaaacatatatagtttgttatgtgtcaattttatttaaataaatcctgctaacaaaataagatagaaagtaattttcaacacaaaaaacgttgtcaaaaaaattgagctgtaagaaatggatatgtaacccagtgataaagcacttgactcacacatatgaagccctggcttccatcataagcactacaacgtatgttgatgtgtgtgtggtgtctgcatgtctgcctggtcatgtctggaggtgtccaagcaccaggagaaggctacttaggggaggcagaacacagtccttaataggagtcctgcccatgcttttctgagtgagaaacagcgaggtatgggatagatgttgtggttcccagattcctgtgtatccagatgccactggagacatcagggagttgagaaaggtggtaggcaggtcaacacttacctatgctccaggcaggaagtgggtggagggatggggactaaatctgtttggttcctagtgagtgcatagagagtacaaagaggtgaaaagagagaaggccttctctgggagatttaggcatggctcttcaggatgaagcactcctcccccagatgatccttgatgaaggagacagtccttgcttgtccaaacttgcttgatctgctgacagatcttactcatagtgaaccagggattaaataacttttgtggaagtaatgcccaggaagggaagctcattggccaaatacttagggcttatctagatacctcattaatatggagaaccccaagtttttatgctacatgactaattgccatgtgagtctcagtggagtgtcatggttatgtgttccagatcaggtagtttggcagggagctgacctcacacataccattctcaattctgagatttcccagggtttaggctgcctcagccttaccagttcttctgtctggtggtacagtccacttgctccacatgtgtgtaaatgtaacttttattcagctaatgaaattgtcatcttggggggttactgctgaataagctaccatttcctttttctctttctttctttctttctttctttctttctttctttcttttctttctttcttccttttcctgagctctggagggctgattcacttcagctgttctggctgaaattcctctccaagctgactgattccatctgt

SEQ ID NO: 2548 - DNA, 1000 bp, mus musculus
tagttttaagccatggaaagaacagttctctttggattttagaagtaacataaccatactatttgctcattaattccacaaagctgtgcttttcagggcagggacatagttaagtattagagaacttgtttagaatgtgcaagactggtgtgaggtgaccacagggtatcccatatcagggtccttttgattaacatttccctgatgactaaggttgtttgcagccccatggggggagcaacattgtcaacaggccagaccccctggagctcctggggactggaccaccaaccaaagagtacatgtggagggacccgtggttccagccacatatgtgtcagaggatggccttgttggacatcagtgggagcagtggcccttgggcttgagggggttcgatgccccagtgtaggggaatgccagggctggaaggcgggtaagtagatgggggagcatgctcataaaggcaggggtggggggatgggatagaggatttccagaggggagacctggaaaggggataacatttgaaatgtaaataaagaaaatatacaataaaagaaaaaaaaaagaatgtgcaagactctgcattgaatctatagtatgcataggtaggtctgtaggtatgtatgttggtaggtagtaggtagatagttagatagatagatagatagatagatagatagatagatagatagatagatagaaagatagatagataggatcattgaatgaagtttagaataataattatcaaattgttctacagagttgcaatctttagtataagctctcattgtcatttctcttctgaaccatcagacctaatgatttggaagtgtcatggcagacagagatgataacctctacgtaaataatttgagcataagtctcttaagatttaaattttttaacctttgaaacagtcttttatagcccaggctctttttgaacttatgatcttttatgaagattattttagccaagagtttgatgttac

SEQ ID NO: 2549 - DNA, 1800 bp, mus musculus
tatagaatattattcaataggtctgaagtagagactgaggatttatacttttgaacacctgctcaggtgattatgatgaatagagagatttatatgttatatctatacataatgatttgcatggtactccttttggctataattttaaatatattccttcaatttttgaaccaaagtaatctaaatgcattgctctgagtcgagagtgtatctcagtggtaaagcacatgttttgcatgtgtaaagtacagtgttcaatccctgtcactcatacaaaaaagtttttaaatttttagtataacatcattgccttctatatatcttctaaaagttttaattttagtgaaagggaatggaaagatagttttctggcttacttgtgaaaaatttgtctttgactcatttaataatatgaaatgcagtaaatcacatattttattatgtttttattatttatgattaaaagtgaaactacactgaaagttaatttttaagcttagctctactttagtaaagattttattatatgtccagaaaatcagttaaatatattaagcatattaggatactgattggcatttatcttaagagtatgtattgctatgatgagacaccatgaccaagaagcaacttgggggaaaaaggtttatttggcatacatacactccataacactgttcatcaaaggaagccagggcagtaactcaagtagggtaggactctggaggcaggaactgatgcagaagccatggagagtgtggcttactggcttgctccccatggcttgctcctcattgcttgctcagcttgctttcttagagaaccctggaccactagcccaagagtggcaccacccaccatggtctgggtccttccccattgattactaattgagaaaatgccttatagctggatctcatggaggcatttcaccagctgaggctctttcctctctgatgattctagcttgggtcaagttgacacagaaccagccactacagaaatattcttacttgtcttggcaatactcttaactgactacaaatgactgaattactgctcagaatcttttgtaatgtgatagcctgccatatttttttgtggcacagaaaagaaaatgtcatactggactgagcataaaatttgactcaacacataatgagcatctactatagacaaaatgctcagaatagtaaatgtttaccttcccattacttaaatgaatgatagtgaaggaatctgcagctcattgagctttggcttcatcttttcaatggaaaatttagattagacagagaaaacaagtaagcagtagtcttgagactcctacctgtatgttagaactttaatcatgcattttctaactgtcctagaattaccatatccactttatattatgtgacatcgttcatgagtgagagttgtcttctttaaagtcttgcatagcaatagataactgataatctcacctcttcttgacttaattttttgtacttatgtgatagttctaagagttatagcaatagtgtgtgcatgacaatagcaagagtgataagcttacaatttcttttacactatttagagaaagtggacttacattttaaaaatattttctagtgaatctggtgatataaacttatatatttttattttttattaatactgagcttgattgttgcacctacatatacactcacatgtgtatacttttaacatttgtctcatctggtcttaatgcttgttttatggatttgaattacatcttttacctcattttcataaaaattgtattgattgctc

SEQ ID NO: 2550 - DNA, 1400 bp, mus musculus
aaatgagttaaacttgtaaaaataaagaatataacagtggtactagaggtcttataggtatggatgttagggcagaggaaatggggaaatgagtcaaagcatactgtggggctgtgaaaggcagcctgttttggttgaacaaggcttgctctggagaccaagtagaaaactctatgagggacataacagtgagccatgttcccagagacaggtgcctgacaccacagagcccacaactccatagttctgtgactatcagtcacacagacaaagccccaagctcacacagttacctgaccatagccaagtatgctctgactcacagttacttgacaacaacaaggtagcccagcccactataaaaggagctgcttggcccctctttgctctcttaaaccctcacctttcttactctcatatctagccctccttctctctctcccttcccccctctcgccacatagccatggctgacctctctctttctttctgctttctctctttcttcctgtctttctacaataaagctctaaaaccatagactgtctctgctcatcaagacccgctgtacttgaatgatggaataggttgccccctaaagagccatgtctaacttcctgctggaaggccttcctgcactccagccacagactggactcctcatttgggaaccacgtggcacctcctctcttccttccctctcctccctttgaccctggggatgaccaagctgcccctggggcccccattttgttttcagctcttccgtggtgcccagtggcatctggaatgcagagactgaaaacctgttatctctggcctcagtgaggcccacagacctcagactgccccttatccacccctgcgggctggggtccgtggcttccccacagctagacacccaccaggggcacatggaaagcatgcagtagtcctcccaagtctgcctgcccagagtacgggaactctggtgggacacaggttttttcccactccctttattccttcacacctggtgccctacaagtcagaaagatgggaagaggaagtttttggttttgtttgtttgtttgcttatttgttttttgtttatgtttttgttttttgtttttgttttctgtcttttgtttttgcttttgcttttgttttctcaagacatggtttctctgtgtagccctggctatcctggagctcactctgtagatcagtctggccttgaactcagaaatccacctgcttctgcctcccaagtgctgggattaagggcatgtgcctccactgtccagcaaggagaaagttttgagccctgatacataccatgatctccctggttgataataatgcattaaaaacaaacaaactaaaagtaatttcaagtatgttgacacaaaaatgtcaag

SEQ ID NO: 2551 - DNA, 1400 bp, mus musculus
tggatgtgctttcctgtttttctttaaggacttctaccggtttgtttgtgttttcctgtttttctttaaggacttgtaactctttagcagtgttctcctatatttctttaagtgagttattaaagtccttcttgatgtcctctaccatcatcaggagatatgcttttaaatccgggtctaggtttttgggtgtgttggggtgcccaggactgggtgaggtgggagtgctgcattccgattatggtgagtggtcttggtttctgatcgtaagattcttatgtttgccttttgccatctggtaatctctggagttagttgttatagttgtctctggttagagcttgttcctcccgtgattcttttagcctctataagcagacctggaagactagctctctcctgagtttcagtggtctgagtactctctgcaggcaagctctcgtcttgcagggaaggtgtacaggtatctgcacctgcctcctggcagaagatgaaggcctgaaacagggcctgtcccagaagctgttagcttctgtaatccacactctcacctgtgcagaatagttttggagggttcctggaaccaagatggcttccccaggtgctctggcaaagccctcccggggaggacacctctcctctggcagggaaagtgcccggatgtctggatcccgaaacagggtctgcctgagaagctgtcctctagggaccttgggggtttcccccgactcctcgcccaggtgacccggtgctggtgtgacctgaagggtcttgtgaccctgattaggccggattttctgcttccctaatgctggtcccgtgcaattggactggaatagaagttgtgttccactcactggtggtcctaaaatcgcgtggagagtcctctcgggaccttgggggtgtccgctgactctgagtccaaggtgacccagtgctggtgctgacctgaagggacttgtgaccctgatcaggccgggttttctgtttccctaatgctggtcccgtgggattggaatggaacagaagttgtgttccactcacaggtggtccaagatcgcatggagagtcctctcaggaccttaggggtgtccacctcttgggaccttgggggtgtctgccccacatatttcgtcagagaattttctccaggaccacagccacacattgattctccagactctaaggattcattaggtggtttttgatctatgcattgtcaactactcacagctggattaggattattgccttttgtgttaaatttctaataatggggtaataaatgatcacaaacatgcaataatcctagttcagttgtggtgctgggaactgaactagggtcttcagtaagagcaggaaattctcttaaccatggagccagatgggcatatattttc

SEQ ID NO: 2552 - DNA, 1000 bp, mus musculus
ggtattggtttccatagctgtgaagagacaccataaacaatgtaatgcttataaaaggtaaacatttaattggggctggcttggtatcagaagttctgtccattatcatcatggtgggaagtatagcattttccatgatgacatggtgctgaagaaagagctgaaagttttacatcttgatctgaaggcaacaggaagagacattccacacttcgagtagcttgaaaataggacctcgatcttccttctgagcccagcggaggccacgaagggctccagagtgttctccacgccgcaggaccttggcttcacctccagatcatgggtgagtggaaagcaacatcagcaccaaagagggtcttgtgccagcaggaacagggatggaggaaccccttctgacccattcaggtcggggtcagccccaccatcttctgcgtgaagctagccgagggcgtctagggcaccagaggactctcagctccacaggaccccctagcacatccaggacctcctgatcacccgagagcacgtgggcaatagaagcaacagagcttcttggtcagggactcatctggccttcatccacagtcaggtggtggagctgagactcagatccctgggcaccttccttgccagagggaattggcctacagggaccccaggactcaggaggtggatcagagctccagactgatggacacctgccctacaagaggagagtgctctgaccactggactcctaagagtgctgacagaggctaacagaatcacaggaggatcaagctctagccagagatagcttgaacactaaaaccagagattaccagatggcaaaagcaaacataagaatcttactgggtgtggtggcgcacgcctttaatcccagcacttgggaggcagaggcaggcagatttctgagatcaaggccagcctggtctacaaagtgagttccaggacaggcagggctatacagcaaaaccatgtctcaaaaaacaaaaca

SEQ ID NO: 2553 - DNA, 1000 bp, mus musculus
ccaccatgccacccacagatctgctctccagtacacaacacagacaggccatagatacctgcttgccaccatggtaatgcagcatcgatggaagatgtcacccaagggcccaccagccacatggccagcctgcagtgggagtcacccacagtatgtggtggccggataggtgggaaagagaagtgaagcagcttgagcattactaacagacttggaaatggagattcaagggtagaaaggtctcttgtgagtggccaaccttgtcctaactctagctgccactgaaggcaatgtctaggtccatggctattcagcagccagggtcagtaccatgtccatattaccactagagaacatagggttgtctctgaccagggcagccaagaagaccacatggatgtccaagagctgttcataactggccacacttctcactggatgcagcactctgaaggagctagctctgcatctcacccaggaagcacagtgctgacagggatggaggtgagctgcccaagggtatgagtgtgggagaactagacctgccacttgtctgcacatttgcagtggggtggcatagacagaaaggtgaattctacccactacccccaactgctgccacctccagcagtcaggaaagatgcccataggatcataagctcaggagacctagccttgttccttaccagctacagtacttgggagagcaggctttgtatttcacctagacagcacaacagagatgaccctggagtgggggatgcagatgagccaactgggaagttgagagcatgggagaactggccccaccactcctctctcataaggtaccatgggcagggtacaggaaactcatattctttgttcatgggctccatgagaattctgggttaaatttcctggtgtgacagagtaggaaaagcctaagaataggctcattcagtattttagattacttcatttgttttggattgctttaattttcaaaatgggtgtgatt

SEQ ID NO: 2554 - DNA, 1000 bp, mus musculus
ttttggaaattggaaaccatttcttttcttttcttccttttctttttcctttttttttttttttttggttttggttttggtttttcgagacagagtttctctgtgtagccctgggtgtcctggaactcactctgtagaccaggcgttgaactcagaaatccacctgcctctgcctcctgagtgctgggattaaaggcgtgagccaccactgcccggcttggaaaccatttcttaaggttggaaaccatttcttaaggttgaaaccttaaacctgaaaacagtataaccctgtttttcattggatagaacaccgctgttccttttgatatgatgccattgctgactgctttctatatgttcccccgcccccatttgtagaaggcagtatcttttctttctttgttcctttttctactacttgtcaatttttactttacccggtgatagatcaattgatttatgtgtctgtttaataatagttaacttcactctacctgtcaaattttgtttttacatttgagatttgtctgagttcgatgatatgttctacatatagaaagcagaaaaaaatgtctgaaatacttttgtatttatgaaatatgtttggaaacttactaatggcttgtgtatgtggcaataagtatgccctatacagaagtgttagagcaattacaagtctcttaagtcacaattttctttcttagatgttttaagagcacaactcagttctaattaaaaagtgactattagtatttactcatgacttaaatttgtagttatatttggtgttaaattgcaactttatgaagcagtcagtatatctaacttcaccttttaaaagttatgtttgaaaataacattttacgggctggtgagatggctcagtggttaatagcactgactgttcttccaaaggcccagaattcaatttccagcaactacgtggtggctcacaacgatatgtaatgagatcaacatcctcttttggtgtgtctgaata

SEQ ID NO: 2555 - DNA, 1200 bp, mus musculus
cacaagagacagctatatctgggtcctttcagcaaaatcttgaaatattatatgcaataacaccagacttttattatccatttacttatcttatgggccagtatttactacttttctgttgttgtgataaaatactatgaccaagacaacttacagaagaaaggatttatttggctaatagttccagagggatgagagtccatcccagcagagaaatgtggcaacaacctgcctgttccaggcctaacagctgaaacaggcagttgagagctcatattatcagccacaagccggagacagtgcgagtgaactggagtggctcaaagctctaaactccagtgactacttcctgaagtgagaccatgctttctaatcctccccaaacagggagacaaagtaggggaaaaagtgttcagatgcctgagcctaaagggggttgtttcttattcaaactcccacagggcccaaagaggagtcaatgctttttagcaagaacaccttctaatgtctgttagtaagatagcatctggaaggaaagaggagcccgaggagaatctgaacaaacaaataagcctctggatatgtgtcttagttgtggtttctaggtctgtggtaaaatactatgagcaaaagcaactaggaggaggaaaggatttatttcatctcatagctgtggggaagtctggccagggacctggaggcaggaactaattcagaggccatggggaattctgcttacttgattgctctccatagctcattcagcctgtttccttataccaccaaggaccacccaggagtggtgccatgccctgtagtatgggcttacccacattaatcttcaggcaagaaaatgtaccacaaactggctgttggccagtctggtggagaggggggcattttctcaatcagggttccttcttccaaatgattttagtccgtggtaagttgtcattaaaaaactggccagcacagcatgcacatagaggactatctaaattaggtaaactgatgtggggagatccagcataagtgcggatggcatcatgctatatgctgggctgaataaaataaaagaatggtagctaaacatcaacattcatcaccatctgtatccttactgaatgcacctcctgatcttctacaatgccttttttgtcatgatagactgtatttcttggacctgtaagccaaataaac

SEQ ID NO: 2556 - DNA, 1000 bp, mus musculus
tgtaatttaaagtatacacagttatatttatcttaaaattttaaaatgatataaaagtttcttcacacaagtattcactatacaaataggattttggtgttttagagatttttcaagtctcaactttccttctacatttttaccttgttttcaattttaggatcttcataagacattagcagtattggatgagtatgggataggatggaaaacttcaaaaggaaaaaacagaaaaccaacattagtaagcataagctttatggtaaaagtgccaattgaactagttcttagttataactctctctctctctctctctctctctctctctctctctctctctctctctctctctctctctctttctctctctctgcatgtgcatgtgtgtgtgcgtgtgcgtgtgcgtgtgtgtgtgcgtgtgtgtgtgtgtgtgtgtgtgtgtgtgtgtgtgtgtgtgtgcagattctcgtggaggccaaaagagggtatcagatcctctgaagatggagttacaggtagttgtgaacttccaagccaatgagtgatagaagtgtatcttggaacctctagaagagtagcaaatgtccttaatggctaagctatgccttcagccccagtaacagttctgtttatttcatctaacctgttcagttatctcttgcattataaaaagctaaacattgatgatacaaaagaatttccataaatttttaggctagggcttggtgtggctgagtcatctatgctccccaatgactaaggtctaagttaacataacttgaatgaggagagaaatcttgctgcctctcaaatgacaacaaaagggacaatgtcacaaggttcctgcctctggagcagaggctgcaggatgtgagtctcctttagtgctgatggttgccttaggcatatagcttgtttgcatgatattgtatatactttacttcatgtttctccttttgggagcattcttcctgtcaaggttattggggagttttattt

SEQ ID NO: 2557 - DNA, 1200 bp, mus musculus
tagcctccttgcccttttgagagtactctggattggggaggggatgccactgggaaggtcatagagataactgatagacagggctgtggggcttcggctcaaagactaggggatcttggcatacctgttagggatgccatctggtctttcttcgggcacactgcacactgcccattctgcaagcctgtgtccagagcctctccattttctttcacaattagaggccttggtggagtgcctggataatcagcatctggtgactgggcaaggagttgctgtgacagctcaaactcaatgatcttcctttgcaacatatcccgctcaaacttcacttgcttcaggtgctctttaacattgtgaagctcagagaccacttcatcacgttcctcacgcagccgttgcaagtctgtggccaaagtccaggtggctgcctcatgctcttctacctggtcgtgcagctgctgaacacgttgtaactgtttttctctctgtctcatagcaaccctgactcctagggccagagcactccaggcacaggccctcttgatggaacgtggtacttgggtatcaaccactacagacttcaggccatcttctatatctttccagggccgtgaatggaaggtcaggtagaagccagggccaccaccattctgtgtcacctcttcattgatgaacagaaccacttcgcagtggctgaaaccactcttggggtcatcaatatccaaggccatggtcaaacctgctcaaaatagtggactgcaatgggctcacccatcaactcagtgtcttgtccagccctgggtcctagcgcctccctccttcctcccctgcctccttacactgaagccctgaagtcaccgggccactcataccaactcctcccacacaagagattaacatgccacatcataaacatggtctatgaggcctgccgcatggcctgcttgaaccaaaatgcagtggaagagatatttcttgcttttctggcaagttgggtgtctgctctttaaagtacgccatggtagtacaactgttctgggaacagcagtgaatccgtagtttcctgagagtttctgaaaggtagcaccctatctgcaccctatctggcatggattttttttcctctttctccctttctccatcctccttctcttcctttcctccttcttccttctctctttccttccttccttcctt

SEQ ID NO: 2558 - DNA, 1400 bp, mus musculus
cagttttacttatttccttcaactgctatgtttttcttggctttctttaaggaattttgttcacttccatcaattttgtttttcctttctttggtttgtttaagtcatttcctcatttcttctttaaagttctctatcatcttcataaactaagttttaaagtcatttacttttccttcagttgtgtttaaatatttggggactgatgtagtaggatagctgggctttggttgtgacatattgccttggctgttgttaattatttctttacactggcatctgggtttggggtgattataggactaggtgcagatttctgagtttgtcttatttgggtgggtgtttttgttttccccttagtttctgtttcctctctggtcttctggctggcatggtttctggtcaagcaggtcatttctgccttagtttggggctggtcacaattacaaggaggggtgggaagattgggaagagtgtgagagacacaaagggagtgggggaggtccaagaataggtggcctacctggatttcttggaggtagagtagcctctgatacatcagtggatctttcacagagttgggggctaggacacagcataaaggagtgatggaatgggggtagggtagcagctagagactaatggatgtcttcaattaaggtggcttccctgaagttttggaggctggagttttgtcttatacatttagatttattatccattttgaggtgtttttattgtttgtgttatggtttgaatatgcttgtcccattggaactgctactattaggaggtgtgtcccttttgtagtaggtgtggccttgttggaggaagtgcctcactatggaggaggacattgaggtcctatgctcaagttccacccagtgtggaagagaccctcctccagactgcctgaggaagacagtctcctcctggctgacttcacatcaggatgtagaacacttggctctttcagtaccatgtctgcctgcatgctgccatgcttcctaccatgaagataatggactaaacctctgaaactaaaaaccagtctcagtgaaatattttcatttataaaagttgccttgatcatggtgtcccttcacatggtgtctctaaccaagacaatttgggttttgtctgtttattttgctggcttgaggtaaatttaattgctattttacataattttcattcatctatatgtgccactgttctaccaccatcatttgaaaatattattcttatacacattggaatatattgctactcctttaaaaaattagttaaccataaatataaaggcttacctttactcctgaatgccaattatgttggtagtctatctgcctaccctttgccaataccacattatcttgattattctagtttttggtggt

SEQ ID NO: 2559 - DNA, 1600 bp, mus musculus
ttttcaaaccattccctaatacccataaacaattcttatgctaattcttttattcccctcttttttcatccatcttagatagtgcttttcttttatccaaattctcacatatatacatccacagtaaaaaaaaaaatcatctttagctaggcaggctctggctgttttaaaccaatcatgaggagtcataagcaacttaaatgtcaggggttcccataagggatccgtattttctacattgattttcataaccaccagggaacattgtaataatttttcctgcatagcttcattgaatcctctggtttcctgtggtattttattacatttttaagcatcttgtgtggagtcacttatgtttaaatctacaggagtaagccatttatggttatgatattatgttgttgagataaatttttacccaagattcataattattgtttcttaagctgtctttcccaggctctttgaacaacgggtatcttaattttctttctttttaagtacatgtttaacccttagattcaccttatttcatcctgattatgtacagagatgtacacaagtcagagctaatggctcttggcataagctgggcacggatgacagccagaaaaagcagctaggccctgatggcacctagtatcagcctctgctggtggcagtaggcagttaagccagagctgatggctcctggcataatttgtgcaatgatggtacccaacgaaagtgactgggcactgattggaacatagtatatgcccttgataatggcagtaggcatgtaaaccagagctgaaatccgcctgcctctgccttccaagtggtagaatcaaaggtgtgcggcaccactgcttgggctgaagccattgttttaaatatctgagtagtactgcattgtgtaaatgtactacattttcttcatccattcctcttatttataatagccagaagctatgaacatagtggagcatgtgtccttgttatatgttggagcatttttgggtatatgcccaggagtggtagagctgggtcctctggtagtattatgtccaattttctgaggaaccaccagactgatctccagagtggttgaaccagcttgcattccaacaacggaggagtgttcttctttctccacatccttgccagcatctgctgtcatcttagtttttgatcttagtcattctgactggtgtgaggtggaacctcagggtagttttgatttgtatttccctgatgactaaggatgttgaacatttctttaggtgcttctcagccattctagtttcctcagttgagaattctctgtttacctctgtaccccattttaaaataggattatttgcagagcttctgggcggcgccatcttcagctccagacagccggccaccttcctggtgagagcacgggggtctgcctggcctgagaggtttgtggcacaggcgccggcgggagccttcttggctccgggactccgcggagggcaggctgcacgggtgaccgtgtggaatacagagtgccagccgtttctgggacgggcgagagtcgcagagcttctgggcggcgccatcttcagctccagacaaccagccacct

SEQ ID NO: 2560 - DNA, 1200 bp, mus musculus
ccttcatttgtgttttctttattgtttctacccccacttttaggccttggattgatttattcaattctgatacctgtttacctgtgttttcctatatttctttcagtgagttattggtatcctccttaaaggactttattatcttcatgagataggactttaggaaagaatcctgattttcaggtgtgttggtgtattcagggtttgctatggtgggaaaactgtgttcggatgatacccatgcattttgtcttctgttacatatggtcttgtgcttgtcttttgtcatctggatatcgttggtgttttttgatctgggtgagtgtatgaaatctgcctctttttgtccctgggttgcttcaggtctcctggtaggcctgtgtccctggctatatctgaccacctttggggccttccagctggaggcttttcacaggggcagagaagcttctgatctgttgctctggctgcagtagatctcctggaaggccttcagactgttgggtctttagtggagcagtcaagctgttgtccaactgtgcttagtgcagcctttcctcaatttctctgagaccagtggatactcagctgctctcagtgcagagggtcctcaacttctcaactgctctgagtgcagtgggtcctttaagatggattggaatatggagtcttcaagggagcaggccaactaggggtctgtcccagcagcaaagaaccaggtgtaaggggtgagagggatggaaggaaggtgagtggtatttgggagggcaggggttttggtgtgtgatgggtcctgagtccaccaggctcccagcagcagctctggtactccaggcagggggtgtgtgttcttaccaactgctctgagtgcagcaagtcctctagcatggattaggatatagagtcttcatgggagcaaaccaactaggggtacacacgagcagcaaggaccagccagagcttgcgagaattgtattgagtatttttgcatccatattcatatgggaaattggtctgaagttctttttttgggtctttgtgtggtttaggtataagtgtaattgttgcttcatagaacaatgttgcagtgatccttctgtttctattttgtggaatagtttgaagagtattggtattatgtcttctttgaaggtctgatagaattcttcactaaacccacctggtcttggcctttttttt

SEQ ID NO: 2561 - DNA, 1000 bp, mus musculus
ttacctgtgttctcctgtatttctttaagggagttatttatgttctccttaaaatcctctgtaggcttcatgagacacgattttaactccacatcttgcttttgtggtgtgttggggattctaggacttgctgtggtgggagaactggcttctgatgttgccaagtaatcttggtttctgttagtaagattcttgcatttgccttttgccatctggttatctctggtgttagatgttctagctgtctctgactggtgcttgttcctcctataggtctgtaaacctctgttagcactcctggaagactatctctctcctggcagaacttgtgcacataggactctggaacagcccaagctgtgggtgcagatgtttgactagaagtgtcctgtcccagctgctccactgatcttatgctcctggtcaaacctactccacacagttattggagagaaagtagttgtctcacctctgtgcccaggagtaaaaacactcctgggagaagaggtccctcctggtgggaaccatgctcagcaggctttggaacagcctcagctagtgggtgcagatccagaagtgatttgttaatgaaccaatattattggtgttatgtgtgtgattgaagttcaatgtgtttgttacagttatttgcatccaataagtgagtctggattcaatatcattccaatacagaaaatgacttttgagtattatttgaacctagttagttagttagttgatattcaatgatgtaatgtataaattagttgtgaagaaaagtctagccaggtgtggtgtcacacgcctttaattccagcactcaggaggcagaggcaagcagatttctgagttcgaggccagcctggtctacagattgagatccaggacagccagggctatacagagaaaccctgtcttgaaaaaaacaaaataaatctatatttaatttaatatatcaagggaataaaaatgatgcgaaatgcctttgacatacattttg

SEQ ID NO: 2562 - DNA, 1000 bp, mus musculus
cgggcgggcacctgtcctccggtccggaaggtggccggctgtccccggcccacacagggtgctgcctcagcccctctgtgcttccgcctgttccagaggctgtcaggttctctggcgcaccctctcacctgttcagactaatttcctaagttcggcaggtcccggaccaagatggcgaccgctgctgctgtcccctttcagctttttaaatccttcctctaattcaactttaggggtccccaagttcagtccactggtaggatttatctgtatctgtctcagtcgctactggtagggcctctcagaggacagtcatgctaggctcctctctgtaagaacatcacagcatcagtaatagtatcaggccttggtgccctctgatgaaacggatcccaagctggaccagtcattggacctcctttccctcagcctcttcagcctttttgtccctgcagttgttttagacaggaacaattctgggtcaggaattttgagtgtgggttagtaaccctgcccctccacttgaagccctatctatctactagaggtagactcttgcagttccatttccccagtgttgggtattttggctgaggtcaaccccaatgaatcctgagagtgtctcacctcctgggtttctggtactctctagagtacctccccccttcccactccccaaggctgcatatttacatacattttcttggcccttttggtttttctcctgtccttcccccatcccctatatctgatcctgtttccactttccactccctcttctcccacccaaattcctccctccttctgcctccataataatttccttcccccttctaagtggggtggaaagatgctcacttgggcatttctgtttgaatagaacagcaatggcttgtgctgtaagatcgagaatcaataaatgggacctcataaagttgcaaacttctgcaaaagacacacagtcaataagacaaaaagaccaccaacagattgggaaagg

SEQ ID NO: 2563 - DNA, 1000 bp, mus musculus
gatgatgacctccaggtccatccatttggctaggaatttcataaattcattctttttaatagctgagtagtactacctgcaattctttaagggatttttgtgcttcttctttaaggtcttctatccgtttcgcagtgttctcctgtatttctttgaatgagttattaaagtccttcttgatgtcctctaccatcatcatgagatatgcttttaaatccgggtctagcttttcgggtgtgttggggtgccctggactgggcgatgtgggagtgctggtttctgatgatggtgagtggttttggtttctgttagtaagattcttatgtttacttttcaccatctggtaatctctggagttagttgatttagttgtctctggttagagcttgttcctcaggtgattctgttagcctctatcagcagacctgggagactagatctctcctctgattttcagtggtcacagcactctctgcaggcaagctctcctcttacagggaaggtgcacagatatctgacgttcggatctccctcctggccaaagatgaaggcccaatacaggacctgtcccagaagctgtgttgctttggcctgtcacagaagctgttagcttctgtagtccacactctcacctgtgcagaatattctcggcaaagtcccggaaccaagatgtctttcgctgatactcaggcaaagcgctcctgggccgggcggacacctatcctctggccaggaaggtgtccagatttctgggtcccaaaaaaggggctgcctcagaagctctgtggctcccgcctgtctcagaagctgttagcttctacagtctacactctcacctgtacagaatactctcggcagagtcctggaaccaagatgtctgccaccaatgctcaggcaaagcctactaatttcttcctgtcaagcaaggagggatcattggaaagtgtagtaaaccactgtagaaacgcaaatggaactgtttttagacacagatcatttg

SEQ ID NO: 2564 - DNA, 1400 bp, mus musculus
agacttgattgatcttggccacagtttctactagaagcctatataaggatatagaagtagggaacatttgattttgcttgcttgtcctggtcttgataggacatcaatttctttactggcattagagcctgttttttggcattccagtatctactgaaaactgactgaaatatttagtgtcttaagatttctgttgctgtgaagaaataccataaccatgcaactcttataagaaaacatttaattggagcttgcttacaagttcaggggtttagtccattctcctcatgatgggaatcatagtagtatacaggtagacaggttgctgaatatgtagctgagagttttacattcagatcagcaggcagcaggaagagaaagtgacacagggcctagcttgagcatctgatgcctcaaagcccacctccagcaacatacttcctccaacaaagctatacatcttgaacaaggccacacctcctaatagcatcattccctatgtgcttatgggggctattttcattcacatgtggtttacaaccacatccagccttgtgatctgagcaacttctggatcattgggttttccattgatagcccaccacttttggattagttggaccacagcctgtaagtgactgtagtaaatcccctttctaagtatatagccacacacccatctcaaaaacttttgacccagaattattcctgtctaaaggaaatgtagggacaaaaatggagcagagactgaaggaaaagctatccagagactgacccatcttgggattcatcctatgcgcagacactaaacctctgccgtattgctgatgccaagatttgcttacagacatgagctatgtatggctgtcttctgagaggctctaccagcacctgactgacagatgcttacaaccaaccattggactttgcccagggactcctatggaaaagttagaggaaagaataagggagctgaagaggattgcaaccccataggaagagcaaagctatcaaccaaccagagccctcagagcaaccagggaataagccaccaaacaaagtatatacatgggtgagtccgtggctccagctacatatgtagcagaggattgccttatctggaatcagtgggaggggaggcccttggtcctatggaggcttgatgccccagaaaagggggatgatagagggtcggggtggggctaggtgggtgggtgggtgagcacactcttagaggcaagaggggaagggtgggggatcatggaggggccactggaaagggagacaacatttgaaatgtaaataaataaaataattcataaaaataaaatacttttggttaaagacaaaaaatatttaaaaaaaagaaaaagaataagagattcattttataagttctg

SEQ ID NO: 2565 - DNA, 1000 bp, mus musculus
ttaataattcttctattacaaaagtaattatccttgcatttgggtcatagatatgtatacttaaagtgttatcttggtatatttttcctttatgaatatgaggaatccttacctgtatcttatgattaattttggttgaagtcaattttcatagataatatgatggctataacagtttgcattttagatccacttgcttggaaaatgttttacaaccccttactctgaggtaatatctatctttgatgttgagatatgctttttgtatgctgtagaaggatggatccagttttcacatctactttgttagcctgcatctgtttttccttaccttatatattacattctgcagtttaacttagctggcaaggagctaacatctaggcctccctcttccatctcatcctacatatccctgaatgcatcctgagtatcattatctaacagcatccctattagtcctcaccaagagttctcaagcacaaatagttgggcagaaaccgagcctataaggcacggatgtccaaacataagaatcctctcttttgtggaaaagaagactgcctaactggtgtagtctgtgattagtgcaaagaaaaagggaaggggtctggtaaggattctggttcctatatatttcagtaaatactgaacatggagtaaactggaaagagaaattgcttgagcttcatcactggtacatgagaacacaagtatttagtgttcgcaagaatccaaatatccccacatttggcctgtcttctgtaggtgagcatattgttgaaagtttatgggtacagcttccttgtcatacctaggagtactaggcatgacatttagcagtaggcatctggttctctggctcttacactgcctcccctacagttttccttgggactactggaggtatagcattgggttttggtctgccatagtcagttgtcttctgaattttgaccagttgtggattctaacaatagtttccatctactgccaagag

SEQ ID NO: 2566 - DNA, 1200 bp, mus musculus
aacccacatactcctgcttccttgtcctggcattctcctacactggggcatcgagccctctcaggaggaagggcctctcctcccactgacttccaacaaggccatcccctgctacatatgcagctggagccatgggtctgtccatgtgcactctctggttggtggtctagttcctgggagctctggggacactgttctgcccatactggtattccttctatggggcagcttatgctctaagatcaagaatagacaattgggttccggttggggccacccctgccatcttccttctgaacccagaggaggcctctaagggctccagagtactctccatgccgcaggatctcgggatcaactccggatcatgggtgagtggatcacaacatcagctccaaagaatgtcagagggtcttgtgccagaaggaacagggacaaaggaaccctgcctgactagaggctgggatccgttctggtcagggccaccccccacccatcttccttctgaaccctctgacggccaccaggggccatagagtactctccacgtcacaggaccctgggatcacctcgggatcacaggtgagttgaacgcaacatcagctccaaagaattgaggagagacttgtgccagcaggaataaggatggaggaaccatgcccagtcagatgctgggatccattccgaggacatctaagtcccaagaggactcttcatgccacaggacccctagcacacctaggatgttgtgatcacctgagagcacatgggtgacagaagcaacagagctttatggacagggtcccttagggccttcatcctcagccaggaggcagagctgagacccagatccctgggcaccttctttgccagaggagagttggcctagagggagggctctgaccccaggactcaggaagtggatcagaactccacacttatggacacttgccctacaagagaagagcttgcctgcacagagtgctctgaccactgggactgaggggagagttggactcccaggaattctgacagaggctaacagaatcacaggaggatcaagctccagccagagaaagcttgaacattaacaccagagatttccagatcatgaaaggcaaacataagaatattactaatagaaacaaagaacactgggcatcatcagaacccagtacgcccacaacagtgagtcctgga

SEQ ID NO: 2567 - DNA, 1400 bp, mus musculus
aaacagatgttttaatttagcatttgggatcttcaaatagggcagaatcaaattgatatcgcctaacaatttctgaaaatcatttaaagtatgcaaggaactaaccctcaactgtatcttttcagtccaaacggctgtaggggcgatccttgctcttaaatagaacactattttcaacaaatctctatccccataaggtaatgggcagctcaagcacatatggttgaaacatctcgtcatgcccttccttaccgttccaatggagcatcctggcacttatgtctgggctctttgcatagcccaggccttgtaatatttgttctgactcttgaatcggccatccttttggccagtccttaaaccaaaaggcaataagaaaaattacccaaatggttagaaaaagaaagtaatccatagactgtccctattacctcgtattttcactaccctcttactttcactttctcgtctccagagctggagagccttattgtctcttactgagagccttattgtctctttaccaagagcctaattgtctctttactgagagcctaattgtctcttaccaagagccttattgtctcttaaccgagagcctaattgtctcttaccgagagcctaattgtctctttaccaagagcctaattgtctctttaccgagagcctaatcccaaccccgggatggtgagttacttactgtactcatcctgtcgacagaccctgactgcagaaagttctggacctcttcagtggaggagtcagttctcaggtttcggcaccacttgttgcatccaacacgaccagcaaggaaaacacaaccaccggttcttcttaaagcagtttactcaggcagcttctctcttcaaatcccccacgccttggggtacaagcgtttttatccactcaagctacaaccatgcctcaaccaatcaccacaggtcacatcacctcaccaggcaggcttgctcagccaatcagggattaagggcgagccatccacctaatatgggcttgtttactgcctggcacagattttcatctggctggccagggagtccagaatggcttaccacaattttctaattatacacacacacacacacacacacacacacacacacacacacatatatatatatatatatatatatatatatatatatatagcttcaaatgatataattatatttttgttacagataagcattacacaaaaatgtatggtgttttttcatgtgggtgttgattgatactatgtacatctagctaaaaataataattgtaggttctcacctatgtcctatgacctccggagatattgctttttgatcaaatttgcattatgaatcatggttcatctcctgtgtagtgcgccttgaatccagttagttgcctaa

SEQ ID NO: 2568 - DNA, 1200 bp, mus musculus
tttgaagaagtcacaccttatgctggatatccttggatcatcccatggtgtttggggcacacagacctaccacataaatagctctttatttttccatcctcatttttctctccttcattcttgtctcttacaatctatctctacatgtgtacctagccccagacatgagtatgtgactgtttacagaggacatagaaagtcttaaagtgacttagggactttggaaaaaacggaagacagtgaagtatcttgagtgatccttagtgattagagtggggtgtgatggagctgtgggctggggaaaagagggagattgtcacagatctcaagtttcctcattatgattgcatggctatgtgcaggagatggttcagatgggggcccaaacccagggcgtggcaggcatgaaggcaggtggtatggaatgtttctccttttgctatgtcctcatccgcacataagattcttgggcttcctgaattctcaacaattgttgtgaatgtaagctgctgccctctggtggtaggcgggttggaagacatgctacagcatcaacctggacccagatgactgggtgcctgaagactcagaccttaatcaatggaaaaaagaatcaaaggtattggcagatattcttatctcctagcatactcctggctccagcttgaaaaattgaataaacctgcctgtgctttgccctgaatccaccccattctggtagactgaagctgtctgctctcccaggggcccagctgaagttgctggaattcacccttttgacatttgttcatcttcccttaccctaatctctcagccacaaccaactctctcatctaccagcacagggttctcctgggaagactgggggacaagcatctttaaacttacagcattcttgtggtctgaattccaaatgtttgctcactcatggcaagcttggcagctgtacagcaggtactttattgtaaatgatgtagtcataagccaggtatctcggccctgagaacaaaaaattattaatctgagtcaagctctctgataggaaaatggaaattccactaccatatagatggactttgctataatttttactactctgtccactgcatgtatgtatgaacgataaaggttgcatcttaccactagaagagaggatagtaaaaacaaagagaatttattaaactttctagaggctatttg

SEQ ID NO: 2569 - DNA, 1000 bp, mus musculus
catcctttttttctacattactgaaaaagaggggtttgcccttggagttttaggttatctactgggaccttcttttgcacccatagcatacttgatagcatacttgtaaaaacaactatatctaaacatccagggataggtgtaagaccccaactcaatgtgtttcttagacccctagaaaggaagcccatcttggagttctttgttcttttgccttcagcctgagagaaagatgaccactgggtaacccacccaggcacctgacccatagtgtaagggaccaagaatgtttgcaaaaagatagcctgtaacctttccatgagagatgagctgtaagtcaccatccccattcttatgatgttaactcagcttccccattctttaacggaccaagaatgtttgccaaagatagcctgtaacctttccatgagcgatgtgctctaattccccatccccttcttatgtttacttggcttccccattctttttggtcttatcctcccctcactttgtggtttattctttaaaaccctcaactgcaactgctggggttttatctcctctgcccctgtgtgtgttatgagcttggcctcagcatgctgattcccgaataaacctcatgcaatattgcatcaaaaatggtttctcgtgtgttattgaagtgacggctcatccaaggacttgagcgagagtctccccgaattgggggtctttcagttttggggatcatcatgggattttgtggccaccccatttctcaaagacccttcttggagggaagattctgtttttgtctatgtctttctcttccggctgtgtttgaatttggtactttcgatttcagtttgcagtcatcagagctcgtgagagcaatgaactccttgtccaggatggaagggagggttattgacagacatgtcaggggataactggctgccaccctgggagatgtcccaggagttctgagggagctccagggatgcctggagatttcccatct

SEQ ID NO: 2570 - DNA, 1800 bp, mus musculus
agcaccatctgttgaaaatgctgacttttttatactggattatttttagctcccttgtcaaagaacaagtgaccatatgtgtgttgattcatttctggttctcaatcccattccactgatctacatgcctgtctctgtaccaataccatgtagttttttttttgtttgtttgttttaattacaattgctctgtaatacaacttgaggtcagggaatgtggttccaccagaagttcttttattgttgagaatagttttcactatcctaggttttttgttactctcaatgaattttcaaattgttgtttcttttgagataacccccactctagttcttcaggacccgcatgaagaacaagctgtacatctactacccttaagctgagaggcctagatccagcctgtctattttgttagttacttagaagcagaatagttaatatagtttgttgttcaggagctttggctttattcttgtattatttgtttttctctctcatagaactatacacttagcatgtgcacactacacattcaactcccaaagtgaattccatcaaatctccaaactcacaggttatcaatgagtagtctgtggggagcgggtgtggcagcagtcccaaaggcgccagggactgcagctaagtcatatgacttgcacctgacttcctcatataagacacaaacatcttgagtgctgtgcaggtgtaccaggatacaggtgaatccaatttggtggagatttgcccctgctgccctgattagctgaagctgcgtgcctggtgaggtggcgtggcctgctgtgcgtggatgggaactgagagtataaaagagtgagaggcccagggttcgggggagatataaacaagggagatataaacaagggagagatataaacaggggagatatagagaaagaagaaacaggactgaataaacgtgtgcagaaggatcctgtagcagcgtcgttcttgctggcgagttgggggcgcgcgcaagagttggtgccgaaacccgggacaagaaacatcttcaggcacgagcgaagaccccctgctacagggaggattcagaactgcatcacggggaaggagtggttaataaaagttcctgtaaaacagactgttgagaaggatccggcgtggattcagaactcttcagctggggaacggtactgatgaagagaaagaagaaagatgaagactgaataaactgttgttagaaggactggtggtcgtgtcgttcttgctggtcgagagcagacgtgacaattggtggcccgtactgggaactgactcccccaccgagttcagaactttcagcagtcagtggttgccagcagggtaagttcacggtgagtgaaacttgcgaccccaggagtttgggaaggacctcggataaaatagaggtgagcataaagttgccaggaagtaggcacaaagtaacccaggagtttgggaaggacctcggataaaatagaggcaagcataaagttgccaggaagcaggcacaaggtaacaaaaggttcccggctttgggacaagttaaggttcccggtttggggacaagttaaggaactaagataacctcagtgtagtgatcaatagatcctcgctgtgtagttatgcttttttcttctattgaccctttgtgggtaggtctgatagttttggtcttctttgttctgatatatggactctgttactgtttgaaactgtgtgtagaggcagtcaagacaggtcagaaaatccttacagagcaacaagaaagtatgtcgaaagaggagaagggcttaaaaagaa

SEQ ID NO: 2571 - DNA, 1400 bp, mus musculus
tcaaaccaatgacatcacataggtgatagagcgacctacagaactgttgccaagatgaaagctaccatgttcccagaatacacttggctcacctcccacctttacctgtattacatcattttccatataaataaggggaacaccccccctctctttcttttccccctcttctctgtctgccaccaccttgtctctccctctcaataaaacctcttccagactgcctgcagttctggcacatgactttaatcccaccacttgggaggtagatgcaggcagatttctgagttcaaggcaagcctggtctacagagtgagttctgggacagccaagttgccaagttctacagagacaccctgtcttgaaaaacataacaaaataaaacaaagaaacaaaaatcctctctcatttgtaattgtcttggactagtttgttgttgaaatgagacctgctgacacaagcccctttctgtctgagcagcactggggtaactagggcgcacagtctgctgactaccgccagctacccataacacctgccaagcgatcttaagtcttctggtgagtggaccacctcatctactccaatccaatcgcaagggacttgagactgcattagtcagggaagcaaaaacccggtctgagtaggggcacaagccccttttggtctgagcagcaccaggtagctaggttgcacagttggctgactaccgccagatacccacaacaccagccacgcgatattaagaattctgaggattgggatctgtcctgcgcgggagtgcttcacctgagcattggcagcagaaatctcggttactggaccccgccaagtgtatcctgcacagacagctggccattttcccggccagaggatagggatctgcccggtgtgggagcattttgcctgagcattgacagcagacatcttagtccaggaccctgccgagtgtaccctgcacagacatcttggttccatgaccctgcccagtgtatcctgcacagctccagagaataccagatgacgaaaggcaaacgtaagaatcctattaacagaaatcaaaactactcaccatcatcagaatgcagcactcccacctcacccagtccggggcagaaatggatggtactctacccaattcattttatgaagccactattactctgatacctaaaccacagaaagacccaacaaagatagagaacttcagaccaatttctcttatgaatatcgatgcaaaaatcctcaataaaattctcgctaaccgaatccaagaacacattaaagcaatcatccatcctgaccaagtaggttttattccagggattcagggatggtttaatatatgaaaatccatcaatgtaatccattatataaacaaactcaaagacaaaaaccac

SEQ ID NO: 2572 - DNA, 1400 bp, mus musculus
ttgttctctctccctgtgatgttcttatgttacctttctttctgtgcctttccagcaaccttgagcaagctaaatcagaccttgttttcccacagttgcctagcccacatagggtgggttcttccaacctaggtgatatctatagtcctgccacatatgcagcttcctgcaagaaaacactacctgctgatcagctgaggttgttttcctgaggagattctggcaaagtgagggatgagttcccccatttaaattaagacttatgaattaagcattgggccttgatcaataactttgtcttggtctcatttgtctctcatcccatccatccccagctctccttccaggtacccacttctccatggatgctggcagctatatcattcctgtgttgttctcctgagatgggtgtatcttctgtctgactcattctaacaaaccttgctctaatttgttagtcttctctcaatcaaatgtcacttgcaaacataatggtttccttctacaaattaaacttacctacattgtttgctattaaaggtgtaagggcctgtctatattctagagagatcatacagtaatctagaatatctactttccagccagattatatagacccagaaaaattttagctatgatctcttgccagagcagccatgttattgggtatgaacttatcaaaagtcaaattggggagccctctcaaccagtccaagcctccggagcagcctgcgattcctgagggacctctattctcctaccacctctcctctaccttcatcagacttgtggatgatagaggatagcttccattttcccacccaccttctctgcttgctgaacctcatgggccaagccaagctgccttgaacagcctgctatctgagagagcctcctactatcccaccacctctcacccccttcatcagactcctgaaccattcctgaaagcttcccttccctgacccattttcattgctatcggagccctctgggccaaaccaagctgccctgagcagcctcttatctaagggagaactacattctcccgacatgtctccacccaactccagcaaacctgatgttcctgaaccatacagaccacaggtccagaaacattaaattcaaggacactcatcagaggtctgcaacaccaggtccattgaggttaaccccctcccaaaacctactacaacaagaacatgcaggcaccaaaaacgtccatatggctaaaggcccctgaaatgacacaatcaacaacaaccagagtaatatgacacctccaaagcaccgccaattcactacagcacacttggatattctaacacaagtgaatcgcaagaaaatgaccttaaatccaatcttctaaagatgatagttgcctttaaacaggaaacaaa

SEQ ID NO: 2573 - DNA, 1400 bp, mus musculus
ggcaaatgtgggcgcggctcccaacacctttccactgagttcttagttcccgataactcactgctgatcctaagtgaatctagcacgtggatttagcactgttccagcttagcctgtaccaaccttctccagtacaaattttctttaattctttacttcttccaaggagctctaaaccagcagtgtttcttccaaatgtcctctgcctatcccaggcgccacattgggcaccaaattgtaggggccggcctggggctctcatgtccgggtttgagccttgaaggcatcttggaactgaaagaaaagagggagcctaggcgggtcaagaaataatggaaccaagaaaacaactcagggttcaaatgtttaatggcagacacactttataaaagaggggggaggcccattcccaccaattcatgcttggagcctggaactagctgcaggtgatgacgtgcaggatagagcaaagtctccagaatagatcaggggggcttctcagcaggtaacagtaccttgaagagaaacagcaacagtggctgaacaatagagtgatcttgggcagaaggctccaccctagataatctccttagtggcagcaaggtcaagttctggctcaccctgcttcaggcttgtgggatactacaggtcagaaaacagatactcagaacagacatgtcggctggcatgcacacattccagaggggatctccttacctccaagtcagttctcagatgagatgggtggttgcatttcctggccaatgcaccaaatgaaagacccacaaagtgaggactcccccacattcttactcaggagaggagaaaccccaaatcactcacaagaaatggccttgatgcaaaccgcaagagaactttttatttcaggcacgcttggggcccacagtcatacaccacacaggggtagaggactgtggacccaggtagctggaaaaggggctatttaaaggaaaaaaaaaaacacaacccaagggggtagggagggtgttattggaaaatgccgaaaataccagtaaaaaataaaaagggtgttctaaaaatcacaaggagaaactccctgcttctcaagattgttctcaagattttaatctaacttttgtggtcagccagttcctggaatagggtcactgaatcgggctaacctacattcttggtgatagggggtctgaattttttccttgtctttcactgtgtactggtccaattgatcccaaggcttatttactacttcaatagagagcttctagatagatgggacagtaccctctattgaacaagaaggaaacccttcatggtgggtgctcagggtttcattgctcttgggactaggagtggctggagtggctactggcacctcttccttggtgctacaaggtcac

SEQ ID NO: 2574 - DNA, 1000 bp, mus musculus
ccaaagacacaggggactctctcacccaaatttccacacagtctggaacatgcacccagccaagctgacaaggtacttacccccccacttccacttcaaccccccaagctccaatttccttcgggacctattcctcaccagggccagatcagtggcccaattcctgcccaaatactacagcctgcaggtctttcaggagttccatagtaaccaagggcacaggacatcttcagtaaaagggttacaggatttctgaagtaaccagagacacagaaggtctaccctaaccagagacattggaggcccactctaatcagagacaacactgcatgtctccaaggagatcatccctaactcagattacagagctctctgcctccaaggagaccagttacaatcagagacacctgggccaattaacaccagagtgaaccagatggccagaagcaagcagaagatcatatgtgacagaacccaatgctatcgggcacaatcagaaccaagttcttccaccagagcaatccctggatactctaacatgactgaaaagcaagatagtggcttaacatcccatcttttgaaaatgacagatgcctttaaggaagatataataaactctacttaaagaaacaggaaaacaaaggcaaacaggtagaaacaaataaatcccttaaagaaatgcaggaaaatacgagcaagcaggtaaaggagttgaataaaacagtcttagaactaaaaattgaaatagaaacaatagagaaaacacaaacgaggaaacccaagagatggacaatttagagaatgtacctaaagagttgaaggggtctacaaccatataggtggaacaaaaatatgaactaaccagtacccccagtgattatgtctctagctgcatatgtagcagaagatggcctagtcggtcgtcaatgggaagagaggccccttgatcatgcaaactttatatgtcccagtacaggggaacaccagggctgagaatttg

SEQ ID NO: 2575 - DNA, 1600 bp, mus musculus
atttccatcacctgtttgtatgttttttcctgtttttctgtaaggacttctacctgtttgatttgctttcctgtttttctttaaggacttgtaactctttagcagtgttctccggtatttctttaagtgagttattaaaggccttcttgatgtcctctactatcatcatgagatatgcttttaaatctgggtctaggtttttgggtgtgttgtggtgccctggactgggcgaagtgggagtgctgggttcttatgatggtgagtggtcttggtttctgttagtaagattcctacgtttacctttcgccatctggtaatctctggagttagttgttatagttgactctgtttagagattgttcttctggtgattctgttaccgtctatcagcagacctgggagacagattctctcctctgagtttcagtgctcatagcactctctgctggcaagctctcttacagggaaggtgcacagatatcttgtgtttggacctcctcctggccgaagaagaaggcccaaaacaggacctttctcagaagctgtgttgctttggcaggtcccagaagctgtcagattctgtggtgcagactctcacctgtgcagactaaattcctaagttcagcagaggcctggaaccaaggtggtgcctgctgctcctgaggctgaggccttccgagccaggcagacacctgtcctctggtccggatggtggccggctgtctgtggcccgcaaagtgtgctgcctcagtggctctgtgcctccgcctgtcccagaagctgtccgggtctgtggtgcaccctctcacctgttcagactaattttctaagttcggtggagtccaggaaccaaggtggcgaccgctgctcctgaggctgaggtcttcagagccaggcggacacctgtcctctggtcccgacggtggctggctccttattttctttttcaatgacctgtcgattggtgagagtagactgttgaagtctcccactattattgcgtgaagttcaatgtgtgttttgagctttagtaaaatttcttttatggatgtgggtgcccttgcatttggtgtatatatgctcagaattgagactttgttttttggtggatttttttcctttgatggatatgaattcttcctcacctttttttctactatttgtggctgaaatattattttttggatgttaggatgtctatgatgtaggcctgtgtactgtaagctttccctgaagatctttggcctaaacaggtctgagggttcaggagaaggggagagaatgctaccaggaacgaggaattgtctctgctgtttccactaatgcagctgtatccaccactgccgtcgcttttgttgctccaagatgctctatgctgagtaatacctggctgagctggtgggaggctgactagcctgggagaggtggcaggaagcttcttgtggtgttttgggagagcaggtcctttccctggtggtggtcttacaactcttatgacagaggctctctgataatgacagagtaattctcactcctttatttattctcaataggatttttatatacagtcttgtggtggttcacagtatgacagtaggtg

SEQ ID NO: 2576 - DNA, 1000 bp, mus musculus
gatagcaaatgtaaatgaagaaaatacgaaagaactcaaagacattttagaaccaaataaaatgagtatacatcatatctgatctcgaacaattgaaagaggttaaagaaaatgtacaagcacaaaattcctacataaaaatcaatcatttagttagttatttgattttaaaaatctggatatatctaatattaacaatttaacatcacatacaaaatctctaaacaaaacaaagaaataaaccccaagaatttatcttgggtgagaacttgacagagggtcccaatgtctccagaggactttatatgcagtaggtgccctagcacacccaggatcttgggatcactggtgattggaatgcaacttttcttccaaagaatcccggagtgtcttttgccatcaggctcagtgacaaaggaaccctgaccttccagtagctgggatttattccagtctgcaccagcctcatgccatctagggtgtgaacttgatggagtgtcccaaggaccccagaggactctccacgccacaggtgccctagcatatccaggatcttgagatcactggtgagtggaaagcaacatctgttccaaagaatcctggagggtattgtgccagcaggaacagggaaaaaggaaccctgccaattagagtctaggattccttctggtggctgcagccccacaccatcttgggcatgacctgggccgaccctagcacacctaggatcttgggatcagtgagaccggtctacttaggatagcacgtgggaggcagaagcaacagagcttcttggtaagggtccctttgagccttcatgctcagccaagaggtagagctgagacccagacccctgggcaccacccttgccagaggagagttgtcctccagagagtgctctgaccttgaaactcagggtgtgtatctgagaaccagacttctgagcaccatcccttcaagaggagagcttgcctgacaactgggcctaaggagagaggtg

SEQ ID NO: 2577 - DNA, 1600 bp, mus musculus
tatttacttcacctacatttcaaattccatcccgaaactcccctatacccttcccctgtcctgctcccctattctcctactccaaattcttggcccttgtgttcccctgtactgggacatataaagtttgcaagaccaaggggcctctcttcccattgatggctgactagtccatcttctgctacatatgcagctagagacaagagctccaggatactggttagttcatattgttgttccacccatagggttccagacaccttcagctccttaggtacattctctagctcctccattgggtttgaagctttttacactttgtattttctatacctaggattctctattctatctctcatattctgttggtaatatttgcatctgtaactcctgatatcttgtctaagttgtccatctcctgggtttccacattttgttgtttccatattgtttctatttcaaattatagttctaagactgttttattcaactcctttacctgctctctcatattttccagtatttctttaagggatttgtttgtttctacctgtttgcctttgttttcctgtttctttaaagggagtttgttatatcttccttaaaggcatctgtcatcttcaaaaatgggaagtgaggccactatattgcttttcagtcatgttagagtatccagggattgctctggtggaagaactgggttctgattgtgccaaattgcattgggcttgccacatatgatcttctgcttgactctggccatctggttcactctggtgttaattggcccgggtgtctctgattgtaactggtctccttggaggcagagagctctgtaatctgagttagggctgatctccttggagacaggcagtgttgcctctgattagagtgggcctccagtgtctctggttaggttagaccttctgtgtctctggttacttcagaaatcctgtgccccttttactcaagatgtcctgtgcccttggttactatggagctcctgggatgtttccaggctgtagtatttgtgcaggtattgggccactgctctgaccctggtgaggaaaaggtgctgaaggaaagtggagcttgggggttgaggtagaagtggggggtaagtcccctgtcagctgggctgtgtacatgttccagcctgtgtggaaatttgaggaagagagtcccctgtttctttggttactttggaccttctgggaggtaactaggctgttacatttgggcaggtattgggccactgatctagcctacttcttcttgatggatcaggtttttgatgtgttccaagattcagtttgtgagtactttattaagtattcttgcatcaatgctcataaaagaaattgtccttaaattccttttccttttagtctttgtgtggtttagaaatcagggtggctatggcttcatagaataagtttggcagtagaccctcggtttctattttgtgaaatagtttgaggagtgttagaattagctcttctttgaatgtcatatagaattgtgcactaaaaccatatggccctgggctttttggctgagagacttttgatgactgcttctaattctttaagggttatag

SEQ ID NO: 2578 - DNA, 1600 bp, mus musculus
cattgcacgggatagagtgagtgtgcttcagcagcccgagagagttgcacggctaagcactgcagtagaagggctctgcggcatatatgagcctattctagggagacatgtcatctttcaagaagggtgagtgtccaaagtgtccttctccccaggaaaaatgacacgggaccagaccaggacccctctgggtgatgagcctgggaggaggttatgtgtacgtctcctttacctgcacactggggatttgacctctatctccactctcattaatatgggtggcctattgctcttattaaaagaaaagggggatatgtaggaagctgccctcacattcgcctttgcaagatggcgctgacatcctgtgttctaagtggtaaacaaataatctgcgcatgtgccaagggtagttttccaccccatgtgctctgccttccccgtgacgacaactcggccgatgggctgcagccaatcagggagtaatacgtcctaggcggagaataattctccttaaaaagggacggggtttcgccattctctctcttgcactcttgcttttgctcttgcactctctctcttgcgctcttgcgctctggctcctaaagatgtaagcaatagagctcttgctctcttgcactcttgctcctgaagatgtaagcaataaagttttgccgcagaagattctggtttgctgcgtctttcctggccggtcgcgaatgcatgtaagagcttctcacctctggcaagctctccctgggctggactccttcacctctcctcaggcttttagcagaagtggccacaaggtgtccggagcccctctggcagccactatctctggcagtaggacactagaaagggcaggctaaaaggtgggcatcctggagcagtagtggtggtggagggggatgggactgagcccctcaggagaaacaaagtagcagtgggaacccccgtccaggggaagacaaaggggaagagttgggaggggggatctgcagtgagcagcagaaactgggcatgtccttcagagccagactgaggttctggaaagaacaaggtggagcccggaggtgggtacctggaagcagccagggaaaacagaggggactgggggcagcaggcagggaagctcaggacactaaaatggagggaggagaggcactttacagctcttcctgacttccaaacagatttgcaactatcctatgggggcagggctctagactcagcagagcacctagtatctgggaaaagaacagccagtcactgaggagagtctcttgttccccttttggggaattcctgattctattggacaccagacaacagctttgccactctctagtacttcttcacaggggccctagggaaccgcagagacagcaccacacaaccaggtgccagggcaggtttcaagcttcatccgcaggttcttggcaatagcagttaggaaccagcaaaaagcatggaggcactcactgggaaaagttaatcatttacccccatagtcaagtgtgtctcccccgttcacactgcagccttggagccctccaggacccaggaagcagaagggcaggaaagctgcataacaggacat

SEQ ID NO: 2579 - DNA, 1000 bp, mus musculus
ccctggtgttcacctgtactgggacatataaagtttgcacgatcaaggggcctctcttcccattgacgaccgactaggccatcttctgctacatatgcagctagagacataatcactgggggtactggttagttcatatttttgttccacctatatggttgtagaccccttcaactctttaggtacattctctaaattgtccatctcttgggtttcctcgtttgtgttttctctattttttctatttcaatttttagttctaagactgttttattcaactcctttacctgcttgctcgtattttcctgcatttctttaagggatttatttgtttctacctgtttgcctttgttttcctgtttctttaagtagagtttattatatcttccttaaaggcatctgtcattttcaaaagatgggatgttaagccactatcttgcttttcagtcatgttagagtatccagggattgctctggtggaagaacttggttctgattgtgccagatagcattgggttctgtcacatatgatcttctgcttgcttctggccatctggttcactctggtgttaattggcccaggtgtctctgattgtaactggtctccttggaggcagagagctctgtaatctgagttagggctgatctccttggagacatgcagtgttgtctctgattagagtgggcctccaatgtctatggttagggtagaccttctgtgtctctggttacttcagaaatcctgtaacccttttactgaagatgtcctgtgcccttggttactatggaactcctgaaagacctgcaggctgtagtatttgggcaggaattgggccactgatctggccctggtgaggaataggtaccgaaggaaattggagcttggggggttgaagtggaagtggggggtaagtaccttgtcagcttggcttggtgcatcttccagactgtgtggaaatttgggtgagagagtctcctgtgtctttggttactttggacc

SEQ ID NO: 2580 - DNA, 1600 bp, mus musculus
ccacactcttgctttagagaggtttgtggctttcagtcatatagatacagcaccccaatccttcccacatgtagatgagatatcccagacctcatagaccaagccaatagtaaacacctactgtcatactgtgaaccaccacaagactgtatataaaaatcctattgagaataaataaaggagtgagaattactctgtcattatcagagagcctctgtcataagagttgtaagaccaccaccagggaaaggacctgctctcccaaaacaccacaagaagcttcccgccacctctcccaggctagtcagcctcccaccagctcagccaggtattactcagcatagagcatcttggagcaacaaaagcgacggcagtggtggatacagctgcattagtggaaacagcagagacaattcctccttcctggtagcattctctccccttctcctgaaccctcagacctgtttaggccaaagatcttcagggaaagcttacagtacacaggcctacatcatagacatcctaacatccaaaaaataatatttcagccacaaatagtagaaaaaaaggtgaggaagaattcatatccatcaaaggaaaaaaatccaccaaaaaacaaagtctcaattctgagcatatatacaccaaatgcaagggcacccacatccataaaagaaattttactaaagctcaaaacacacattgaacttcacgcaataatagtgggagacttcaacagtctactctcaccaatcgacaggtcattgaaaaagaaaataaggagccagccaccgtcgggaccagaggacaggtgtccgcctggctctgaagacctcagcctcaggagcagcggtcgccatcttggttcctggactccaccgaacttagaaaattagtctgaacaggtgagagggtgcaccacagacccggacagcttctgggacaggcggaggcacagagccactgaggcagcaccctttgcgggccacagacagccggccaccatccggaccagaggacaggtgtctgcctggctcggaaggcctcagcctcaggagcagcaggcaccaccttggttccaggcctctgctgaacttaggaatttagtctgcacaggtgagagtctgcaccacagaatctgacagcttctgggacctgccaaagcaacacagcttctgagaaaggtcctgttttggggcttcttctttggccaggaggaggtccaaacacaagatatctgtgcaccttccctgtaagagagcttgccagcagagagtgctatgagcactgaaactcagaggagagaatctgtctcccaggtctgctgatagacggtaacagaatcaccagaagaacaatctctaaacagagtcaactataacaactaactccagagattaccagatggcgaaaggtaaacgtaggaatcttattaacagaaaccaagaccactcaccatcataagaacccagcactcccacttcgcccagtccagggcaccacaacacacccaaaaacctagacccagatttaaaagcatatctcatgatgatggtagaggacatcaagaaggcctttaataactcacttaaagaaatac

SEQ ID NO: 2581 - DNA, 1600 bp, mus musculus
ttttttctgagtgtctgtcttatgtttcctgaaatgaacatgtgctcgttgtgttggtttcttgtctgtgtttcgtcctgtgtctctgaaacatagtgcagtctgagtttagatccacctgagtttggtttctctggtgtttatagacgatggggttttctgaaatgcatatttggtatttgtagctgtcccttcgggctgtaaggaccagaggactgtggtcagcagatgtgctaggaagaatgctacctccccaggggatgccctggggagtagagagagccagagacatctggcagtctccagagattggtcagagggaccaagttttgtttatgaaatggaagcttatccttctaattcttttgcctgctcgtagaagatgagaaagggttgcatgtgtctagatctgttgtttactgttttgtgtatgtgtttagagctatgcaaaaatttagaaaagtgctagtgtaactggaaaagccctactgggagctgattgcaaatgcagctcttaaaggagcaggcagacttttgcttgtaatagaaagttagcttaaaattagtaactctgtgttagagtcattctaaactacatgtggcaggagcgaacccaggaaaacaggtctttaaagatacttcaaaataaggataatctgtgggccaggactctggcagagtgctcagactgagaaatgtttgcccttgggtagaggaggagctcagttcagagtagcctcagggaggtttgtgagacgtttcttttgttttgcaaaccgtgactggggaagttcctgggacctcacccacctctccctgccttcagggtagattccttaagattcagatgcagtatttttttaatacttaggtttttagctatactaaaaattgcggtcctgaaaatctaagaaagaaaaattgatttgcttcaaaattttattttcaaaagcttcgaggagatgctaattggttaagatctcaccttaaactcaccacaggaaaacttaagcctttgtcaggtgctattaagaaagacacaaattaactggcaaagaacaaaaggccttgcagaaaataaagaaagctttcatagttgttatcaattataatcaatggtaattacatattagctgcctattttagttattggttactgaatgtgctcacaacaatttcttggctggagaaaacattgttgtaaaatcatccttcttaacctcgaagtaaagtttcagaccctattgaggctgctgtgatgctaacaaagaattgtaagataaattcatgtattttggaataactataacaaattgtgtcttcaaaacctaagtgtctgctttttgttccaaacagcaattaatttggttattacagaatattaatatttgatctattgcatatcatcattttaaataaaattgacaatcattatcccaaagataagttaaaattgtttttatacatgtttttgtatcttctataaattcatgcatacgtgcatcccatttactgtgtttaaaatcagccctcttatgagagaaaagtatatgtgaatttgatcacacacttattattttgagcttccccctacttcaac

SEQ ID NO: 2582 - DNA, 1000 bp, mus musculus
ctgttgaccttgtagcaccaaggaagaggtgccagtagccactccagccactcctagtcccaagagcaatgaaaccctgagcacccaccatgaagggtttccttcttgttcaatagagggtactgtcccatctatctagaagctctctattgaagtagtaaataagccttgggatcaattggaccagtacacagtgaaagaccaggaaaaaattcagaccacctatcaccaagaatgtaggttagcccgattcagtgaccctattccaggaactggctgaccacaaaagttagattaaaatcttgagaacaatcttgagaagcagggagtttctccttgtgatttttagaacaccctttttattttttactggtattttcggcattttccaataacaccctccctacccccttgggttgtgtttttttttcctttaaatagccccttttccagctacctgggtccacagtcctctacccctgtgtggtgtatgactgtgggccccaagcgtgcctgaaataaaaagttctcttgctgtttgcatcaagaccatttcttgtgagtgatttggggtttctcctctcctgagtaagaatgtgggggagttctcactttgtgggtcttttggtgcattggccaggaaatgcaaccacccatctcatttgagaaccgacttggaggtaaggagatcccctcttgaatgtgtgcatgccggccgacatgtctgttctgagtatctgttttcttacttgtagtatcccacaagcctgaagcaggctgagccagaacttgaccttgctgccactaaggagattatctagggtggagccttcctcccgagatcactctattgttcagccactgttgctgtttctcatcaagatactgttacctgctgagaagcccccctgatctattccggagactttgccctatcctgcacgtcatcacctgcagctagttccaggctccaagcatgaattggcgggaatgggcctcc

SEQ ID NO: 2583 - DNA, 1000 bp, mus musculus
ctggtcgtcgattctcctctacaccactaggtgcatgagtttcgaccccagagctctggtctatgttccatgtgcttttttgctgttgttctattaaatcttgccttctacattttgagtacggtctcagtgtcttcttgggtccgtggctgtcccggggcttgagtgcttgagtgagggtctcccttcgggggtctttcagttccattatgttcatagcagccttatttataatagccagaagctggaaagaacccagatgtccctcaagagaggaatggatacaaaaatgtggtacatttacacaatggagaattgtcatttttaaggtcgcatttaggtgaccatactgttgagatttcatgagtgtagtctacttatcacttatttggagcatagatattgattttgcattttctttgattgttatgccgatgttctctattgaatcttctgcacctgagattctctcatccatctcttatatttgttgctgatgcttgcatctatggttccagatttctttcctagcttttctatctccagcgttgcctcacttggggttttctttttgtgtctacttccctttttaagtcttggatggttttattcaattccattacttgtttggtcgtgttttcctgcaattctttaagggatttttgtgcttcctctttaaggtcttctacctgtttagctgtgttctcctgtatttctttaagtgagttattaaagtccttcttgatgtcctctaccatcatcatgagagatgctattaaatcaggaactatcttttcgggtgtgttggggtgcccaggactgggtggggtgggagtgctgcgttctgatgatggtgagtggtcttggtttctgttagtaagattcttacgtttgcctttcaccatctggtaatctctggagagagttgttgtagttatctctgcttagatcttgttcctcaggtgtttatattagcctctatcagcagacctgggagact

SEQ ID NO: 2584 - DNA, 1000 bp, mus musculus
ggaactggagatgggtggtggaggagggggcagaatgatatgactgcccaaagagaggtggaaggaaaccaaagagagaggagtggcagagagaggctccctggaagaggaacagagtgaagaaagaaacagattgggaagaggtgtggaagcagggtgaggcatggtggcaccttctggctttcaggaaaactaaggaattcaggaagaaggatacacacagcagtgtaaagaggtatacagcaagggtgggcagggtgagacaatcagagaggaccctgaggacaggctcaaggacctgggaatccagaaggactgatgcatacctagtgatggagacattaaagaggtaaccctgggagaagcaattccaagaagaaaggctgtctgggtggtgagagataaggtagaatgatgggtaggtttgtggggtaggggagcctgaaggcccagggaaaaaatgtccttgtgagggcatgcaggtgcactgaagggacactaaaggccatttcaacagggactacttggacagtttcaaccacaaatcaacattgcatatatctcaggcctttctttttcagagtctgtgatagccagcagcctgaaaaagctagtaagagttcctagtttgctctgggcaaaggacaagtaatttttctgggaaatggtcccttactggatccagtaatagcagttttgtcactgtccttttcctgctggaattaaccttgctttcctagggggggaggggacgtctgctgattgtgcctcatgtctccacgatatagagagaactagcctgttcatgttctgtcacagctgcctgaagccacaggtggctccattccttgcccaggcaaagggaagctgccctttctggttagaatccctaaaaaacctatagctcctgacaccttctaggtatcttttattcaaacaagtttaccctttcttctaaaactgagagctaaccatgaaggaaatgtttgtacctctctga

SEQ ID NO: 2585 - DNA, 1400 bp, mus musculus
gcctgagagtcaatcctgtgcatggcccctaacattacacactggggatcagacctctacctctacccacggagcttgcttcattcctaaatcccttggctagcccaagttatacccaaaagactgggaccattaattcaagtctcatagatgacttgtccttgtgtccttcgtggttttagagaatcatccggtgagcaaacagacgtttaggtgatctttaaaaacgtggctacaaatttattatacaatatgccttcataataatattaaaatgggggagatgttgggagccattaaggcaacgctattgtcctgatctctgaattgggcctctccccctgagaagaaaagggggtcaaaagcgggccaccgacatatggattccgagaaccacgggaggttccagccctaggtcatcaccgatgtcctgaccacaccctgataccaccaagttcctgcttcccggtgtagctgccaaaagaaagaatttctattgcccccctcccataagtacttctccttttgcttgtattgccctacccctcccactgataagtatctgtacttccccctttgcttgtgcatttaaaccttggacctttctcaatacattggggtcttgatacaacttcagaacggtttccgtgtcgttattcgtacaagaccctcgtctctctctaccccccatttggttattaggaggatgtcccctcgagatcctcgaataactggacctgctggacaggtcaggttttgggagggggttaatctcaatggaccgggtgttaaagacttctgatgtgtatccttgggttaaatggttctagaactgtggtctgtatgtttcaggaacatcaggtttgctggagttgggtggggacatggcaggagaatggtgttctccctgagataacaggttgctctgggcagcttggtttgatcgagagggctcagagagcattgaagttgggttggggaagggaagaattcaggaatggttcaggagtctgatgaaggtagaggagaggtgttgaagagtaggaggctccctgggatagcaggctgttcaaggcagcttggcttggcccataaggctcagcaagcagagaagatgggtgggaaaagggattctatcctctattatccaagagtctgatgtaggtataggacaggtggtagtagaatagaagtccctcaggtatagtgaaagaacctagtggggaaacacccactcatatcccgagtcagacctcttacgactatcaatagcaggctgctccgggcagcttggattggctgagagggttccccaatttgatttttgataagttcatacccaataacatggctgctctggcaagcaatcatatccaaagtttttctgggtctctgtaatc

SEQ ID NO: 2586 - DNA, 1000 bp, mus musculus
tgcaggcatggacactcaaatacccacagtttaaccttgcggggctgtgggtgtagtggaagagcagggagggagagagcccgcatcccacccgagttcctgtgctctgggcaggtggccatgggaggactgccagatacttttcacacagccctgggtgggcatctggctgtgtgaagccactgaccccacatggcagggggtggacaagggcacgtccctagtaccaggttatcagtctctggcatcccatgctggatacagtaggaagaaaagctaagaacagaataggtgtgcccagggcagcaacataccctggagatatgggaagagggcagggggagagaggttcccacacaggtgagagtccttagtcctggccttgatgaacagaggcagtctatggttttagagctttagtatatagaaaggcacggaggaagagagaaggtgagagagagagagagagagagagagagagagagagagagagagagagagagactggccatggccaacaggagagaagggggaaaggaaagagagaaagagagttagagtgtaagaaaagtgaaggcttagagagagagggcttagagagagactaaagaaagtaaaagcttaaaagagtaagagagagagagtaagagggagagtaaagaaagtaaaagcttaagagagtgaggagtgggccaagcagcccctcttatagtggacttgttatcttgttgttgctaggtaactgggagaagtctagcctgaaggtcagaagcttgggacattgtgtacatgactgctagccactatcctctcttgtggggaatgtgggggtggtaacttcaacaggagccagggggccagaagacataagggaacgccttctgtcccatgtaggtgggaattgccacccatcaggttctactagaattcagacctcaactcaactggagaccagcttgtctgtgtttagcccaatgtccccacataaccaagtcttctg

SEQ ID NO: 2587 - DNA, 1600 bp, mus musculus
tcaatatggccaagtaccatgttttattagagttatttctgaattagatcattgaacaggattctatcctaaataacaaattttatctaaaacattttctagaccaaaaagcatgctttgagccctccttaaataaaaaggcccatagtgtatgaaactaatcaaccatagatcctatatttactccaccaatcctcaggacagtttatgctctttgtcctagttgggattttatttatgtgaacagacatcatgaccatggcaagtattataaaggacaatatttaattggggccggcttaaaggttcagaggttcaggccattatcattgtattagtcagtgttctctggagccccttcaagatctaacacaaaagcctatgactccagtgtcaagatccaaaccaaaggcacattatcttcatgcttcaatatcgggctcacaggtttgccctccatttctagattcaagttcattgcaaatatactcaagttggcaaccaagaatagtcatcacaatgtgtaaggagagagtaaacatccttatattcctctgtttagtgaaattgcttagagtttttctccatttaaattgatattggctatatataggcttgctgtaaactgcctttatagtgtggaggtatatccagttttacccctagtttcttcaggactgttattttgaaagaattttaaacttaggcagtttgtgcagcaaagtggtagtaaagcacatctttaatcccagcagctgggaagcagaggcagttggatctctgtgagttcaaggccatcctggtctacagaatgagatccaagactgcctggactacacagagaaaccctgtctcaaaaaccaaaaccaaatgagataaaacaaacacaatttttttttctagatctaatgaaatgatcttctgtcttgtcttttagtctgtttatgtggtagatatgtattagatttacatatgttgaaccatctctgaatcttcaagatgaggccaactttattatggttgataacttttgatgtattcttgaatatgttttggaagtattttcttgagaattgtatttatgatcataaaggatattggcctataattttatgttgagtctttttgtggttttggtaacagtaattgccacacccactccagtaaaaactgcatggcaagcccaaaagcttggacgcagacccaagccaaaaagtttcataaaaacttagtctcctggagcattggcctcccatagcacgaatgctccaaacttgtccttgcattagtctgtgaatggatctgtgtgctttctttcagttttgttttattatatgtgcctccaatgaatgatttgtcaaatacctaaattaggttgaactttgctttctggcctccaccaatgtcctaggcaattcttgagctgaccctgtgcttacaatttagtaagaatgttacttattcacacaaattgcctccaatattgaaagagagttagtggatgaaatcaggcattactatctattacatagagttagaaatttcagagcaagcttagcaaaataagtttaaaattcttattatagctatgtatggcaga

SEQ ID NO: 2588 - DNA, 1000 bp, mus musculus
tgtataccttatgtagatgtagatagatcaaaaatccctttgaatgaaaagggatgataaaaactgctttgggaagatagcaaaggactaacttgggcaaacactgaaatttccagaggggcatgatcagataccacatatcttggcgtagctgttggagcttttcgtccacctcgtgcaaatggtgagtatcctggagctctatgtggggatagcaaagggtctagagtcttgtgtagttatctaacttatcagagactcatgggaagatttcaaatttcctgacattttttgagcatgatgggtatatccttgaaacacactgggaaagatggtgaatatgctactgtgcactgtgtagaagtgaactgtgttcctgtaccttgtgaatgtcgggaaggagtagaaaccccttggacagattgagaatttcctagagaacttcacatagaacatcggttccaaccaaatgcaccgggcctgagacagcagcagggaaacagaaaacccatctgaccaggggcacaagtcccttccggtcggcgccagctccaggtcaccttgggcatgaatcaggggacagtcctatagtccccagaggactctccacacaatcttaggataactggtgagtggaacacaacatctgttccaaaccaattgtgatgggcctgtgacagcaggagaaagcacacaggagccatgcctgagcagctgctggggttccttctgatctgtactgggatacctttgtttcaaacacaccagacagccccacagtcctcagaggagacacccatccaggtgctgttacacgcccaggatcttaggatttcaggatcccaggataacaggagcttggtcacaccaggatctcaatctcagaggaagcttgactgccaagaactctgacacacccagaatctcaggatcacaggagcctggaatcacagaatcacaaagaaagctggactctgaggagtcctgaatcaactgggat

SEQ ID NO: 2589 - DNA, 1200 bp, mus musculus
acaggattaatttgacgatgaaacaatgatcaggagaaggacagattgtggcacagtggagactacccctactgttgctaaatacagacctcataaagaaatctgatgtcttctactgccaattcaaattgtaaatcaccaaggaagacaaagcatttatataccaacagctcgatactatgtgtcttgattagggtttttctgctgtgaattattcaccatgaccaaggcaactctaataaggacaagatgtaattggggctggcttacaggttcagaggtttagtccattatcatcaaggcaggagcatggcagtgttcaggcactcatggggctggaggagctgagagttttacattttcttctgcaggtggccaggtgaagactggcttccaggcagctaggaggaggctggcttccaggcagctaggacaagggtcttaaagcacatgcccaaaatgacacatttcctccaaaaaggccacacatacttcaataaggccactcttcctgatagtgccactccctgggccaagcatattcaaacaacagttcactcaatgacccctataggcttgttcaaacacaatctgggtgactcttttacattaccaagtcagctacactcaaggtacagccttggctgtctctggaatacagcttctttgtgttctcagaatagctccagctaaccagtgccaattgtcccagtagtcctttctattttttactctaacaccagagccacatggccaaagttgcagcgttctggtgcttgctggggctggactctgcacccccccaaatacacacacacacacacacacacacacacacacacacacacacacacacacattaccagctttctgtttcccaactcccgcactgccaaggcttggctgtcctggaacttgctctgtagattgaccttgatctgcctggcactgtctcttggattaaaggcatgtatcaccacacctagattaaagcaagtggcttcgataagatattatcaaacagagtggactctatgcaagacattatcagagcaggctcccctgaaagacattaacaaaaaaaaaaatggctccattgctacatgtcatcaaaggagagagggcccatctttcagaagacagcaaagttcagtgtctgggtctgctgtaagatatcatcaaacagtgcagcccctctgc

SEQ ID NO: 2590 - DNA, 1000 bp, mus musculus
aactatacataaaaaaaaaatatccaggttctgtgcaccctgaaaccacagtagtttcaggctacacaacaaagaacaaacagggccagaaacatgtatgtgtaagttttgtccagaatattgaggtatgtcttttgggtggagaagaacccctcctctggcatcaagaccccagaatattcccaccctagaaaaacaaccacctggagatggcctagttcctaggggctattcctagtctctgagtggccagagcctgttgtaaaatgtttgctcctaaagaccagtttgaccacatgcctgcagaggggctgcttatctgacagtatctggatagagactggcgcctgctctcgaccctttgaccttccagcgaacacattaggaaggcccattcaagagaaatgcagggaaccttagcaaggtatggcgatttactcagtccttcacagttttaaccagtctgtccaggactaataaccccccatcctcacccaagctcctgaaaaggcacaccatggacacatggcagactctaactgagctttctgtgaacactcaaaggaagagacctggtggatcaccttctctgtttaatttctcttctctatcaagtaacaggccgctagtataaactactaggcctagaggaaagacactctgtgttttgagaggaggtggtctcactgtggttctggttttctgaaaatcaccatgtaaacaagcctggcctgaaactcagaatccacttcattctttcccctgaacgctgggatgaatgtcgtgaaaagacaccccccaactaaacaagagatattctaaaaacacttgagtatcatctccagagcttttcttcttcagtacgagtcgtttggcaaagttgaacgtagacagtaatttatccaactgcgaggtgggtcgccacgtgtgcatccataccagcttgagtaccatgcggtccctgcaatgatatcctgctccttgcagcacaaacctgttt

SEQ ID NO: 2591 - DNA, 1000 bp, mus musculus
atttggttttttactttaatcgttttttattttctatcctaagacctctgtgttcagatccatagaccctctttcttttcttttctttttaaattgggtcacttgctatcttgattttagtggtctgtcagattttactttgtttaggtacactgtggctgtcttcagacacccccccccacacacacacaagagggcattggaccccattacagatggttgtgagccaccatgtggttgctgggaatcaatacctctgcaagagcaatctgtgctcataaccactgagccatctctgcagcatgacattttttttctttgacacctgtatatgtaggaatgaatccatgatctctcttgtcactatgtcttattgttagtgtatacaagggcaactggattttgtaacttggttttgtatcctgccactttattgattttttaaatatatgcctgtatttggcttgcaagcatttttccctttaattctcaacatcatgtaaaaagttcaggcaatgcagttgcggagacatctccaaacccagggctgatggagccgggtgtcaggtgaagattcaaagatcccgggagtcatgcgatgtcctgagacgttcagtgatcgaatttgttggatgtcttattgaagagtttgttgaaggagtgagggacctggagtggctaggaactccatagttggaccaacaggatcaagtcactcttgggagctctcagaaaatgaaccaccaaccaaagtgtatacaccggcgggacttaaacccccatatatatgtagcagatgtcctacttggaagctacctggaggagatggggcagctaacatgatataaagtgaataaataaattaatggaaaaaattaacaaaaaaagaaaaaccaaaccagagtgcagttgacaaagacacctgacataggcatctgacttccagtacacaagcatacatggacactccacaccaacacatgcatacatatcccttggg

SEQ ID NO: 2592 - DNA, 1000 bp, mus musculus
tgcatttgtgcagctgtttctggggggtgggggcacatgtacacagttgcctgcggccacagtgtacttgtgaagatcagagcaagccttgacggacttggtcccaggctaccaggaccttttaagtgctgatccacctcactagtcccgagaaataaaatgataaatcaaaccagacacaaaagaaatgttacaaaatctctcagagctggccacacagttccaaattcccagcaggaagaagacagaaacaacgggtccctgcaagttccaggctatccctgctacagttgggagaccccgcaggacacaatcagaaggaaagagatacaaaacaacaacaaaacaaaaaaaaaacccaacaaaccataaaagaaaaccttggcctaaaggagcagcagaaaacctcctggcagtgggctggttttagtctcataactaagggtgaccttgaatgacctcttcctccccctttaagtacagggtcacagacatgcctattctgataaacaagttatttttctctgtatacttagggttcctatctgcagattgggcctcagaactcaccaccatagcccatgcttggccttctgagtgctgagaccacaggcagaagccaccatacccaacactgaggcttgtctttagggacaatagtctgtaggcagggcacacaattttcagagaatactaaaaccagcagtaaagagaaaggtcgcactgatgtgtttatattaggaaagagagagaaatatgcacgatacaaagatgtatcagcacattgagtgactgtcaccacgtgtcaacccaaccacctctcgggcttctgaggcctgtcctaacagggcctcacctagatccgcagactctgacaaaggttttacttgctccaagtagatactacaagctgcacagcctttagcatagctcccactcccatcccagagccctgggacagcaaggcagggtctggcaggctggacgactgctcttagtt

SEQ ID NO: 2593 - DNA, 1200 bp, mus musculus
ctagacttgggaatctgcagaaggtgctagagtaggagtcctgatcacatacagggctggagtggtactcaggctgtgtaaaccaagccaggcctatcagcgtgaggatgctgctgaagggagagcctggatcactaagagtacttaggaaactcacttctgtcctctggtgttcacacagtctgaccttaaaaggtcctggaattattgctatggtgggtaactgtggaatccagggtaatcatctctctgggctgatgcaaagtctgcctgtgactgggagaccacacctagaccaagcaggtgcagaaaggcatggtctgagtcactactaaacttgactaagccacaatgtgcttgctccaaattcaccctaagggtttcagtttgctgcagaagagtgaagtcttctcaccaaggagagagacaggtctaaaaggacagtctcagcaggacagactgatactcaggctgtttcagcaatgcatagacctggaacaatgagggtaacctcagagtgaaggatcaggttcaggtactgggctgggtcatggtgtacaggctgtggcacacaagcaagaccacagacctctcttgtgatacgggaaggatacgatattgggttgtcatcaggttgggatggtacagtctggttgaccacagttaggccacagagtgtgaggacagagtctgaggagggcactggaaagtgagtcttgacaactcaccaggctgggttgttgctctgactgtgagcataatgatggtagaggccggttgggaatttggacactcactagggtgcactgcctacccaggatcttggggtttctggctagtgtgagctggtgcagggtggcaggggtctggctccacagtgggatgcttgaccaaacatagcctgggagtttgaggatggtgaagctcagtaggctggcctataggcctgggttcttaggagaacaacagcagggcatgctgttgagctctccctgggcttggatgtgctgtagtttatgtgaactcagctacgctggggagtgtgtctgtggctctgacagaggagattcttgaaaacttactgcgcatggatggtgttcagcctgtgtggcgccatcgaggcctgtcaagtacactagtgacaccatggactaatgtatagtttaatgtgaaagctacaaattaatcttagattgtaaa

SEQ ID NO: 2594 - DNA, 1000 bp, mus musculus
atcaatttgagtgatcaaactgtttgtcatcttagtcgctaattagacagatatgagcagtgacaaagaccagaaaggtggactcatgaaaatgcaggtagggcttttctgatcctcccatcatttcttctcttgaagatcataggtgtttcttcccaccagcctagcagagaaaatcgctgggttttcttgaagaaagtatttagaggagtgatggctctttacaaccctgaactgcccccatcccaagccctgtcctgtcagaaatggatgaagaacatcggggtcaccacagccctccacatggaatgtgcctccttgtgggggttaattacgttttaaatagaactgatgtgtggggagcaggcttgcggactcctctttcagtatgtgtggggtttgcaggctttctgctcccctgagtcagcggcttcaaggcaaggaggaacgagggtggagatgggcctgaggggttaaatccaacttcagcttgaaccacaagtgttcatgagttgctggaaggatcctgcccagatacccaggagccacttttgtcagagttcttcattagtaataaagtgcacacttgcctggtatgtgttctgggtagattttaattcagatatttgtttagaggtggcagctccaatcctcactgcccttgacatcccaactaggtaaagttcagtctcatttcctattggaatgctgctcttgtgatgattaccaaggattggaggcacctgtgtggggccttcaatccattgttttcccagtgatcctcactatctagtactgcaatgggcccctgaaagtgggcatatctgtccttgagctaggagagtgaggcaagtatttcttccctgatatctggtggtctaagaaccttttgtaggacaggaagtcattttcctgaggttctctatgtgtgatgatttgtatatgctcggcccaaggggtggcatggttagaaggtgtggtcctgggctggcgagatggc

SEQ ID NO: 2595 - DNA, 1000 bp, mus musculus
ggaaggagttacagagacaaagtttggagctgaaacaaaaggatggaccatctagagactgccatacccggggatccatcccataatcagcctccaaacgcagacactattgcatatgccagcaagattttgctgacacaatgaggctatgccagtgtctggcaaacacagaagtggatacattcatctataggatagaacacagggcccccaatggaggagctagagaaagtacccaaggagctgaaggggtctccaaccctataggtggaacaataatatgaactaaccagtactcccagagctcgtgtctctagctgcatatgtagcagaggatggcctagtcggctctcagtggaaagagaggcccattggacgtgcaaacttttatttccccagtacaggggaaatccagggccaaaatgtgggagtgagtgggtaggagagcagggcagggggagggtatgggtgactttcaggatagcatttgaaatgcaaatgaagaaaatatctaataaaaaattggaaaaaaaaaagaatgaaaagtcttacctcttagagtgccctagtaatgattcagaggtaaactctttaatccaggtataggatagttgggaatttttatactaataaacaaaagaataattctttgtctttaaaacaagccagtaattatggctatcagcaagaggctaggaccgtcctactcacttcatgtgtgcgtatgttgggtaagtgtgcacaggcatggaggtcactggctgtactgctctacgagaacagacctagtcctttgaaatagggtctatcattgagcccagagctaggctggtgtccaggaatcctcaaagattctcctgttccctacctctaccccacccctagccactggagtcatacatacacgcaacattttttacatgggtgtcctaacaactcaggtcctcatgcttgtgcctcttaccctctgagccttcctccccaccccttcaatttatgt

SEQ ID NO: 2596 - DNA, 1000 bp, mus musculus
aagtgaagaggtgcaatgattcattgttaccaaaagagtacaaagtagattttgatgatcagtcttcttccctcatatgcacagagtggttgacatctctcaaaaaactacagtatatatgttatacagtgattgtagtcatttattcatcaaacattttaatttgcattacatttatttattcagtgtgtgtgtgcaggcatgcatgtgaccacacctgtattgggtgtggatctgtgttgggaaagtggatggggggcggggggcaggagagcaagtgtgggggagaggaacctgatctggtattgggtgagggaaaaggactgaagccctagggccatcagaaagaatgtaaacaggaaacctcagaaaataagaggttgggggaccctccagaatgcaccagagacctgggaggcaagagactttcaggaatcaaagggagggaccttagatgaaatgccctacagtaggaagagtgaacttatagagcccacctctagcaagaagacaggacatcaagtgatggatggggatgccatcccacagtcacatttctgaaccataattgttattgtctaaaagaattacagggatggaaatggagaggagcctgaggaaaagaaggtccagctataggtccaaagtgggatccagctcaaggagaggtcccaaggtctgacactattactgaggctatggagcactcacaaaaagggacctaacatgactgccctttgaaagacccaaaaagcagctgaaagagtcagatgcagatatttgtacccaatcaatggacagaagcagccaaccactgttgaattagggaaggctgaaagaaggtgaggagaatggtgatcctgtaggaggaccagcagcctcaattaatctggactcctgagatctctcaacaccaaccagacagcatacaccagctgatatgaggtccccaacacacatacagtagaggacttctgggtctgtgttcattcagagatta

SEQ ID NO: 2597 - DNA, 1400 bp, mus musculus
tctacctgtttggttgttttttcctgtttttctttaaggatttgtaactctttagcagtgttctcctgtatttttttaaagtgagttattaaagtctttcttgatgtcctctaccatcatcatgagatatgcttttaaatccgggtctagcttttcgggtgtgttgggtgcccaggaatgggtgaggtgagagggttgtgttctgattatggtgagtggtcttggtctctgttagtaagattcttacctttgcctttagccatctggtaatctctggagttagttgtcatagttgtctctggttagagtttgttcctcttgtgattttgttagcatgtatcagcacacctgggagactagctctgtcctgagtttcagtggtcagagcactctctgcaggcaagctctcctcttacagggaaggtccacaggtatctggcgttcagacctgcctcctggcagaaaatgaaggcctgaaacagggcctttcctagatgctcttagcctatgtaacccacgctctcacctgcgcagactagtctggaagcgatctgggaaccaaactggctccagttgatgctgttgcaaagccctcccaggcagggcagacccctctcctctggcagggaaggtgcttagatgtctggagcccgaaaaggggtccgcctcagcagctgtcctctagggaccttgggggtgtctgctgactgtttgcccaaggtgaccgtgtgctggcgctgactggaagggatttgtgaccctggtcaggctgggttttctgcttccctaatgctgtctcatgtcctgagcgagtggattgaaacagaagttgtgttccactcaccagaggtcctaagttcgcattgagagtcctctagggacctttgtggtgtctgcagactctgtgcccaggtgacccggtgctgtcacagacagtaactgaggtataactggatcttaaggtagattgagccccatctgcctaaggaactgctacactgatttccacaatgcaccccctctttttgagttcaaaattttctagcttccacaaataacttagaacccatagactatgtctttcttttcaggttttccaaatctatccatactattgtcacttgaggcatgtatttcttccattttaaaggctgaatagtattccattttgtgtatttacattttctttttcaatttatcttttgacagacatgggctaatgacgtaattggaagtacttcagttaatttcagagtttaggtgtatctttgacatagtaatttcatttcctttcaatgtatatacgaagggggaatttttggggagtatcatgtggattgcagactcttttggtgccaagtgttatttaagttcagttctcttttctttttatctgtcta

SEQ ID NO: 2598 - DNA, 1200 bp, mus musculus
aatcttctactaccatcataagatatgattttaaatgtaagtcttgctattcaggtgtattgggatatccaggactcattgtgtgggtgtattgggttttgatgatgcccagtgttcttggtttctgttattaagattcttattttgcctttcaccatctggtaatctctggtgttaatgttctagctgtctctggctggagcttgttcctcttgtggttttgttagcctctgtcagctctcctgggagtccaaatcttccctgagttccagtggtcagagcactctctgcaggcaagctttcctcctgcagggctggtgtccagaagtctggtgctctgatccacctccttagttcaggggtcagagacctccttatagcttgactctcctctgacaaggaaggtgcccaggggtctgggtcttagctctgcctcctggctaagcacgaaggcctgaagggaccctgtccaagaagttctgttgcttctgttgcccaggtgctctccagtgatcaggaggtcctgggtgtgctaggggtcctgcagggtggagagtcctctggggccctcgatacccttgaccagttcatgtggaagatgccggggctggccccgacctgaatggatcccagcctctgatagggcagggttcttttgtccctgtttgtgttggcagaagacccttctctattctttggagctgatgttgcattccactcacctgtgatccagaaatcccaggagtgataggggtcctgtggagtggagagttatctggggcccttggtgccctaggccggtttcacagggaagatggcattgctggcccctatggaaggaataccagcttctggtagggcagcgttcctttgtccctgttcctgctggcacaacaccctccaagattctttggagctgatgtttcattccactcacccatgatcccactataatactgaggtactgcagtgtggagagtcctctggggtccttggtggcctctgccaggtttaggcggaagatgatggggctggccctgaccagaatggatcctatttatttatttattttttaaagctctctatgaagttatgttgtgtgttgaagtttttaattgctgctctagaagttcagtttattgaaggatactggaagacttcatggaggacaaaaaaagcaatctaaatccacagaaaggg

SEQ ID NO: 2599 - DNA, 1000 bp, mus musculus
gagaaagttcaaggccaaacataccttgtaaagctatttcccactttacttctgatagactgtcttgaatttcgttagaaagttcaaggccagacataccttgtaaagctatttcccactttacttctgatagactgtcttgaatttcgttagaaagttcaagaccagacttaccttgtaaagctatacttacgggtaccctgttccccagctgaagagttctgaattcacgcagttgaatccttctcaacagtctgttttatgggaacacttcattaccaccattccccagctgaagagttctgaatccaggctggatccttctcaacagtctgttttacgggaacacttcattaccatgacccgaagttctggttccggaatgagggatcttccttgcgccagtgatggtaaccgtcccaggttttctcgtccaggatttctcgtcccaggtcttctcgtcccaggtcttctcgtcccgggtctcagcaccaactcttacacgcgttctcgcgaccggccaggaagaacacaacaaactggaatcttctgcggcaaagctttattgcttacatcttcaggagccagagagcaagagagcaagagagcaagagcaagagagagcaagaaagcaagaaaaagaacaagaacaagaaagcaagaaaaagaacaagaacaagaaagcaagagcaagaaaaagaacaagaacaagaaagcaagagaaagaacaagaacaagaaagcaagagcaagagcaagaaaaagaacaagaacaagaaagcaagagcaagagcaagaaaaagaacaagaacaagaaagcaagagagagaaaaagaacaagagcaagaaaacaagaaaaagaatggcaaaaccccgtcccttttaagaagaattatcctctgcctaggacgtattactccctgattggctgcagcccatcggcccagttgtcatcacgagaaaggcagaacacatggcgggaaaactgcccctgcatgtgt

SEQ ID NO: 2600 - DNA, 1200 bp, mus musculus
attattattattaagagtttttggtacagtgatctgtaccaggtactgtctgaactctgaaggcacaactgagaaagaaccagtcttgaaattccagccacttttctttatgatgaatcaggaggatgttgaagaagaatgctctcaatgatttaaccagatccccaaaggggaagaaccacacaaaatgtttcaagtgcttagcatcctgtgtaacaaggtgctagaatatctgggcaaggacacatgctgggagactgaaagctaatgtcatgggagcactcactcacttgcaatagtgaaaggatactgctgcaagggctgtgaaattattccattgttgaccatcacaccagtgcacttcaaagcatacattctgtaggaatgggctctggggtgagggatacagagcaaccaacttgggaaacagactccagagactagcattgaatgcagagctatgttattgtgcagcagcaaacatttttatacggccatgccaggctgcctgctcaggagagggacttctgtacagataggggaagcaggcatcacccagtcccaggcacaaaatgaggctcattagcttgctaggaaccttttatcttgtatcccacaatatgccagtggacgtgggtactcatactctcacagtggtatggaggcctccttcactgcctaccaggtctaccctggggctgcagcacccacaatggatgttgttgctaaaacaagtgtgtagtgtgggaaagaaagggtgtagtctgtataaccttctctaaccaatactcttggcttggatagaggacagtgagcctgctaaggacactgagtaccagttgagaacaaatatgtgcatttatgtggtagaacaaaactgaactgcgactcagaacaaaccagcagaagacagaggagccaaagaagattcaatttgcaaaaccagtaatgatgtcctgtgttttcatccttccaatacaagtatgcagtatggctcaactttaactacgtatgacatcagttctccaaagctgaattattttcttaaaacatagttaagagcagtgagatgactcagaagtgttttgtcaccacaagcatgacatcctgtattcaacctctgaaacccaaagtggaaggagagaactgactcctgaaagttgtcctgtgtcctccacatgtatgtcatgataccatgac

SEQ ID NO: 2601 - DNA, 1200 bp, mus musculus
tgccttttgctaaaagccaaaggttttatattttaaccaatcagaaggcactgtaggctggcaaggaaggaatttctctttctttttttctttctttctttctttctttctttctttctttctttctttctttctttctttctttctttctttcacctttatctgtatttattttatgctgaatttattcccgggccatgagtttttgtttcttcagtttcttctgggatatctttttcttctgtgcaagctcctcttctggctttggaacgatctgttccttctcagtgaggatcatctcaatgtggcagggggagatcatgtatgggttaatccggccatgagctctgtaggttcctcggcgcatcttaggtgccttgttcacctggatgtgttcaatgactagagattctacttctaaacccttaagtctagcattactctctgcatttttaagcagcaaaaattcaacactcttttttggccaccgactctgtgtccagccccaccatttggcctgagcccacctactgactccaccattataccaccggaatggcacacattgcttctttaaagtgacgtccttcagatacttggtggctttggggatatgcataccctcgatggcctggacagtttcctgggtgttcttaaagtgaacacgaaggtttgaacctcttgatttgcatgattttgtggggttttctgggtcaagagagtagcgaaccatcttagcaggtgacctctggctgcttacaggaagatgccagttgtggtggcacacgctggaaggatttgctgaaggaggcagaggcaggagaatcacgagtttgaggccagcctgtgctacataatttcaaacagtatgcaaaaacatcactgaaacagtcccctgagccctgggaggggagggatttgatggagacatccatttagtcctgagtgttcaccctctccaaaatgtctgtctatgaatctctctctctctcttttttaccccatatctgctgtaggagaacacttctctgatgctggctgaataagacattgacttatatctctctttctgtgtctggaatacccagatgattttttttttcttttctaattccatccctttgggactataaattcatgatgtcattttttaacagctgaataacactccagtgtgtaaatggaccacattttctctat

SEQ ID NO: 2602 - DNA, 1000 bp, mus musculus
tgcatagcccattgctccacagggctcccctcatagtgatgccaaatagtgcaatattctgctacatatccagctggagccatggatccctccatgtgtactctttggttggtagtttagtccttatgagctctgccggatctggttggttgatattgttgttcatcctataaagtcgcaaatcccttcagctcctttagtccttgccctaacttctccattggggtccccatgctcagtccaatgtttggctgtatacatccgcatctatattaatctggctctggaagagcccctcaggggatggttatattgggctcctgtcaataagcacttcttggcatcagcaatagcgtctgggtttggtgtcagcagatgggatgaatccccaggtggggcagtctctgtatggcctctccttcagtttctgctccactctttgtccctacatttcctttttacaggaggaattctggattaatatttttgaggtagataggtggccccattcctcaactgggggccatgcctatccactggaattggtctctacaggttctatatctccttggttgggtatttcggctaaagtcctccctgttgaacctcttgggaacctcttgggtccctggcatctgggactttttagtggctaccccctgttctccctctccctctcccactactacacacctactttcaaattcttgaccctctgcacttctcccccatctcctcccctatctaaactggcccccttttctctccccctcctcgctccgctccctcccagatccctctccctctacttcccagagattattctcttcccactactgagtagtactgtagcatccacactttggtgtgatcttctttcttcttgggtttcatatggtctgtgaattgtattgtgggtattctgagcttgtttttggctaatatccacttatcagggagtacaaggatatggggaatgagcggtagacagaacaagggc

SEQ ID NO: 2603 - DNA, 1400 bp, mus musculus
atctatctaggtaaatgttttacctgtcatagctacatattcacagtgaaaatacttgtgcactctgccatttttctagaatataatgttgtttgttattaagtgcagtccaaatgcctctatggtatgtatgttttaactttttaatctccaccatcctctagttatccaatactctcatagccatcattctatgtacaaaattgtgagatgtatatacatgctgctgtatttactgcagcactaatcacaataggcacgatatagaaaattcaaatttcattttacttttctctatgagaaagatcatggctgtgtataaatgttcctttaatttcctcagattaagggatgagagccatactcaagctgtgcaaatccgctgcttgggctgagcccagcatatttccttttctgttctatctattcctaggccaaggactagaggcttttagtgtccatctatactatctagtttctcaagctgactgattcaatccagcctttctctctctgtttctacctgaattgctttgtttggcctcatacttactttggcaatatattctaatctcctgactcttcattttctggcttattctttgctcatcagtgtctagcttctctctgcaacctgtctctgtaaaactgtccctggaaaactcctgtagccccccaaccccactcctatgtagcttctctttcctgtgctgttctcatgagagttgggcatatcctatctctgactcattctgtcaaatctttctcctctcctcaattagacatcactttcaaacatggctgcttccttttacaaactcaccttaccttcactgttaggaattaaaattgtttgtattctaggcagatcatactgcaattcagagtttgtctgtcttccaattggattatataaacctaaaagatctttgtatgtgaccccttgccaatgcagcaatattgctggtttaaaaattttaaattcgctgggcgtggtagcacatgttttttaatcctagcactcgggaagcagaggcaggcagatttctgagtttgaggccaacctggtctacaaagtgagttccaggatagccagtgctatacagagaaaccctgtcttgaaaaaccaaataaataaataaattaaataaataaataaataaataaataaataaatatttaaattcctccacagctatgtccacttcttaacttactggcccctatctaatgactaaatgcttcatggtagcctcctctcagtttctcttctccctagcatagtggcatggaagttactactatctgtagtttccaatatcttcaataaatttgaaaaactgttgttttcaaataattttagattcatacaaaatcatatatagttaagaaaggtatca

SEQ ID NO: 2604 - DNA, 1600 bp, mus musculus
tctttattgtgtctacttccccttttagttctagtatggttttgttcatttccatcacctgtttggatgtgttttcctgtttttctttaatgatttctacctgtttggctgtgttttcctgcttttctttaaggccctgtaactctttagcagtgctctcctgtaattctttaagtgacttatgaaagtccttcttgatgtcctctatcatcatcatgagaaatgtttttaaatctgggtctagattttcggttgtgttggggtgcccaggactaggtggggtgggagtgctgcattctgatgatggtgagtggtcttgatttctattagtaggattcttacgtttgcctttcgccatctggtaatctctgaacctagctgttttagttgtcactgttaagagcttgttcttcaggtgactctgttagcctctataagcagacctggagggtagcactctccttggtttcagtgggcagagtattctctgcaggcaagctctcttcttgcagggcaggtacccagatatctggtgttcgaaccagactcctggcagaagttgtgttccactcactagaggtcttaggatctcgtgtggaatcctgtgtgggcccttgtgggtgtcaggcgactctgctggcaggtagtccggggctcaagtcgagcggaagggacttgtgccccagatcaggcctgggtagcctgcttccctatgtactgcagtctcaggttccgcgcgattggattggggcaggagctgtgttccactcaccagaggtcttagggtcccgtggggagtcccgtgtggacccttgcgggtgttgggcaagactctgctggcaggtagcccagggctcaagtcgagcggaagggacttgtgcccgatattttcttttttattgcaagaaatttaatacaatatatttcacagaaaatttctgttaattgattttaaaagcatttatagctttagatgaaatgacctactggttcaattactcttctcctagtcaaactcctagataaaaggtgactgagatttgatttgtgggtgttttgggtgcttgaaggctgttttgtacatgtgacttttgtcaaaatttataaaaatcttaaaattaatttttattacacaatgaatgcaattcaacgttgaaacagaagcatttggtaagaccgatatggaaaatgtctctcaggaaatcaaactaatatgatgatctttgtacagatctttgttagttccatctgcactatcaaaaattatgtactgatatttattctatataaaatattccttatagcacctggaaattttcagagactatttgtaagcaatcgtaatagatgtgtaataaattatccatacctttgattattaaattattatttcaaaatatttcttaaatttatattagctaacaggaaatatatttattgaagaatagaagtgaataagcaggtatagagagacatttggctcgtgaggtagaactagtcaatctttgttactgcagccatgctgagatgattccccctccctttttttttttcattttggacttctgcaagagattttcatgactaacaaacaaaaatg

SEQ ID NO: 2605 - DNA, 1400 bp, mus musculus
ttctttaaggaatttttgtgcttcctttataagtacatctacctgtttagcagtgttctcctgtatttctttaaatgtgttattaatgcccttcttaaaatcctctaccaccatcatgaaatatggttttaaatccgaatcttgctttttggttgtgttggggtatccaggactctctgtgttgggagtagtgggttccgatgatgctgaatggtctgggtttctgttagtaagattctttagtttgcctttcgccatctggtgatgttagattttatagctggttctggctagaacttgttcctcctgtgattctgttagcctctgtcagcactctggggagtctaactctctcctgattcccagtggtcaaagcactctctgtaggcaagctctcctcttgcaaggaagattcacagaggactgggtctcagctctgactcctggctgaagatgaagtcctgaagggcccctgtccaagaagctctgttgctactgcagcccacaggtatctcctgctctttgagagacccgggatacaagatgctgatcttgcctgagtcccagggtcagagctctccctggaggccaactttcctctgaaggggaaggttcacagagttctggatctcagctctacctcctggttgaggatgacggcccatagggcccctgtccaagaacctctgttgcttctgcagcccacgtgctctcctgagtggactggtccctgagggacctgggatacagatggggatctcacctgagtcccagagtcagagccctccttggaggcggactctcccctggtggggaaggtatgtagaggtctgagtcttagctctgcatcctggctgagggtgaaggcccgacgggcccctgtccaagaagctctgttgcttctgaggctcatatgctctcctgtggggattagtcactgagtggcaggtatacaaaatcatgatctcacctgagtccaggagtcagagccctccctggaagctgactctcctctggcagggaaggtgagcagaggtccatttttttcttttagtttgtttatactgtggattacatttatggattttcatatattaagcatttctgcatctatgtgatgaagcctacttgatcatggtaaatgatgcatttggtgttttgttcttagatttggatttcaagaattttattgagtattcttgcttcagtgttcataagcagaattgttctgacatactcttccattattgagttgttatgtggtttaggtatcagggtgactgtggcctcatgaaattagcaagtctcacaagttgattgaaataaccccttgcatcttatcagatcaccatgtgttaaggttggacttcaatatcaacagcaacatcagaaagacctca

SEQ ID NO: 2606 - DNA, 1200 bp, mus musculus
agtatctgcactgttaatgttctgtcagaatgttgtctcatatgccaatacagtcaaggttattctccatttctcttctctcaggtagagtgtgcttcattttatgttgaggtcttcaacttgcttggacttgagttttgtgcagggtgataaatatggatctatttgctcatcacttcccagatctttctgacctctgcctagctggttcaactcagtgatcttgctcaaactcctctccaagttgttttattcagtctggtttctctaagcttctcggttaatttttctgtttggcctcaaactaattctggcaatttgttttaatcttctgatttcttattctctgtgaatattttgtcccttcttctaagtgggattgaagcatccacacttgggcctttcttcttgttaagtttcatatcgtttgtgacttgtacggtgagtattatgtatttttggctactatcctcttatcagtgagtacataccatatatttcattttgggtctgggttacatcattcaggataatattttctagttccatccatttgcctgcaattttcatgaagtcactgttttttaatagctgagcacaccacatttttgggatattttatttatttacatttcaaatgttatcccatttccttgttacccttcggaaacccctagcccatcctccttctccctgcttctatgagagtgctcatccacccactctgacctcctcatcctggcattcccctacactgaggcatccagccttcccaggaccaagggcgtcttctcccattgttgtctgataaggccatcctctgcaacatatgctgctagagccatatctagatattctgatttgcttaaggtggaatctcagggtcatttgatttgcatttccctggtgacaaaggacattgaatatttctttaagcacttctaggccactcaagattcctcagttgagaattctcttacatctatgtttatcagaaagatcaacctgtaatttcctttgtctgtaaattctttatctggtattggtaatatgataatatttagcttcatcagaaacatttggaagttttcactccttcttagtttcatagatttgtttaagtaacattgctgttctttgatgttctgaatgaattctgcaatgaattgatttgaccacaggcccttttatttgggggga

SEQ ID NO: 2607 - DNA, 1000 bp, mus musculus
cttgagtaatccctagaaccatgaaattaagatgttagaagactgattgaacattttcaccaacatcagaataatatgcataaggaaaaaaaaaacagaaggaattatgaaaactcacactgtaaagatagtgaaaatcaagaccagttactggaagagttcttagtcgtcaactctccatgggaggtatgggatgagttaatttgacttgaataatgacagtactactaacaagataggaaagtaacaaagcaaaaaaaaaaagcatgtgtaagaacatatgtaaatctgttcgcaatttctaatgaaagaaatgtacatttaaaaatccataaaagccagagcacctgggggagccatcttggttcccggatcccacagagactagtctgtgcaggtgagagtgtggaggcagaagccacagagcttctgaggcagaccccattttgggctccagacatccaggcaccttccctgccagaggagaggtgtctaacctgccctggagagctttgcctgagcacctgggggagccatcttagttcccagatccctctgagactagtatgtgcaggtgagagtgtggactatagaagctaacagtttcagggacagggcctgtttcaggccttcatcttcagccaggagggaggtctgaacaccagatatctgtgcatcttccctgcaagaggagagctatcctgcagagagtgctctaaccactgaaattcaggagaaatctagtctcccaggtctgctgatagagaataacagaatcatgacaggaacaagctctaaacagagacaactataacaactaactccagagaataccagatggcgaaaggtgaacttaagaatcatactaacagaaaccaagaccactgaccatcatcagaacccagcactcccacctcagccagtcctggataccccaacacacccgaaaagctagacctggatttaaaaccatatctcatgatgatggtagaggacatca

SEQ ID NO: 2608 - DNA, 1000 bp, mus musculus
tcaaaccttattggatataaaacaagtcaatagacataatatatgtgagaaaattattaaaactaacaaataataaataattttcattgtatagcttgactcacccatatgtaataaacttttttactatttactggcatgtctatatatcctgtctcatcctcatattctaccacaaaatattttttaatactctttcacacaaatagattgccaaacatttgatatgcactcaatgataagtggatattagcccagaaacagaatacccaagatgcaatttgcaaaactcatgaaactcaagaggaaagaagaccaaagcgtggatactttgttccttcttagaagggggagcaaaatacccacaaaaggagttacagagacaaagtccggagctgagactaaagtaaggaccatccagagactgccccacccagggatctatcccataaacagccaccaaacccagacactattgcatatactaacaagattttgttgacatacctgatatacctgtctcctgtgaggctatggaagtgcctggcaaatacagaagaggatgctcgcagttatctattggatggaacacaaggtccccaatgaaggagctagagaaaacatacaaggagctggaggggtatgcagccctatatgagaaacaacaatatgaaccaaccagtacccccagagctagtgtctctagctatatatgtagcagaggatggcctagtcggccatcaataggaggagaggctcttggtcttgtgaagatactaagcgccagtataagggaatgccagggccaggaattaggagtgggtgggttgaagagcagggggaggggagagggtataggagattttcagaaaggaaactaagaaaagggacagcatttgaaatataaatgaagaaaacatctaataaaaaaaaggaaaaaaaagacacattttcaaataccttctctttgaagcattctctaatgtttagagaacattgg

SEQ ID NO: 2609 - DNA, 1000 bp, mus musculus
ggttattttatttatttacatttcaaatgttatttgcctacctggtttcccctccacaaaccctctatcccatgcccctcctcctgcttctatgagggtgctcacccacccaccaacccatttcaacctcactgccctagtattcccctacactggggcatcaaatcgagcctccacaggaccgagagcctcccctcccattgatgccacataagtcaatcctctgctacatgtccagctgtagctatgggtccctccatgtgtactctttctttggttggtggtttagtccctgggagatctgggaagtcttattggttgatattgttgctcttctatggggtttcaaaacccttcagctccttcagtccttcccctagatcctccattggggtcccagtgctcagtttgatggttggctatgagcatccccatctgtattggtcaggctccggcagaccctctcactggacatctataccagactcctgtcagcaagtgcttcttggcatcagcaatagtggctgggtttgctgtctgtagttggaatggatccctaggtggggcagtctcttgatggcctttcctttagtcactgctattttgaccctgcatttcctttttttaaaaagtagaaataaaatatatatggcaaatattaaaaatctttgaagtttaacaatatacctctccaagaacccatgtgccaagacaaaatcttaagaggacattttaatgtattttaaggcatttttaaattagatattttcttcatttacatttcaaatgctatccccaaagccccctcccctcaccctgctcctcaacccacccactcctgcttcctggccctggcattaccctgtactggggcatatgatctttgcaataccaagggcctctcctcccattgatagccatcatctgctacatatgcaactagagacacagctctgcaattctgggttaattctgcctgtacgtatgcctgcaggctagg

SEQ ID NO: 2610 - DNA, 1000 bp, mus musculus
tgtcttgagggagtggctccttgggagttgtaagaatattgtttcagtaaagagataagtattcattcgttagccttgacgagtgaattacaagttctgagggctgttctcctaaccaagcaacagacaaataccttagaattgactgttttaaaaatgtttttcttttatttacatttcaaatgatgtcccacctccctgttcccctcacagagtatgtcaccccctctttgtctctgagagggtgttcacccacccactcccacctcacctcaccctggggtatcccccttccttggggcataaattctttacaaaaatagatgcaccctctcccactgagcccagaaaaggcagtcctctgctacataagtgccagggtccaaggaccagcccatgtatgctctttggttggtagcttaggaggtcttccaggaagtccaggctacttgacagggttggtcttcctataaagttgctattcccttcagctctttcaatccttcccataactcctccataggtatccccaacttcagtcaagtggttggctgtaagtgtctgcatcggtctacattaacttttaaggagagggacaataatatagaaagtttggggcagctcagaataccatgtctatattcagggctagagataagattcagaatccattcttttcgccatgaggaagaagttttctcttgtcttgcttagatatgtccacctattcatatggtgtcataaatactaagaaaggacagttgtgatgttttgctttctaatgttactggagaaaaaaataggtaagttccaaagctgattatgagtgggctgtccatcctcggtggcttctgcacatgccagtgcctgcctagctacttaacaggttgatttgaagttcacccagactagcactgagctcataatcatccatcttcagactcctgagtactgatggtggagtcacgtgacatcatgcccagcaactgacagcaattat

SEQ ID NO: 2611 - DNA, 1000 bp, mus musculus
ggggactctgccgaaagtagtctgcacaggtgagagtgtgcactacagaagctaacagcttctaggacaggctggagacacagggcttctgaggcagtccctttttcaggctccagacatccagccaccttcccagccagaggataggtgtccgcccagcacgggagggctttgcctcagcaccagtgggagccatcttggttctgagactccgccgaaagtagtctgcacaggtgagagtgtggactacagaaactaacagcttctgtgacaggccaaagcaacacaccttcagggacagttcctgttgtgagccttcatcttcggccatggggggaggtctgaattccagatatctgtgcaccttccctgtaagaggagagcttgcctgccgagagtgctctgacgactgaaactcagaggagagatctagtctcccaggtctgctgatagaggctaacagaatcaccagaggaacaatctctaaccagagacaactataacaactaactccagagattaccagatgacgaaaggtaaacataagaatcttactaacagaaaccaagaccactcaccatcatcagaacccagcacttccactttgcccagtacagggcaccccaacacatctgaaaagctagacccggatttaaaagcatatctcatgatgatggtagaagacatcaagaaggactttaataactcacttaaagaaatacagaagaacactgctaaacaggtagaagacattaaagaggaagcacaaaaatcccttaaagaattacaggaaaacacgaccaaacaggtgatggaattgaataaaaccatccaaaacctaaaaagggaagtagacacaataaagaatacccaaagtgaggaaaccctagagatagaaaccctagaaaagaaatctgaaccatagatgcgagcatcagcaacagaatacaagagatagaagagaaaatctcaggtgcagaagattccatagagaacatcc

SEQ ID NO: 2612 - DNA, 1000 bp, mus musculus
aatgtgtatgactttattccataggataaagcctggactgaatagaaagggaaaaatgaggagaatcaccagcattcttctctctcagctttctggtggagaatttagtgtaatcagttaccacatgatcctaccaccatgccatctctgccactgtagactcaaactgtaagacaaaataatcctgaagtagctgttgtaatacatttaatttttgcagcagagagacaaagaactaatataacatcagagaaattatttctctttccctgctaaagcatatcatcctattaacgtccttcccagctccagtcctaggtgaacttctagtatccatatcttttttacttaatgccataatctgacaattggagcagtatcattcaaccattatgaccagagccttcagaaaaaaaatatatttatcattattatcctgtgcatgaccataaaatgaagatagtttagatagatagatagatagatagatagatagatagatagatagatagagagagagatagagagatagatagagcgatagagcaatagagagatagagagatagatagagatgagtaacagattacagaatttgcacattaagtcacatgcaagttttattcaataaaactgaagaggaaaggtcaaatgagatcaatctttattaccaatttaatttcacaactcttgcctggcagtttgacaaatatttcaatatagcataatatactattgtacagagtacacaatgataaaaagtgtcaccctaggtataacaatcagcaatggaaatttccaaagcatcaaagtgcaggactacattggctcaccctgaaactcaactattttctttcttatatgctctacgtggctttcttcaccacacttgaatgcccctttgagaagctgttattttcattttgctttattttgctctgcattttttcaccctgccttcagtagtcaacatgccttcagacaatgttctggaccacaa

SEQ ID NO: 2613 - DNA, 1200 bp, mus musculus
actatcatttgattatcatgccatcagcagttaataatgttgaatttgatattatttcatttggagggaaaattaaaataaccttgagaatgctaataaatcctctatcaatagacagatgatgaaataatacaaacctgataaaggcatttgtgatttacttctataattagctgaggtactacagtttaaaatactgcaaaaaataactttgagaagtgatagcaatctagcaatgctacaatttaaatttccttctaccagaacttgctaaatcctgagaaaaagcaagatggtagtatggatgctgataaggtcatggaggctacataagtttattcagaataaattcaagtgaggtgaaaatggattcagggcttcagagaagataatatctgtagcctttggatcttcaagactgagataatggaatctcactctccaaatatgtctgatgttcctttgaatattcaagaaagtttagacctcagtaactaaggtggatgccaccataaaagttccacttaataaatacatgggagtagtattgctccaagggttagtgatgcctgatttgccttcagaagatcatccaaaaagttagggattcatttagttgcaaagaacaaaacttctttttaatatctactatacagaatgcttcatctaccttctcatttggatataactacttcatctatgcagcacaaatatttcttgatttacttgcacccttcccaagccttttctcagagtttctacacataacaggttttgagatcataatgatggattatgctctgaatagaactacaaactgggctagcagtcaaactctgctttgcgttagtatgtgacattcagcaagacatgtaagcgcattgagctttactgacatgaatgtccagaagacctagagtaatgtacatggataccaacccagaattctgtacctagaaaaactatcagccatagtttaagaagaaagaaaatcattcattgatacaaacaaggtaaaataattcatatccatcagctctgtggaaaatactagaagcaatacttcagaataaagagaataaaaatactattcatagctaatagactctagaaggaaaataaattactagaattaccaaaataaagtacaactaagaacacaaacagcaagaaaccagcaaaataactgcaatcaacata

SEQ ID NO: 2614 - DNA, 1200 bp, mus musculus
gtgtgttccaacgtggtcctcagttggtggaactgtttggcaattattaggaggtatgccctctttagaggaggtgtgtaactgggaggccaactttgagttttttttaaaacctctcgccatttccagttagatctctctgactagtaattggctgtctcaagatgtaagctctaagcgactgctctaacatcaggcctgcctgcctgccagcctgctccctgccaccatgttccctgccaagactgctgtgaacactctctgaaactaacgctccactgtaagccccatgtgaactcttgtctaaatttccttggtcatggtgccatcacagccaagagagaagtaaccaagacatttagggaaatgatttatctcatgtgaagtttttggtgctaagtgagctttgcgatctgatgaaaagccttgccacaggcattacatttgtaaggcctctctcctgtgttaatcctctggagaaactcaggtgcgaacgccacctgaagaccttattgcagtcatcacactggtacaacttttttacagtgtgcacttttttatggttcaaaagggtggaactttcagaggtgtccccaaattcatggcacctgtgggctctagtgtgtattctctggtgttcaataaggtaggagctccggctgaaggcctttccacactcattacactcatagggctttactctaacatgaattctctggtgttggaaaagggttgagttttgacggaaggtcttcccacacttgttacatgtatagggtctctccccggtgtgagtcctctgatggctggtgagctgtgtgatcatgctgaaggctttgccacactggatgcacttatatggcttctctcccttatggatcctctggtggtaaatgaggctggaggtctgggtaaaagctctcccacagtcatcacacacgcaaggcttctctcccgtgtggattcgctggtgctgaataaggtgtgagctctggacaccatttgggagttagttctctcctcccacccggtgggaagggtgtgaagcccttcccacattcatcacatttaaacagcttttctctggtttgagttctctggtggcgaatcagtcgtgaggtacagccaaaggcttttgtgcacttattgtgtaagaccccctttcggggaccccctccagtctcgggagagagagtgcac

SEQ ID NO: 2615 - DNA, 1200 bp, mus musculus
atatggtcatttcctgttggtgtttctgtatgttagtatttttaaatacatgtttgagtgtttattaatgctgacatcaaaaataggtctaatgtgttaactaagaaaacattggcattagtgtcacttcaactagtgtcccttcaacattggcattggtgtcacttcattttcacttcagtttctccaactagagttatctgcagcataaaattagaaaagtgctcggtgtaccacagctaatttaatactctaatggggaagctggttataagccactgtgtacaaaacaaatgaatgtcagctattcaggtgcttcctgattaagcactatgtttggaaaaatacctgagagcatcttagtagcattgtctacatttagaattgattagtgtgcttggtgagatggctcagtggttaagagcacttgctgttcttcctgagcacggtttcattcccagctcacttgtagtagccaataactgtatgtaactctaattccagggaacttgacaccttcttttggtctccacagacatagcattcatgtgatgtacatagatacatgcaggcaagatacttagacaaatattttaccttttcattagtaattggaaccctacttattcaaggttataaagtattttgacttgaagaaacctataaacctcatctaggccactttaatggaaacataataactccccatctctggactaacagagaagccagtgggacaagggatgagaagtgcaggagctgtcatgaatggagaatgggcaactcctttttgtttctgttcctggagagtccacgcactttacttgataattcattacaacagtacacacattttccttgtcatccttccgatgacaacagttcatgaccttctgacgtctgttgaagggagaagtttgagcctttagtggtctcagtctgtttctggctttgctaaccagtcttgctcattgtacagtaaatgaggctaaagttttgcttaactgctctaataagggctagaattttaaaggaaacatttaacataatatatacagtcaaagttatgtgctgcttgagtgaaaaaggtagagccattttgttttagtgacaagttgttagcagatttgccaagcaatccttttctaactagaatgtacaagcaaagcaacagaataactcacgttactcaaagttcac

SEQ ID NO: 2616 - DNA, 1200 bp, mus musculus; identical to SEQ ID NO: 2615

SEQ ID NO: 2617 - DNA, 1200 bp, mus musculus
gatggttttattcaattccatcacctgtttggtcgtgtttccttgcaatactttaaggtatttttgtgcttcctcattaaggtcttctacctgttcagcagtgttctcctgtatttttttaagtgagttatgaaagtccttcttgatgacctctaccatcatcatgagatatgcttttaaatccgtgtctagtatttcaggtgtgatggggtgcccaggactgggtggggtgggagtgctgtgttctgatgatggtgaatggtcttggtttctgttagtaagattcttacgtttgcctttcaccatctggtaatctctggagttagttgttgtagttgtctctggttagatcttgttcctcaggtgtttatgttagcctctatcagcagacctgggagactagctctctcctgagtttcagtgttcagagtactctgtgcaggtaggctctcctctttcagggaaggtgcccagatatctggtgtttgaacctgcctcctggcagaagttgtgatccactcacagaggtcttaagatcccatggagggtcctatgtataccttgcgggtttctacagactccacgcccaaggtactcctgtgctgacgtggactggaagggacttgtacccctgatcaagccgggttttctgcttccctaattaatgcagtcaaggtcccccgcaattggattggagcagatgctgtgttccactcaccagaggtcttaagatcctgtggcgggtcttgtgggtagttggcgggtgtcagccaactccacgccctagctatcccagtgctagccagactggaagggggtccaggttatttgacactgttggtttcctatggggttgcagaacatcttaatgtaacagaaagtgcggaaataatcagagtaatgaagtcatgtcaaatagaggggaaatattttgaagggattaacactggctaaaacgaaatatttgggcttgaaataaatgagaaaatataactctttgtataatagagggaaccatgagttcttacataagtaaattaatggataaatagaaagttcagtgattaatggaagttatagaacttcaatgttcatccctatacacacttgttaattataagtcgaaaggaggataaaatagaatagccattaagatgccaccttaattaaaggattaaagttgacatcattattgattgt

SEQ ID NO: 2618 - DNA, 1000 bp, mus musculus
ttgctattatttctatgaaatataaaacgattctttttaaggatgcatgtagattgtttattcctgcattgagaaagagggaaacacggggatccatcccataatcaacttccaaatgctgacaccattgcatatgccagcaagattttgctgaaaggaccctgatatagctgtctcttatgaggctatgccggtgcctggcaaacacagaagtggatgctcacagtcagctattggatggaacacagggcccccaatgtaggagctagagaaagtacccaaggagctgaaggtgtctgcaaccctataggtggaacaacaatatgaactaaccagtacaccccggagctcgtgtctctagctgcatatgtagcagaagatggcctagttggccatcattgggaagagagaccccttggtcttgcaaactttatatgcctcagtataggggaacaccagggccaagaagtgggagtgggtgggtaggggatggggggggtaagggggtcttttgggatagcattggaaatgtaaatgaagaaaatacctaattaaaaaaaagagaaagagggaaacaacaaaatccatagaagtccccaggcctgtccatagcaagggcatggctgtacataggactactggctcaatttcagatgctctaatatatcagcagttttgagaggctactgtactggtcagtataggttagattagggttttttgtttgtttgtttgtttgtttaaagacttcttaatagcagtagatatatacagcagaccttcatttgtcctttagctacatgctggtttcaaaggagatctcaacatgtagtgtgttccaaggcagtttatgtgaacatgaacaaattcttcaatgtttttaaatgcttccactcagatgctatacataacatttcacattacatagacaaaagaagttatatgatcttcataactacgaaagcgtattatgtttcaaaggtgaaaagaattagaatct

SEQ ID NO: 2619 - DNA, 1400 bp, mus musculus
aaagtttggttctgatgatgccaagtaaccttggtttctgttgcttctgttcttatccctgccatctgattgtctcaagtacttactgccctcaatatatctgatttgatcctgtccttcttgtaatcctggttgagtcagaactcttcagagtccagctttctctgtgatcctgtgattccatgatcctgtgaacctaagattctgggtgtgtcagagttcttggcagtcaagcttcctctgagacctgggatcctcatgtgaccagcttctaggatcctgggaacctagaatcctaagatcctggacatgttagagcacctggaattggtaactcccttggggaccttggtgctgtcagctgtgttcaaagccaaggtagaccagtgctgactagaaggaaccagagccactggtcgggcagggctcctgtgtccctgctcctgctggtcccagtcctagttgtgttagaacagatgttgtgttccattcaccagtgatcctaagatcctgggcatgctaggatgcctgggaggtggagagtcctctatggaccatggggctgttccccgagttcttgcccaaggtggcctggagctggcactgattggaaggcacctgagcctctggttgggtgggtttcctgtgtcgctgcttctgctggcccagggccttcacaattagtttggaacagatgttgcattccactcaccagtgatcctaagatcctgggtgtgctaggatgcctgggccatggagagtcctctggggaccatgggactgtccgccgagttgatgctggctcaactgatggttatcatgtagaagaatgcaaattgatccattcttatctccttgtacagagctcaagtctaagtggatcaaagaactccacaaaaaaccagagacacacttcttagcccagcactaaggtccacgctgcaggaccttgtgatcaccttggaatcacaagtgagtggaacgcaacatcccttccaaagaatcacagagggtcttgtgctggcagaaacagggacaaaggaaccctgcccgaccagaggctaggatccattcatgtgggggccagctctgcaatcttctgtgtgaacccggccaagggcatctagggcaccagaggactctctagaccgcaggacccctagcacacccaggacctcagattacctgagagcacatgggtgatagaagcaacagagcttcttggtcaaggtcccttcaggccttcattctcagccaggaggcagagctgagacccagacacctgggaacattccttgcaagaagaaagttggcctagggttctgacaccaggactcgggaggtggattagagctccagactgctggacacctgccctgcaagaggagagcttgcctgca

SEQ ID NO: 2620 - DNA, 1200 bp, mus musculus
gtatttttatgaaccaaatattgtctgccaactagttgcattctcttactattattaatggctgtttaattttaatgtgatcaagtgtttcatatattttctcttttatgtgttttgagtttcatgcttcacattatgtttagggaaagtggacatgagaggaagtgggggaggagaggggaacctgatctggtattggtactgaagccatgagggcaagtagaaagaatggaaacaggcaacctcaggaaataggaggttgggagaaccctccagaattccaccagagacctgggaggtgagagactctcaggaatcaaagggagggaccttagatgaaatgcctgatagtaggtagaggtaacatacagagcccacctccaacaggaagacaggacatcaagagagggatggggttgccatctcactgtcacatctctgacccataattgttcctgtccaaatgaatttcagggatggaaatggagaggagcctgaggaaaagaaggtccagcaacaggcacaaagtgggatctagctcaaggggaggacccaaggcctgacattattactgaggctatgggacactcacaaaaagggacctagcatgagtgcccttggaaagacccaacaagcagctgaaaaagtcagatgtagatatttgtgcccaaccaatggacagaagcagctgacccctgttgttgaattaggggaggctggaagaagctgaggagaagggcgatcctggaggagaaccagcagtctcaattaatctagaccccgagatctttcaaacactggaccaccaaacagacagcatataccagctgatatgaggcccccaacatatatatagtagaggagttccaggtctgtgttcattcagagatgatgcacctaaccctcaagagactggaggccccagggagcttagaggtcaggtggggtaggggctgagggcatccacatggagacagggagagtggggaaaaggtgtaggatgtggagcagtcacagagtggatggaggcagggaatggaatatggagtgtaaaaaataaattaatttaaaaaaagaagtgctggtggtctttttgtaacccagatgcccctcaacagaggaatggatacagaaaatgtggtacatttacacaatggagtactactcagctattaaaaaggatgaatttatgaaattcct

SEQ ID NO: 2621 - DNA, 1400 bp, mus musculus
aaatagtctcagggatttaatgagattctgaaggcagttttaataccccaacacctaccacactgaagaaatatgactccaggctttgagaaacaatgaaagatcttacaaaaataatgttattatcaaatctgaattctcaaaaggccattggtaacaacaaggaagagaagttgggttccccagtacttagaataaaatttaacacacaaaaatatgtagtttataatctcttaaatcagtttcacagaaaggcactccaaaaaataattatgggatttccaatcttgttttggcactatattctctttggaaaacatgtttttaaaatgaaaaactctgcttaaaccttttatcacagtgtggacatattatcttatagatgaatctagaagtattaaaaaatgtatatgatggtcagtgagccctgttgtgtgcctcagctctgataggttcataatctgtgtgactataaaaataggttctattgataaaaattaaatcttagatatttgtaaaactaaccctcaacatttataaaactcaaacctctattgaaatcaaaaaagccactccactacatatgcagctggagccatgagtctcccaccatgtgtactctttggttggtggtttagtccctgagagctctgggggtactggttagttcatattgttatttctcctatggggctgcagaccccttcagctacttggttactttctctagctccttcattggggaccctgtgctctgtccaatggatgactgtgagcatccacttctgtatttttcaggcactggcagagcctctcagaagtcagctatatcagtctcctgtcagcacatcttgttggcatctgcaatagtgtctgggtttggtggctcttggtccagtgaaggttctatgccctagtataggggaatgccaggcccaggaagcagaagtgggtgggttggggagcaggaggagtggggaggggatagggtattttcagaagggaaattaggaaaggggataacatttgaaatgtaaataaagaaaatatctaataaaaaagaaatcaatagaaattcaaaataaaaataaaagccactatggctatttccacaccatagcactgaaatctaaactatatacaaatccacatagcagagtgaacattctcattatcatacattcatttttgaccagatctcatttagggtttatatatgtatgcaatttgcttagtctgaaaatcctttccctattcctgcagtacttgcttacatttacacattcaacagatgaccttgattgttttttatccaatgaaatgggaacactaaaataggatcttctttaatgtttgacattcaagtgtggaacctactttctattacagaagatgcaaag

SEQ ID NO: 2622 - DNA, 1400 bp, mus musculus
gagtggtgctatctgatccatcacttttttttttttttttaccactttgacctgcgttttgtctttaagaagtttagcatgttttttgtttgtttgttttttgtttgcttgttttaataccataggcattctgtatgcttttcctatctctggaatgttgtgatccctcttttcttagttgtggctacagagctagtaaattctatcttctcggagaaatgtattctgacttctcagtattgaacaaattctgctatgacatatttacatataacaccatgtctctccctgttcatactcatcacagtgcaatactgtcattatgtatccatccctctttgtcacaagactgtacattccattaggtcaggtacccatacatttgattttatactgcttcctattctcagtcttatgccttacctatatgccataatataatgatttaataaatgaatagatggattttcagaggctcacatagccagcattcatgtttcctgagcctagtacagaactcttcatggcacaatgctgcttctatttaggcaaacagcacaagattggatcatttagcagtttcggagcagtttgggacttacaaatgaaccttctaccgtctgccagttgctatatatgcacaagacattttcatcaaagaaaatgtatgaatgcatcagtaccccagttacactattaggacaataaatacatgcgttaaagaagccacacataaagggttggcatcatcgcagtagtatgcatgtcaatttcaagaagtatattggaacattaatatgaaagagaaaataaatcatattgttgcaggcatttttaaagtcctttaggaaaaaaaaaaacgttttagtttgctgagttgaatttcaggatttcatttaaaaaatacttaatgtttctagagacctatcagaaatatttatctacagacaaaattgttacttatttttgatgaatgaaataaccataaagggccttttccttccttgaataaacttaagattagatgtgttcatttttatactttagaagctaagtgtaatactaagaaatatggaatgctttttctggaagagctacttctagaggtttttcttttaaactagtaagtggaattttaatggtgaaatctgagaattgtgcatagtatttagaaaatgcaagttataatcctgaagtgctataatcatcaaatagttgctggcatctttcaaagtctttaatccttcttcatattaactttctgacctagcttttgtcaaaataatcttaagtccctaaacatattctcatggcataaaactactatttcttgaagttgttgtgtgctagaaacgaccacacagacattgttgagttccaagtaaatcaccggaaagcat

SEQ ID NO: 2623 - DNA, 1000 bp, mus musculus
tagtcaaaaaaatgtacagaatacccaggatacaatccacagaactcaagaaggttaacaagccaaagggcccaagtgagtactcctcaatcccacttggtagggagcagaaatcaaccactggggtgctgggtagggcagagagagaaaggtacctgggtggtagaggggacagggagaaaaagggggaatatgatcaggtattggggtggggtggggaacaggactgaagccccgaggaactgtagaaagaatggaaacaggcaaccttggggggtatgaggtgggggaccctctagaatttactagagacctgggaggtcagatattctcaggactcaaaggtagggaccttagatgaaatgctgtatagtgggaagaggcaacttgaagagtccacttccagtagaaagacaggacatcaagtggagggatggggttgccatcccacagtaaaaaactctgatccacaattgttcctgtttaaaagaactgcagagacaaaaatggagaagagcctgagggaaaggaggtccagtgacaggctcaaattgggatccagctcaaggggaggctccaaggcttgacactattactgaggctatagtgtgtttatatacaggagcctagcatagatgccttcagagaggtccaacaagcagctgaaagaggcagatgtaagcatttacacccaaacaatggacaaaagctggagacccctgtggttgagttagggaaaggatggaagaagctgaggaggagggcaaccccataggaagaccagcagtctcaactaacctggaaccctgggatctctcagccaccaacaaggcagcataacccagctgataagaggtccccaactcatatacagcagaggcctgcttggtcttgcctcagtgaaagaagatgcacctctcaagagacttgaggatccaggaaatggtgaggtctggtagagtggggttgggggatacggaaatcctcttggagacagggg

SEQ ID NO: 2624 - DNA, 1000 bp, mus musculus
actcaggatgatgccctccaggtccatccatttggctaggaatttcataatagtgggctttgctctcttattattgctagataactgtggggaggagtctagccagaatgccagaagcttggggcattatctatgtgactactagccacaggcctctcttgtgggggctgtgggggcagtaactttgacaggagccaggggttcaggagacatgattgaaagccttctgtcccatgtaggtggaaattaccacccatggggttgcaccgtggttcaaaacctcaactctggagaccaggctatctgtgcatagcccatttccccacagacagtgatcacacccacatcatttgtttgctttgatgattacaagagggtttgagaaaacagctaattctcatgagtatttgtattcccctatttatctcttgttcaatatatacagtggctgtatttctcaataattagttacagtcctgaattaagttattactaataaaaattcatcaagtattattttaatgatgaattataaattgttcccatgtgccaccctcactttatttacttaatgtggtagtttgaatggccaatatagattcatgtgcttgaatgcttggtccataaggagtggaactattaagaagtgtggccttgctgtaggaagtataccactatggggcaggtctttgaggtctcatatgctcaagttatgcccagtgcacctcatagtctccttttctgatggaggatcaacatgtagcactctcagatccttctccagcacagtgtctgcctgcatactataagtttactgccatgatgataatgggcaaaacctctgaaattgtaaggccaggtacaatgaaatgttttcctgtacacgaggtgctatggccatggtatctctcagagcaatagaaatccttactaaggcacttagtcaactggtaaatgaagtatataaaggctcataggaggcaagacccacaagatatta

SEQ ID NO: 2625 - DNA, 1000 bp, mus musculus
agtgttatgaatgtgttcaaacacaaaatacccaacactggacagataagaatgactagctgcatatgtatcaaaagatggcctagtatgccatcactggaaagagaggaccattggacttgcaaactttatatgccccagtacaggggaacaccagggccaaaaagggggagtgggtgggtaggggagtggaggtgggtgggtatgggggacttttgggatagcattggaaatgtaaatgaggaaaatacctaattttaaaaaaaggaaaaaaaaagactgaaagaatgttaaaaaaaaaaaagaatgacaacaattactcagctacgtctgtagtctttgagaagtcgtcaccatacaaaactatatacatttttcagttgagaacagagtgatcattcatgggcttagtattattaggaaaataatctatgatattttgtatgagatatctatgtctttcgtagaaggctggtctcaattttcttgagttggtcttcaggactgagagggatctaaaacctgatattcagagacaatcaaaactgtcttccttgtacctagggaattcaatgacaccacaagaacacagcccgcaaaatctactgaccaagactcacatgggctcaaagagatcaggaaccctatataggtgtgacccaggtcctctgtacatacgttatggttgtgtaactcagtgttctcctggaaactctaacagtgggaggaggctgtctctgacagttttgctttccttgggaccttttttttgcctactggtttgcctgttctggcttcaatatgatggtatgtgcctggtcttattgtagcatgttatgctatagtttgcttgatgtccctagaagggctgctcttttctcagggtatgtgaaaggaggtaaaggaatgtgggggaaagggaggtagatgagagagagaatcaggggagaagaaactgcagttgggatgttaagatataatatatgagagaaaaataaaa

SEQ ID NO: 2626 - DNA, 1600 bp, mus musculus
taaaatatttttaaaaatctatactttcaaagaaaggtaattattctgagaacaatatttttctaaatttactgaaaagagtacaaaagcatatcaaaagtatctcatattatcactagaattaatatgtatctaacctaaaatcaaggaatatatagttattttgaaattaaaaattgaataataaattattcaattgaataaatttaaacacatttggtaataaaatatggaaaataatataagtgacttttctagtgaaattacattattaaattttgtaaatatctcttagcattttgctttttgaagaataggggttccttttagcaggaatttaagatggaattccacagattcttactgatctagttttgaagatattttttatctccttcttctgtgttttcatgtctttaaattcaacaacagtgacaaaatttaattaccatactaatgatcatgtaaactgaagtctatagttgtttacatgaaggtgaatttataagaaacctagatttaaatttttatgtactacattttctgtatccattcctctgttgagggacatctgcgttctttcaagcttctggctattataaataaggctgctatgtggagcatgtgtccttcttaccagttggaacatcttctggatatatgcctagtagaggaattgctgcatcttccggtagtactatgtccaattttctgaggaactgccagactgatttccagagtggttgtaccagcttgcaatcccaccaacaatggaggagtgttcctctttctccacatccttgccaacatttgctgtcacatgtatttttgatcttaaccattctctctagttgcatatgtagcagaggatcacgtagtcggccatcaatgggaggagaggaccttggtcttgtgaagatcatatgctctagtacaggggaatgcctgggccaggaagcagaagtgggtgggttggggagcagggttgggggagagtatgggggctttggagatagcatttgaaatgtaaatgaagaaaattctaataaaaaattataaaaaattatatgtttgggttttctcatacaaaccaaatttataaattttaaatggaaaatttataagcacatctatgaaatgtgatacaattcatttaaaggaaactaatcattaattttaaagatagttaacatatctaaaacatggaaaagcaagtatattgatgtcacatgaatggatttatttcaaggaagagctgtcttcaccctttctgtgtgtttatactaattttgtacagaacaaaaaaggaatgtgcagttgtcatatgatatatctgattttcatctttcaaaataaggtgtgtatttaaaaaaacacccatagctcatgtttgctttctgtctctgttataaaacaacatgaacaaaagcaacatgtggataaaaaggtttatttcatgtttatttcaggttccagttgaagcctactcaccaagagaaatcaaggcaggaatctcgaggtaggaagtgaagcagataccatggaataatgatctaactggcttgctcacagtgtgttccacatttttcagtttatgttg

SEQ ID NO: 2627 - DNA, 1000 bp, mus musculus
agagctggaacttgcatggagcctttacctttatgttttagtctctttggtgtgggaagggattcttcaggctccaaaagggaaatgtgaacatcaattcacctacaacacctactatctacaatctatcctgcctgcaggatgtgctgagacggtgatggcatggaatttatggaggtggccaaccaatgtctgtttaatttgagacatactccaggagtagttgtgcctgacacaacttggattgccaggaatgggagactggatagcacataggccttgtgtagaaacaaacacaactatctttaaaacaaaacaaaacaaaacaagtcaatgaagtaatttctaatactattctgttatactaatagatctatgcatgggtctgtgccaggtcctctgcatatgtattgtggctattagcttgttgtttttgtgggactcctaactatggaagcaactgtgtcccctatttgtttgtctgcatttgggactcttttcttcctgttgagttgcttttttttttttttttttttttttggaaaggtgtgagggatttttttcattgtcttgttgtattttgttttgtcatgtttggtggttgttgttgttgttggtttttttttttttttgtatgtttgctcttttctgaaaggagatgaaggaggagtggatgcaggagagaaaggaagtgtgtagggtgactgggaggacttttgggagggaaaactggtcaggatgtattgcatgaaagaagaatctattttcaataaaaagaaataggacccattcaactagtacgacacaaagcagtttgcaaatcactttgaaaactaacgaatggagtagaagcaaacttcttttctattatctttctacttgctcttctagtatttctctaaattcttcagaaataatgcagataaagagtaaatctcatgacccctgaattcctctggcattcctacttcaggcttattttatttgcattttagatgat

SEQ ID NO: 2628 - DNA, 1000 bp, mus musculus
ttttttaatgtgatgttcatttgaatttcttttttttgtctttttttatattccttctttttatttaatactttttatcacactccctatttttcccctccctgcccaccctccaactgtccaacatctgatacatcctccacttttcctgcctataggaggatgtttccattctccaacctctcaccccaccatactgctaagctcccttgggcttccagttccttgagggttaggtgcatcatctctgcttgaacacagacctggcagacctctgctgtatgtatgttgtgcctctcatttcatctggtgtatgctgcctggttggtgttccagtatctggaagatctcggggatccaggttaattgagactgctggtcctcctaccaggtcacctaaactgagtttctaaatggccccttaatgtggctgtgggtatctttatctagattttggaaattttctgctatgattttactattttttcatctttattttcatcttttatttatcagctgttattttttttttcgttctagttcatgagtctcatgtgtcttcatgtttgagaacttttgaaattttcattatgctaattttttcctttatttctattgaatatatttcttcaattcctcatacttttttttctggttgattttattttaaaaatattattatattcatttacattcaaaatgtccatttcccagttctatatccaagtgtattttacctcatcctcctcccctttgcctctaagaaggcactctcccacccatgtatccctgtccattcaccaccccccccttaccacccattccataccacccatcccacctcaatctggacctcatcttccttccctgtggtctctacaagcaacatcctctccccttaaagccagacaaggcagtccgccgctaaatatgtacctatttatcttgctgcctgttgattaaacttctatttccaaaatttccatttttagagattttg

SEQ ID NO: 2629 - DNA, 1600 bp, mus musculus
attggggtagtgaatagtttgggttcaatgctaagatagagttcagagtaaccaaatttcaggcctgtaattaaataataatttgagaaaaaaagtatcaatacttctaaaaccctagattaactatgtgtttgtgacaaatcctatttttaatttggtagagcagcttttgaaaataaaatgcaaatattataggatttagatgagagattgcaaggtaatccatataatttcctcttgaaattgaaaagattatctggtattttctgtaactgttatgtaatttatctttagtgctttattgagttatagttgacttccaaaaaaaaaaaaaaaaaaaaaaaaacctgccaatctaatgtatgcagtttaatgagcttgcttacacttaaatacatatgatagcattaccatgtaatcacggtaattagcaaatctgccacctctaaaaggttctttatcttcactttgttgtagaaaagaggatgtaacgtgaggtctttttgaacatttttacagttcaacaaaatatatagtttgctctgcacaatcaattttaaataggtctctagaacttagtaaccttttaaaaaagatttatttatttatttatttatttgtatatgtgggtacctgtgtgagtgcatgctatatatgtggatgaacatagaggccaggaaggtaccacatcccttggagctggatttacaggtggttgtgaaattaccagtatggacactgggacatgaattcagatccactgcaagtgcatcaagctctctaaaccactgtgccccgtctctggacccaaataactcgttagtctgaatgtgtttgcaacccatgggaagaacaacatcaaccaaccagatctctcagagctcccagggactaaaccaccaaccaaagaatacacgtggaagcacccatgacttcatctacatatgtagcagaggatggccttttaggacatcagtgagaggagaggcccttggtcctgtgaaggcttgatgccccagcataggggaatgatagggtggttgggcaggagtgggtgggtgggtgagggagcactctagtagagacagggggagggtgttggagtgggaggttttccagaggacctggaggggagatagcataaacaaaataaacaataaaaaagaaaatgaaagaatgaataataaataagtatttaataaaaaaaataaagttaaggtattcaaaaactgcttacttatttcatccacatgcaggaagataatatttgtttgtatttaactgtatattagaaacctcttatgagtaaaataattcagtatcttttttttttattttgaagaatctttcacttggtataataatttcaaaggtcaatgttgtaggcatatggcatgattttttcttcctgttcagtttttttatatgtgtatatattagacacatacatatatatacctatataaattattaatatattatgttatatataaaacttaaattgtatcaatttgtcatgattcatatatacatatgcaaatagatatatgtaatattgaatgtattctcttatttcctaggatagatgtaagtttgtcaa

SEQ ID NO: 2630 - DNA, 1000 bp, mus musculus
ccatatcacaaagcaagatagagaagaatttattttggtttatggctcctgggggataagcctccatcatgtatgggagctatggcaacaagtggtgggtatgacatcaagagcaggaagctgagagctcacatctacaaatacaagcactatataaagggagggcaaactagaaatacagtgcagctgtataatcacagactctccacagtgacttttctccaaccaggatgaaactcctaaaaaaatcccaaatggtgctactgagaacctaggggacattgcttgttcaaaccacatacaattaacatgcctatatgcaagcaacattgccagcaggttttgaaacacatatgcaggatataagatattatagttattgctagaatagagataatatttttcttaacataagtaattaatattggaagaaacttagattctttttacctgtctgtattagttgtgctttgttcggtagttcactgaaaaaatttaaccaatcaagggacagaaattcactaggatatttatatttataaaattgtacttttaggcatgactcagtaacaatgccctatagaatccttgaattttgtcattcaagtgccattacactaaatctccaaattataaaatatttataactatattaaaatattcatacaagttagtgtgtacttcaaagaactgcttttataattatcaatttatttttttatacttcaagtaactatagtgttcagaattgtacattgcattgcaaaaaaaaaatcttaaatgatatatagaatcctacaattacagacacaaatgcactaaaaaaaatcagttctttaggcatttcttggaacactggaaggaaggtggagaaatgactaatagaatttcccccacaggtgttctaatgaatgaaacaccatcccagtgtctgtctgcattgcactgcactatacctaagggaggtaataaataggaaatgatgggctgtccaattttg

SEQ ID NO: 2631 - DNA, 1000 bp, mus musculus
ggctggcctcaaacacagaaatctgccttcctctgactcagaagttctaggattaaaggtgtgtgccaccactgcccggcccaatggggcttttttaacttccctaacagcatgccattattgcactagggagtccatcatgcctggtgagtttttttgtttgttttttgtttgtttgtttttcgtatctcatagggttcacagctagagacgacttttgtttacatttcccttttggtagcctgtggagaattgcaggctggtctccaattgagctgagatctgaaccacggtggtcataattcacctacacaacaaggtaggcattcactcatgctcctggaactctgacccctgcctaaggtaccacctcccacagcccccacaagagaagcatggtcagtagtcacttagacaatatcccaagcttctgaccttcaggctaaactcctccccagttatctagcaacagtaaagaccataaaaagagctgtttagcccccacctcactctctaactcttaagctcttacctcttactcctcactctcaccctctctcttctctttcctttctctttgtcttcttctctccttcttactctcttctctgtctctgtctctgtctctgtctctgtctctgtctctctctctctctctctctctctctctctctctctcccctctctttctccctgcacttctataatatatgagagtctctgctccatcaaggtcatggagcatgctggtcagtgttgggaacctctcttcaattatccctctctcctatacactgggggctacagggtgtggccctgtggcccccaggtcaggagctgccccttttccacctccactccccacccccttgccccctccccccctgcctcatgggtcagacagaggcttgcatgcccacccagggccgagtggaaagtgtctggcagctctgcctgtgtccacctgcccagagcacaggaactctggctggaagttcgg

SEQ ID NO: 2632 - DNA, 1400 bp, mus musculus
tgcagttctgaatcctccctgtagcagggggtcttcgctcatgcctgaagatgtttcttttcccgggtttcagcaccacttgttgcgcgcactcaactggccaggaagaacgacgctgctacaggatccttctgcacatgtttattcagtcctgattcttcttgtttatatctcccttgtttatatctctcccttgtttatatctcccctgtttatatctcccttgtttttatatctcccttgtttttatatctcttgtttatatctcccccgaaccctgggcctctcactccttttatactctctctcatccacgcaccgcaggccacgccccctcgccagtcacgaggcttcagctaatcagggcagcaggggcaaatctccaccaaattggattcacctgtatcctggtacacatgcgcagcactcaagatgtttgtgtcttatatgaggaagtcaggtgcaagtcatatgacttagctgcagtctctggcacctttgggactgccgccacacccgctccccacaggaacgcaacttctgccacgaggcaggttcgaacaccagatatctgggcacctttcctgcaagaagagagcttgcctgcagagaatactctgaccactgaaactaagatgagatctagtgtcccaggtctgctgatagaggctaacagagtcacctgaggaacaagctctaaccagagacaactataacaactagcttcagagataaccagatggcgaaaggcaaacataagaatgctattaacagaaatcaagaccactcactatcatcagaacgcagcactcccaccccacctagtcctgggcacctcaacacacccgaaaagcaagacctggatttaaaagcatatctcatgatggtagaggacatcaagaaggactttaacaactcacttaataatcacccatggaaggagttacagagacaaagtttggaactgagacaaaagaatggaccatctagatactgccatatccagagatccatcccataattagcctccaaacgatgacaccattgcatacactagtaatattttgctaaaaggaccctgatatagctgtctcttgtgagactaggctggggcctagcaagcacataagtagatgctcacaatcagctattggatggagcacagggcccccaatggaagagctagagaaaatatccaaggagctaaagagatctgcaaccctgtaggtgcaacaacattaagaactaaccagtaccctggagctcttgactctatctgcatatgaagcaaaagatgacctagttggccatcactggaaagagaggcccattggaaacacaaactttatatgccccagtacaggggaatgtcagggccaaaaaatgggaatgggtgggta

SEQ ID NO: 2633 - DNA, 1400 bp, mus musculus
cttgcatttggagcatagatatttagaattgagagttcgtcttggaggatttcacctttgatgagtatgaatttccctttttaggttagtattgttttgttcatttccatcactggtttggatgtgttttcctcttttttgttaaggacttgtaactctatagcagtgttctcctgtatttctttaagtgagttattaaagtccttcttgatgtcctctaccattatcctgagacatgcttttaaatccaggtctagcttttcaggtgtgttggggtgcccaggacttggcgaggtgggagtgctgcgtcctgatgatggtgagtagtctttctttctgttagtaagattcttacatttgccttttgccatctggtaatctctggagttagttgttttagttgtctctggctagagattgttcctctcgtgattctgttagcctctatcagcagacctgggagattagctctctcctctgagtttcagtggtcagagtactatctgcaggcaagctctcctcttacagggaaggtgcacagatacctgttgttcggacctccctcctggcagaagatgaaggcccaaaacaggatctgtcccagaagctgtgttgcttaggcctgtgacagaagctgttatcttctgtaatccacactctcaccagcacagactagtctaggagggatctgggaaccaagatggctcccccaggtagtgatgcaaagccctcccgggcagggcagacacctctcctctggcagggaaggtgcctggatgtctggaacccgaaatggtgtctgtctcagaagctgtcctctagggaccttgggggtgtctaccaactctacacccaggtgaccaagtgctggcgctgactggaagggacttgtgaccctggtcatgccaggttttctgtttccctaatgctgtcttagatcccgtgagtttggattggaacagaagttgtgttccactcactggtggtcctaagatcacgtggagagtcctctaggggtccttgtgggtgtctgcctactcagtgctcaaggagacccagtgctggcgctaaacagaagggactttttttcctctagtttctttttttttttttcccccttggctaacttttttttttttccattttttattaggtatttaactcatttacatttccaatgctataccaaaagtcccccatatccacccacccccactcccctgcccacccactccccctttttggccctggtattcccctgtactggggcatataaagtttgcaagtccaatgggcctctctttccagtgatggccaactaggccatcttttgatatatatgcagctagagtcaagagctccggggtactggttagctcataatgttgttccacctatag

SEQ ID NO: 2634 - DNA, 1200 bp, mus musculus
atcctcagtaaaagtcagtagtctctcatacattttattttacaatattaaaacatttcaaggtctggagagaataatcattcaagaaaatgctttctattcaaacctggggatctgagtgtgcataggcagctcttctgaagtcaggtctggtggcatatgtctacaatccatgatcctcattggaaaagataggagcatacctggggctcagctgctaaacattatgtttaagttccaggttcagtaaatgtgaggtcagggaggtgtgagtgaatggttgggtgggggagcaccctcataggagcaggagagtgaggatgagatagggggtttctgtggggggatcaggaaaggtgagaacaattgaaatgtaaataaataaaataaccaattaaaaaattgtaaaggtgtgtaggtgtttattcactctagtaagtcccaagatcttcctgacacttggcaccatgtaggcatggctggtatccatagtcatcaatttccaaatcacagttcacaagatactcttgaggacagacatacatgtatcttcctgtctcattggggaacatagcctcactcatgtggggatcagaaagaaatttatttatctactttcaagtcataatgcctgacttggtatccaagcacaccaagcaggagtagccattgattccttccaggtgcacaactcctttgtggcaaggactgaaagcatactcattgtgatctgtcttacagaacctagcagatacagataaggtgcctagagtctttatggcaggtgctccacattggcaagtgttgtcaccaaaggaattagtggcagtttcacaggtcaaccaactgtacccaggaatacattgacacaggaagcctcgttttcctggggtgtttacacaaatgacaatttcttggcagggactggagaagcaagggtattttagattctcacagtctttatccaagttactagctatatctaagcaaaaaattgctgtctcatagaaaagctttgtgcatggaattgttttggcaagaatttaagggatagctggtattttttattgcaaaaaatagatactgacacctcaattcactgcaggagtaggtacatgctttcccactgagaccagaaatgacagcctagttaagggaacaggatacaaagttagacaacagagtcagaataagatgtcg

SEQ ID NO: 2635 - DNA, 1000 bp, mus musculus
cagctaagtaataatttcttttttagatatactacattttcatcatacagtagttaatatctattaacattaattgatagatagctatcttgtttttatattctggatattatgtatatagtagtaaagaacatggatgggaagctatctctatataagaataccaagtcctttagggataagcttaagagtgacatagtttagtggtatgatagatgtgtgtctcactaagaaatctccacattgatttatgtataaaagaagaaatttagtgcaaatatctgcatctaaccctttcagctgcttgttgggtattatgaagtgcagtcatgataggtttctttttgtgagagctccatagcctcagtaagaatgtcaggctttggggcctccctttgagctggatcccactttgggcgtgtcactggaccttctttctctcaggctcctctccatttccatccctgcatttctttcagacaggaatgaatatgggacagagttctgactgtgggatggcaaacccctccctcatttgctgacctgtcttcatgctggaatctctggtgcattttggagggtcctccgacttcttacctcctgaggtggcctgtttcctttctttctgctggccctcagggctttagtccttttcccttacccagtaccagatcaggttcccctctcctcccaaaccctgtccattttccctcccaagtcaagcacctgaaagagtcagaagcagatttttttttactcaaccaatggacaaaagattctgacccctgtggttgaattagggaaagactggaagaagctgaagaggaaggtgaccctgttgaagggccagcagtttcaattaacctggactcctgagatctctcaaatgcaggaccatcaaacaggcagcatatgccagctgatatgaggcccccaacacacatacagcagaggactgccgggtctgtgttcattcagagaagattcacctaaccctcaa

SEQ ID NO: 2636 - DNA, 1200 bp, mus musculus
cctagggtttctatctccagtgttgccccactttgggttttctttattgtttctacttccctttttaggtcttggatggtgttattcaattccatcacctgtttggtcatgtttacctgcaattctttaagggaattttgttcttcctctttaacgtcttctacctgtttagaagtgttctcctgtatttctttaagtgagttattaaagtccttcttgatgtcctctaccattatcatgagatatgcttttaaatccggatctagcttttcaggtgtgttgtggtgccctggactgggcgaggtgggagtgctgggttctgatgatggtgaatggtcttggtttcttttagtaagatttttacatttaccattgccatctggttatcactggagttagttgttatagttgtccctggttagagattgttcctttcctgattcagttagcctctatcagcagacctgggagactagctctttcctctcagtttcagtggtcagagcactctttgcaggcaagctctcctcttaaagggaaggtgcacagatatctggtgtttggtcctccctcctggctgaagattaaggccaaaaacagaacctgtcccagaacctgtgttgcttctgcctgtcacagaagctgttagcttctgtagtccacactctcacctgcacagactagtctcagagagatccaggaaccaagatggctcccccaggtgctcctgcaaatccctcctgggcagggcggacacctcttctctggcagggaacgtgcttggatatctggagctctaaaagggggctgcctcagtagctctgtggctcccgcctgtcccagaagctgctagcttctgtagtccacactctaacctgtgcagattactctcggcagagtcccagaaccaagatgcctcccaccgatgctcaggcaatcaaatccttactcttaatttaccctcaactctttttctgtcatttacctctctcccctaaggttcaaggaagattgcagaacagtttaaaagactagaaggaccagatcacctgtcagattgtgccttgtagtactgtcagaagccactcccataaattctcattacagtgattgcacaaacatgatcagaacaaggacaaaaataaaagacattctactgtggttgtggaaggaattataggcaactaaggaatgctgaga

SEQ ID NO: 2637 - DNA, 1600 bp, mus musculus
ggcatgagcaaaaacaatacaagaaatgcgtacagatacagacatacacatattcacatactcaggaatcgcataaaaaactgtaataaccaaaatttataggatatatgtgtatgtaaagaacctgtaaggtggggggcaaattgccttgacttaacattttgagagaatgaacctccaaacatgctattgatttcttttgtgtgtgtgtgttgtccatatactactgggtctgtcgtctatgtttatgaatagttcattttcccagctagactcccttggagaaaactcttttgtttgcactttcctatcaattagcggtagcttctgggttagggatgggtgtatatgttcacttctttcgtttttagaaccttatttggtataaacatgtttagggcatttacatgttgccatagtctctgtgtttcaatacttttatgtttagaaggccttgatttctttgtgtccttcatctcctatggctcttacattcttttcgtctcatcttccagttttctgaaccctggggagaaagatttaagctgcagtatgtcatggtcttttactctgcacatatactgactgtggatctctgtattccctccagtctaccacaggagggaacttatctgatgatagctgagccaagccctgatctacgagtatagcacaatgaggttaggaatcattttattactattttcttttatcacaaaatttttcttttgttttgttttcagttaggtcagtggtctatctggtctcaggttcttggtcacccacgcagcattgggcagcagtttcagctcactgagtgggccttaactcagaaaagaagttggctggttaccccaatatgcttcatacaattattgcaccagcttttttaggggggtgggggtgtttgttggtttcttttttttttctttcttttgtttttttttcaggcaggtcactcctatacatatgcaagtttatagctgggttgatatttacttttcatttttggtagagtgcaaagtaacttgaataatacatgggcatttgagaattgagtaagtgttgccttaagcataagtccttcctttcaagtttatgaagaaccaccaaaaaccttggcaatagcccagaatggtaggatcaaacagggagggagtaaggaaactgaggtaagagcaaattatggtgaggtggagataaaattaagtgccatctggaatcatcatataatagtacatggttccttggttcctataacacacacacacacacacacacacacacacacacacacacacattatatacatatattcaaataatggtaatgggcaggatagaatccaagctgaaattctcatcatctaataatgaatccactacacagtacacagactgggttacatttaattgacttatatcccaaaggtgtcccattggaacccctaagcaacccagactatagtttgtgatgtttcttattgcccacctgaattaattgagcggccttgaaatatttttcattacatggaattatatagatgttggttaagctacatttctatttcatttctttttatttctcagactgtcaaaca

SEQ ID NO: 2638 - DNA, 1400 bp, mus musculus
ggctttattagaaatgtgcatggaagcagaaatgctaattctgaatagaaaatattttaaaatattttaattaattatttggcatatatatatatatatatatatatccaatttttttctaacaaagagggaagaaatgatgatatgacatgaggcaactgatagtagttatactaaagaatataaaagtcaaatactattgccataaaggaaaagttgaaaataattaatataaattatacaactaataatttcaaaacacctttttaataaaatatacaatataggaatatactagaagactagttgctttacttaatacttgaaatttaaaatttatgagttacgtgacagaaaatactatagatgccccctttctaacaacaaaaattcagttctcatcaaatagaaagcttgcatatttttgccaaattaaacattaactctcccagaaatcataaaccgtaaaattttgcaaacccataggaagaacaacaatatcaaacaaccagaccctgcccccccgccgccgccgcagagctcccagggtctaaactgccaaccaaagtgtacatatggagggtcccatggccccagccacatatgtagcagaggatagcttgtcggttatcaatgggaggaaaggcccttggtcctatcaaggctcaatgcctcagtgtaggggaatgccaggacagggtggtgtgagtgtgtgagtgggtgggagagcactatcatagaagccagtgggattatggaatagggcattttcagagaggaaccagggaagtgggataacatttggaatatatataaataaaatatccaataaaaatataccactagattatagacttcatatttctcaacttaaatatttgtgatgagtttctggatatatatatatatatatatatatatatatatatatatatatatatatgttacttgcttctctattaaaatactatgataataattttaaagaccagttgtttaatatactattattttatatgttttgtatattatataacttaattatataatgttgtttaataagcaggctcctttgtaatgttatattcatccactttgtatcatgtagtctcttggctctaactcaatctagcaaacaacaatttgaaattttggtgaaatatgatgtagaaatacttttttttttttgtttttcaagacagggtttctctgtgtagctctgactgtcctggaactcattttgtaggccaggctggccttgaagtcagaaatttgcctgcctctgccttcctagtgctggaattaaaggcatgtgccaccatacccagcttacaaatacctttttaaggcatgcaataacttatgatattcagaatactatgtaagtacttataaaaata

SEQ ID NO: 2639 - DNA, 1200 bp, mus musculus
gtagatttctttgtgtttaagaccagcctggtttatgtagaaagttctaagacagccagaaagatagaaataatgaagaaactctgtctcaaaaattacttatctttttttttccttctgtgtttttctatacacatagtgggagagaggggagaatcaaagcactaaactgatccagagtaaggaacaaattgaaaattgcttttgcctacagtgttggtgagaaccttactctcacctgttcattcccatgtctcatcacacagagcaacccgaacagctggcagtagaggggacagaattaggactcatggttacacagcagaatgttactatacagaaaagaaacactgtatagcctattctgggttaatgtcatgcttttatgactcctatgctttaatgcactgaattaaatagttgtacactcctaaaataactggtctagtttctaggagtactttttagacatcctaaacttggatagtattctacaggcatggggacatttgaagatgagttaaaggatagaattttctgacaactgcctcccaggagatcaacatgccaatcttttcatcaccttcttattagcctgactgcaacagagagattgacccttgtgtctccagctcctggaatattttttgaagtagaagagaaaaagaatattttaaatagtacttttccagtccttattcagctgcaatgtttctttaacaacaacaacaacaacaaacacacacatacacacacacacacacacgtacatacacacacagaagaccagagtctggcagaaaagtaaaattttaatgacagcatagttactgaacaaaaacaaacatatatttacactttcctcaattagcatctgaatagcacctcaacagagtctttgaaagctgagagtggtatgggaagtgtgacacaaggaagaggccatgggtaatgaaattctttagagcctagctgatttcacaacaatgctagattttggcaaattatcatttttttaattatttatttgcaccttctctgagcagctatctaaacaaataatagaaaaaaacatcaatgttatgacttcttattcaaagaaactaaattgtttaggctgcttaacagtttttttttttctgtttttatttttctaaagataggttagaaatgattctaggtctttttaaaaaattttat

SEQ ID NO: 2640 - DNA, 1400 bp, mus musculus
atacaatatattctgatcctcctcacagccccatacatccaactccatattgactttctttagaaaacaaacaggcatataaaaaataaaacaaataaaacagaataaagcaaagcaacttatctgatttaaaaaaaaactaaactaaaaatattcagatagagagacagagatataaaagagacagagagagaaacagagaaacagaaagacaatgagacagagagagactcagagaaagagaaagagagagaaagacaaaatgagagagtaaaaagtaagcaataaaatcataaatttgggaaacatattatataagcaaaagaccagtaggtcaaaaaaaaagtgcctaaaaatattatgagaccagaaaagcaaaacaaagagttccaaaaataatattgagttactttgttgtgtgccattactgctgggcatgagacctgcccttaaatctggcttgtatatccagtgaaacactactggagaaaaccactttgtgagtggttgtcatttagagagagcttctgggttaggaatgggtaataatgttcatttctcctctaagcaatggagcttcatctagaatggacctctataggctctgtgcgagctgctgttgtctctgtgagtgttcacaagttcccatttccttggtggtctctgatatcccctttggctctgacactttttccatctcctcttctgaatagttctgtaagtcctaagggaatcattccctgcacattgtctcattttgggtctctgtagcttagggtcttaaaatgatttgatatttgtattttgtccaatatggttatgattctggaaatattcctagaagaaaatgaacttgagaatatattttaacactaacttcaattgtgaattaacattccagaattcttataaaaactacatgctcttaattttagttttctcatgtattctgagatgaacatatgttggtaggacttttatctctgaattgtagagtctcaaaaacttttaataacattatgtagaaaattaaacagtttggggttacataaatgatagtgaaaatgaagaagatatgagaccttcaaggtctgactatgtatattatgatcaaaatagtaaatagtaaatttgagtgactgcaatgtggtatggattagctatattcttatttatttaaattttatgaattcataaaataattctagaatttaaaatgtgtgtcatcactcaatctgtagtaattacatcagtgttagcacaatattttatatgtcatatatagcaattatgattaaggtaatcaatatttctgcttcatccttgaaatttttctcttggatctttaaagtgtctctcttatcccctttcacaaaatacattgtaacttatgaactata

SEQ ID NO: 2641 - DNA, 1000 bp, mus musculus
acttcatatctgtccctaattttctgaaatttttgtctggcctatgtgtgtgcatgcctactgcatgataatagtatctcaactaactgtgactatgaaagacattttgtgggctttagtcttaaagtctgagatttattcaatattggatttgttcttaaacttagttaaatatacaataatctgttcttacatgcacaagtgtaggtaaatctgctttagcataagtaaataaatttgtatgttgaatgaaagcaaatatttttacagccttagctttggcttcctttagttttgccttgattacaagtaaggattttacttacccatgtctacctcataggaagaagaacaatattaactaaccaaacccctcagagatcccaaggactaaaccaccaaccaaagagtacacatggagggacccatggctccagctctatatgtagcaaagtatggcatcagtgggaggagaggccatttgtcctgtgaaggctcaagacctcagtacaggggaaggccagggtggtgaggtgggagttggtgggtggttggtggagcaccctcatagaagcaggggtgagagtatgtaatagggggtttgtggaggggaaaccaggaaaggggataacatttgaaatgtaaatgaataacacaactagaaaaaagaaacacaaaacaagctaagaagtaaatgaaggtaaattcaaagatgtagacacaaagttacacttgagatggtctttatcaaggtctaaacctttttgaccataggaagccacaattgggctttatagtggtagaactttagaaaatacagcatcatggccatacacaagatataaggggtcgtgaaaagagatgtgggaatttctgggtccctcagttcccttctgttgacaaactgaatttctctatcttacaggctattacagggttgggtggttgttccacattctatgatcttgcctggccctgctatatgtcaggaaggtactag

SEQ ID NO: 2642 - DNA, 1200 bp, mus musculus
gctgaggtctgaaccccagagtggtaataattcacctacatggcacagtgagtgttccctcatgtctcctggactcaaggctcctgtcaaagttactgccccacagcccccacaggagaaatgtggctagtagtcactagacaatgtcccaagcttctgaccttcagactaaactcctcccagttacctagcaaccctaagataacagcccatcataagaggggctgcttagccccacctcacactcttaagctctcctcactttcttactctcctcttactcttttactctctctccctcttgctctctccctcttaatctagcctttctcctctctctccttttcccccttctctcttcttggccagtctctctctctctctctctctctctctctctctctctctctctctcctcctcctcctctctctctctccttttctctttccccctgcctttctataataaagatctaaaatcatagactatctctgttcatcaaggcccactgtgcttggatgatgggataggctttcctctaatgagccatttcttttttttaataaggtatttttattagatattttcttgatttacatttcaaatgctatccccaaagccccctataccctacctctaccctgctccccaacccaaccacttctgcttcctggccctggcatttccctgtactgggtcttatgagccatttctaatctccaaatggaaggccttcctgtgctccagtcaaggcctggactaaggacgcttgcgtgagttggaacctctctccctcagccctttctccagaaaccccagggccaagggtgtcaccctgcggccccgtctggggctgccccttgtccacccctgttgagtggggtcagtggcttagattcccacccagggccgagtggaaagcaaaagtgtctggcagccctcccatgcccacctgcctagagcataggaaggactctggccagacgtgggctatcctccctctcccctttcccctacagcccctttagttcccacaaacttgggctttgaataacaaatcaatattgtttggtttgaagttcagtcaagaaatttctaattcatacatgaatttctaactaacctagaagtgatgaaaatctggaaattttactgtatttcactctacatttaggattctaattaataaatctctccat

SEQ ID NO: 2643 - DNA, 1000 bp, mus musculus
aagcaatctatagatgtattgcaatctccaacataattccaatagtcattcaaaactcagttttcagcttcatagggaaacatgcacacacacacacacacacacacacacacacacacacacacacacacatgcacaccatacacgcacaccacacacaggaatcagcaggataactaagactttcgtgaaaggtaaaagaactgctagagacctcatcatttttgatttcaagttgtactacaaaaatagattaatagaaataacatagaattgacaaaaaaaatgtggtgataaactgaatagagttaaaaacccagaataaaatctccacacctatggaaagctgattttttttttttttggtttgattttcttatttttagatattttcttcatttacatttcaaatgatatcccaaaagacccctataccctctccctgccctgatcccctactcactcactcccacttcttggccctggcattcccctgtactggggcatataaaggttgctagaccaaggggcctctcttcccaacgatggccaaataggccttcttctgctacatatgcagctagagacacgagctttgggggtactggttagttcatattgttgttccacttatagggttgcagatctctttagctccttgggtactttctctagctcctccattggaggccctgtgttccatcctatagatgactgtaagcatccacttctgtatttgccaggcaatggcaaagcctcacatgagacagctatatcagggtcttttcagcaaaatcttgctggcgtgtgcaatggtgtctgtgattggtggctgattatgggatggatccctgggtggggcagtactaccggtagattcagcaatacctctcctgggcatatacccagaagatgttctaactggtaacaagggcacatgcttcactatgttcatatcagccttatttataatagccaaaacctggaaagaacccagatg

SEQ ID NO: 2644 - DNA, 1000 bp, mus musculus
cagcacagggaaaactatactcaacaataagagaacctctgggggaatcaccatccctgacctcaagctgtactacagagcaaatgtgataaaaaaaaaaaaaactgcattattttggtacagtgtcaggcaaatagatcaatggaagagaactgcactcagtgataagtggatattagcccaaaatttcggaataccctagatataattcacagaccatatgaagcccaagaagaaggaagaccaaagtatagatgcttcagtccttcttacaaaggaggaacaaaagactcccaggaggaaatagggagacaaagtgtggagcagagactgaaggaaaggccatccagagactgcccaacctggggatccatcccatatgtagtcaccaaatctagacactattatggatgctgggaagaccttgttgacagtagcctgttatagctgtctcctgagaggctctgccagagcctgacaaatacagagttggatgcttgcagtcaaccattggactgattgcagggaccccgatggagtagttggagaagggagtgaaggagctgagaggatttgcagctctatggggggagcaacagtgtcaactggtcagactctcagtgttcccagggattggaccaccaaccaaagagaacacatgtagggacccatggctctggacgcatatgtggcaaaagatggccttgtttggcattagtggaagtagcgacccttgggcttgagggtgttagatatcccatgtaggggaatgccagggtgggaagatgggagtgagtgggtgggtgggggatcaccctcatagaggcagggcaagggttatggtatagggagtttttgaaggggagacctggaaatggtaaaacaatgaaattgtaaataaagaaaatatccaataaaatgtgataaaagcatctaacttgtcaaataattttttataagaatatatgtttaagtatgaataaaatttatggaaattttc

SEQ ID NO: 2645 - DNA, 1000 bp, mus musculus
cttttaaaaatccctttacggttcctggatctcaccaaaactagactgcacaggtgagagtgaggactacagaagctaacagcttctgggataggcaggagccacagagcttctgtggcagaccccgttttggggaccagatatccaggcaccttccctgccagaggagaggtgtcctcccagcccgggaagccaatgctggaacatctgccagagacatcttggttcccggatcctgccaagactagtctgcaaaggtgagagtgtggactacagaagctaaaagcttctgggtcaggcaggagccacagagcttctaaggcaggccctgtttcaggctccagactttcgggcacctgcactgccagatgagaagtgtctgtccaggcctggaggccattgcaggagcatctgccagagacatcttggatccctgatcctgcaaagactagtctgcacaggctccagacatccaggccccctcgggccagaggagaggtgtccaccccgcccaggaggactttgtggagcatctgctggagccattttcattcctggatcctgccaagactagtctgcacaggtgagattgtggactacataagctaacaggttctgggacaggccctgtttcaggccttcatcttctgccaggaggcaaatctgaacaacagatatatctgtgcaccttctgtgcaagaggagagcttgcctgcagagagtgctctaaccagtaaaactcaggagaaagttagtctcccaggtctgctggtagaggctaacagaatcacgaaaggaacaagctctaaccagagacaactataacaactgactccagagattaccagatggtgaaaagcagacataagaatcttactagcagaaaccaagaccactccccaacatcagaacccagtattcccaactcagccagtcctgggtacccccaacacacccaaaatgctagactcaaatttaaaggcatatctcatgatgatgc

SEQ ID NO: 2646 - DNA, 1000 bp, mus musculus
acaacaacaacaaaatgcatgttcaggaccaaatggatttaatgcagagctctacctgaccttcaaaaaagacctaatacctataacttcaacctattccaaatatggaatcagaaggaatactacccaatttgttctatgaagccataattattttgatacctaaaccacacaaagatctgtgggaattaaagtgggctggcgaagtgggggtagggaggatagcctgcaccaggccagagttcctcctatgctctgggcaggcagacatgggagggctgcaagatgctgaaccaacttgatgggggggtggtggacaagttgcaacaccctgtagcaccagagttattggagagagggctgaaggaaagaggttcacatgcaggcaagtgtaagtgcatcaggatttgatgaacagagtcagtttacagttttagagctttattatagaaaagccaggggaagaaaaaaggtagagagagagagagagagagagagagagagagagagagagagagagagagacttgtcatgccaagaggagagaagggggcaaggagagagagaagaaaggctggagagtaagagggagagagagaaagagaggagagagaggaaagagaataagaggagtaagagaaagagcaagaaagcaagagagtgaggaggggtcaaacagcccttcttatggtttgttcttatctttactgttgctaagtaactgaggaggagtctagcctgaaggtcagaagcttgggacattgtctatttgactaaaagccatgcttctcttgtgggggctgagggggtggtaacttcagcaggaaccagggttccaggagacatgaaagaactccttccatcccatgtaggtgaattggcaccaccacgtccaggggttccaccttagctcaactggagaccaatacccaacaaagacccaacaaaattggtatttcagaccaacttcccttatgaatatcaatgcaaaaatagtcaa

SEQ ID NO: 2647 - DNA, 1000 bp, mus musculus
cagaaagaatgatcaatttgaaacaggaaccaatcagctaataattctccaatttccttctttctctctagggttcatatcgttatctcgtcatcatgacacaatttgaaactttcaacaaggaagatttagggtcacagaaatgatggccggtgtcagtaacaggaactccaaggtcctggccagaatgtggacttgccgcagcttaaatacccaagcagacagggtgccttgtcttcctaggtactcgttttaattacttgatttggagttggggtggagtgctgagcactgggtgctggaatttagtaaagggagctttggcagatcaatcactgatctttgaattgttgtgcctggaatccaaccagagcattcattgactgccttctcctttgagggcaggttgagagtcaccccaaagaactttagtggctcaggatttaggcagcacatgtggctcagctgtgtccacatatctacacttgggcccagcatggtgccatggtaatctgtacctcttaactcctgaaaaacattccagcaaaaccaacatgtactgactgtgctgtgtgtaagaaggacccgttctgttcaactgtcaactaccccaccacaagccaaagatctggctcttgctcaccaactcctctactgttgttggaagcgccagtgacgtcacagaaggagttcttgtagtcaggaggttctgtagactgatcatttgttccttcttgttcgtccccttggtgtgattctgtgggttcctcctcacctgctccccttcttctgaaggtgtagggtgctccttatttgaaaggctgtcctttttttttcaattttttttattaggtattatgctcatttacatttccaatgctatacaaaagtcccccataacaccccccactcccctacccacccactcccacttcttggccctggcatccccctgtactgatgcatataaagtttgcatgaccaatgggcctctctttcc

SEQ ID NO: 2648 - DNA, 1200 bp, mus musculus
ttagaaaacaaaaagtgtcaaaaacacaagatacagtccagataactcaataaggtcaagaagctgaagaatctaagagaggatgactcagtcccatttgggagggagaagaaatcaaacaaaagtagggagggagggacctgggaagtaaagggtatggaggggtggataggggaagatgaacaggtactatagggtgaaggaaaaggactgaagccatcagggtcagcagaaagaatggaaacaggcaacctcaggaggtaggaggtttggggggccctctagaatgtaccagaagccagaaaggtgagacactcacaggactcaaagggagtccttagaataggagacctacattgggagagggactctatattgggagagggaacttgtcgagcccaccttcagggggaagacaggatatcaagtgaagggtgggcttgccataccacagtcaaaactctgacccatgtttgttcctttctgaaagaactggaaatggagaggagcctaaggaaaagaaggtccagcaacagactcaaagtaggatccagatcaaggggaggccccaagactgataagctataattagaacacaacatacaagcaaaataaaatgaaagacatgaaacaagatcccataatcagcccccaaacgctgacaccattgcacacactagcaagatgttgctaaaaggaccctgatatagctgtctcttgccaggctatgccggggcctagcaaacacataagtggaagctcacagtaagctattggatggatcacagggcccacaatggaggagctagagaaagtacccaaggagctaaaggggtctccaactctataggtatcacaacaatttgaactaaccagtacctcctggagctcgtgtctctagctgcatatatatcagcagatgacctagtcggcgatcagtggaaagagaggcccattggtcttgcaaattttatatgcctcagtacaggggaatgccagggccaagtgggagtgcgggggagggagtgaggggggagggtttgtgggacttatggggtagtattggaaatgtaaatgtaaatgaagaaaatacctaattaataaaaaaggggaaaaaagaaaaaaagaataactaagacagaaggtgataataggaactggtatatttctatggcagtctttaccatgtttcttgtcaac

SEQ ID NO: 2649 - DNA, 1000 bp, mus musculus
tcttgctgtttcagtatcagtgagtttatattggtttatatgagctttgctcagttgattctttagggatttgttctcctggtgtcctccatcacctttctgcctcttcttctgtggagttccctgaactctgtgaggaaggatttaatgaaaacctcccatttagagctatgtgtcccaagggctctcactttctctgtgatgtctagttatgggtctttgtatttgttcccatctattgcaagagtaagcctctctaaatatggtcaaataaagtagccatctttgaataaagtatatcattaggtgtcattgggttttctttagaccagtattatttgattttaccctagatccctgggcttctagtctcgggttcttggtcaaacaaggagtgtccaatctgagttctgtcatgcggagtgggtattaagtcagattagagattattcttaagggtagtttgaaggcctagcaataaatggcaacaacaacagcagcaacaacaacaaaaacaactcaccagtatttttagaaaatttttattttacaatgtcatatcagtgcttttccttttttctttcttttttctctcttcttttctcttaatttttctgtctttcttgtttggaagcttatcttctttttttacaatttttagtttttatttactttttcattttttaccctttcatagactaaaccgctaactgaagcaacaggctggaaccaggcccctgacatatgtagcaggtaagcagcttggtcttcatgtgggtctcccaacagggatgtatgtgtgtgtgtgtcagggtggggggggttatcccttaagctgttactgtttgtgaaatctgatcccctaacctggctaccttctctagtctcagtgggagaggatgagcctaaacttgcagagagtttatcagggtctgaagatacctagagtgtcctctaccctctcagaggaaaatgagaagaagggataggcagtggactg

SEQ ID NO: 2650 - DNA, 1400 bp, mus musculus
cttctacctgtttggttgtgttttcctgcttttctttcagggcctgtaactctttagcagtgctctcctgtatttctttaagtgagttatgaaagtccttcttgatgtcctctaccatcatcatgagaaatgtttttaaatctgggtctagattttcggttgtgttgggatgcccaggactaggtggggtgggagtgctgggttctgatgatggtgagtggtcttgatttctgttagtaggattcttatgtttgcctttcgccatctggtaatctctgaagctagctgttatagttgtctctggttagagcttgttcctcaggtgactctgttagcctctataagcagacctgcgaggctatctctctccttagtttcattgggcagagtattctctgcaggcaagctctcttcttgcagggaagttacccagatatctggtgttcgaacctgcctcctggcagaagttgtgttccactcactagaggtcttaggatcctgtggggaatcctgtgtgggcccttgctggtgtcagaagactccgctggcgaggcaccccggtgctcgagtggagtggaagcgacttgtgcctcaggtcaggcctgggtccactgcttccctagttaccgcagtctcaggttctgcgagattggattggggcagacgctgtgttccactcaccagaggtcttaggatcccgtggggaatcctgtgtgggcccttgcgggtgtcgggtgactccgctggcaaggcaccccgatgcttgagtggagcagaagggacttgtgccccaggtcaggcctgggtccactgcttccctagttacagcagtctcaggttccgcaagattggattggggcagacactgtgttaaactcaccagaggtcttaggatcccgtggggaatcctgtgtgggcccttgggggtgtcgtgcgactctgctggcaaggcaccccggtgctcaagtcgatttcttattattttacaatgaaaattttgattaaggaagaactacacatgcttataacttcagggctgtggcacactgagaaagaaaatctgaggaggttgctagacacacagcctatctaaaacagtgaacaccaggtttcatgagactctctcaagaataagtagatcaatagaggaagacaacagtagtcaatcatattttctttggcttttggtacatgcagacattagcaagtctgcttatgcatatagaggaaaaggaagtaaggatagaaagtttgtaatgttaaatattgtagatttttattatcaccaattcagtttaaatttagaagttatttgttgatactttcgtttctgtttttttttttttctatgcatgtattagatttttaaatgttcaaaacttgcagatctttttgcccat

SEQ ID NO: 2651 - DNA, 1000 bp, mus musculus
gaagctctctctttctactggaggtggactctacaagttccctgtccccactgttgggcctttcattgagtcctgacagtctcgcctcccaggactctcatactttctagagagtaccctacctacccgtacccagcaggttgcatttccattcattctggtgctcattggggcttctctcatgttctgccccaaaactgagtatgttccccttatcccctcaccttcccctctctcactcaggtccctccctctctctgcttcccatgattgtcatattctccctcccaagtgtgattgaagcatctttacttggggtcctcagcttgttaaccttcttgagttctgtgggttataaactaggtattcagccaggcagcatacactagctcgtccaagggcccagaaacatatataacagagaacttcctagcctggcctcagtgggtgaagatgcacctaaccctcaagatacttcagacctcagggaatggaaaggcatggctagggtggtgtactggctagtgttgtgtcaacttgacacagctggagttatcacagagaaaggagcttcagttgaggaaatgcctccatgagatgcaattgtaaggcattttctcaattagtgatcaagggggaaaggccccttgtgggtgggaccatctcagggctggtagtctgggttctataagaaagcaggctgagcaagccaggtgaggcaatccagtaaagaacatccctccatggcctctgcatcagctcctgctttctgtcctgcttgagttccagtcctgcatcctttggtgatcaacagcagtatggaaatgtaagccgaataaatcctttcctccccaacttgcttcttggtcatgatgtttgtgcaggaatagaaaccctgactaagacaggtgggtatcatcctcttggagacaggggaaggaggaatggaatgaggaactgtgggatggtgaactgggagaacagcaatgactggattcta

SEQ ID NO: 2652 - DNA, 1200 bp, mus musculus
ggggagtggagagtcttctggggactgtaagactgtccatcgagtttaagcccaaagtttccaggcactggtgctgacctgaaggaacctggtcaggtggggctactgctggctgaaggcactcccagttgtgttggaaatatatgaaatgcttcatgattttgcatgccatttttgtgctggggccacgctaatcttctctgtatagttccaattttagtatatgtgctgccgaagcgagaacgaatgattaactttaaaaaaaaaatatcggactccaccgaacttaggaacttagtctgcacatgtgagagtgtgcaccacagaagctgacaaattctgggacaggtgggagccaagagcctctgaggcagcgtcctttttggggtccagacatcgaccaccctccaggccagaggatagttatccaccctgcccgggagccctttggcaaaggagcagtgggtgccattttggttccgggactccacttaacttaggaacttagtctgcaaaggcgagagtatgcaccacagaatctgacagcttctggggcaggcgggagccacagattctctgaggcagcacccttttcgggctctagacatccagccaccctcctggccagaggacaggtgtccgcccagctcgggaggcctttgcctcaggaggggcaagagccatcttgtttcctggactccaccgaacttaggaacttagtctacacagatgagagtgtgcaccacagaagctgacagcttctgtgacctgccaaagcaacacagcttctgggaaaggtcctgttttgggccttcatcttagcccaggaggaggtccaaatgccagatatctgtgcaccttccctgtaagaggagagcttgccagcagagagtgctctgaacactgaaactcagaggagagagctagtctcccaggtttgctgatagacagtaacagaatcatctcagaacaatctctgaacagagacaactataacaactaactccagaggttaccagatggcgaaaggtaaacgtaagaatcttactaagagaaaacaagaccactcaccatcatcagaacccagcactccgaattcgcccagtccagggcaccacaacacacccaaaaaggtagacctagatttaaaggcatagttcatgatgatggtagaggacatcaagaaggactttaataact

SEQ ID NO: 2653 - DNA, 1400 bp, mus musculus
tgggtaggggattgggggggtgggtatgggggacctttgggatagcattgaaaatgtaaacgaggaaattacctaattaaaaaaaaaaaataaataatgtgtatggagatataatcctccctttttaaagatattgacttaaatttccacaatatcattttaaagatattatcttaaatttccacaatatcttgtccttgagaatcataaggaatcccaataatatgggtaatattaaattttcttataagacatctcaaatgcttgactctagtagccagttccattatttgttttaacctgatttggagcaccaagcataaaaataatgcatgcagtgactaattacatttttagttgcttctcctgttaaagcagttgcaactagaaagcctgaaaaagtatcagtattcacatgtttatattttatttgtctaaaatcagaaaagtaagtatctatttgcaatagctgattaagtagaagtcctgaaagacccacaatgtgaggactcccccacgttctgactcaggagaggcgacaccccaaatcactcatgagaaacggtcttgctgcaaactgcaaggggacttttattcgagagctctctcgggcccacagtcatacaccatgcaagggtagagaggaccgtggtgccccaagtagctgggtaagggggtatttaaaggaagaaaccacaactcaagagtgtgggaggagcgttgttggaaaataccaaaaataccagttaagagtcacaaggaagtgcaaagtcacaagagtcacaaggaatacctggtaattgtgtgggttatttctcaagacagtttctaaaagcccctaacaatagcacatttgcatagctggttacagcaatggtcagggtgggtcagggtgactttctttgaatgaacactccttgatctcaggaagcgggtaggcagaggaatgtctctatctgttttatgattagcataccttggagcactgagtcacagaggtcacattctcaagcctgggcctaaaggcctagaattttgcttttatgttatactttttcagtactctagaattaacaccattatgtggaacaagtagaaactgaggacattgataacaattatttacaatttgacatgcacattctctaaaaatacaaaattattatctcaagccattactattttgatgatgtaaagaatgggattatatggcaaattgtacttgtgtaagacctataatctgcctgagatacaaatatgctctggcattgccttaagggggtctgtccagacagtccagaataagttattaaaagtccaaagacagtcctttaaaggaacagtattttctcttaacttgagttgtatatgcataaaaagttgcaaaatttgagaattag

SEQ ID NO: 2654 - DNA, 1000 bp, mus musculus
aaagtattctatagatgaattttaatccagcaacatggctactttggcaaggggtgaaatccaaagaccatttatgtttatgttatccagcagaaatgcagccatgtcctggtttatgatctgtctaaaatgcagacatgcccttaatacatacctctaatcccaaacaatgatggtaaagttagtttgtagaaggaagtagccatgtttgaaagtgacatctaattgaggccgacaaagtgatgaatcagagaaagatttgacacgagttggagatattatattcccaactctcacaagaagagcacaagaaagaggcactttagagagagcacagagagcaggagagggatacagttaactcagagaaaagtagttcagtttagagcaattcagttattatagttcaaagtcagtcttttcaagaagtacaattcagacagaagctgagagaacccaattagaatcaatcaccttagagagtagtttgaagcaaattagctgtggtaaacaagccagctagagtgctagaaagggtgagtttactcaacgataaacctatgagataacaattacatctcacaaataatagttacattttgtcttagtcagggtttctattcctgcacaaacatcatgaccaagaagcaagttggggaggaaagggtttattcagcttacacttccacattgctgttcatcaccaaggaagtcaggactggaactcaagcaggtcaggaagcaagaactgattcagaggccatggagggatgttctttactagcttgcctcacctggcttgctcagcctgctctcttatagaaccaagacttccagcccagagatggttccacccacaaggggcctttcccccttgatcactaattgagaaaatgccttacagttggatctcatggaggcgtttcctcaactgaagctcctttctctgtgataactccagctgtgtcaagttgacacaaaactagccagtacacattta

SEQ ID NO: 2655 - DNA, 1200 bp, mus musculus
gaacatatatgttattgaaaaataattgcaaataaaaataatgaatttgattcaccactgtgagaaacttcaaatattttaatagggtttaatatattttcatttagttttttcagcatgtctgtatctaaagttggataaaatgcctgttcaacataaactaaattattcaaaaccagagaattaaaaacacataaaatatatatactgccacccctagtgtcatcttaggcgtgatctcggtggagggccccaaggtccccagaggtctctccatgctgcaggcaccctagcacaccagggatcttgagaacactggtgagtggaacaaaacatcagtttcaaaaaacccagaggaccttgtgctagcaggagcagggacaaaggacaccagcccaaccagtgcctggggttcactctgaccagcgccacaaccatgccatcttggaaacaatctcagcagagggtcccaaagtccccagaggactctccactccgcagtcacacgagcatacctggcatcttgagaatactggtgaatggaacacatcagttctgaaaacttcagagggtcttgtgctagcagcaatagggtcaaaggacaaaggcaggccctagcacagccagaatctttggatcactgagactagtatatgcaggggagcacatgggcagcagaagcaacagagcttcttggacaggatgccttcaggccttcatcctcagccaggagacagagctgagacccagtcccctggagaccttccatgccagaggagagttggcctccagaggagggctctgaccccaggaatcaggaggtggatctgagctccagacttatgtgcatcttctctgcaaggggagagcttgcctacagagagtgctttgaccactgggactcaggagagagatggtctcccaggagtgctgacagaggctaaagaatcagaggaagactccagtgaatccttgaaggaaaccttatctctctgcttctcatcctcaggtggaggagcttccccatctggttatgcttcttcaggccccaccactaaagaggtggattaagtcagttcaagaaaggggtgtagcattgttttaaaaggaacccaaaacaaataacatgggatgataaaactatttaaattggcaccaaaaaaaaaaaaaagtgaatcacaagaggaacaagctccagtc

SEQ ID NO: 2656 - DNA, 1200 bp, mus musculus
ttgaggagtaggaaagcctctaattaacaaagcagtcttccgttgtcacatgtccagcgctatcgtctcgccagcgaaaacacacatggaacacaaggatccttcttcagcaaaacgtttattgcatcttggagaggaagaccccgagccctagaaaggagctgcttatataccccctagcgtggcgtgtccacgcctgactggtcgcttacccacgatctcattgacacgccctggggtgggctaagacttggcgcgaacacactcttgcacaggcacacacatcttgttcactgacaaaggttgagctggtacagcggaatctggtgccatcttgtggcggcgaatattatcgcggctctccacatctccccctttatgttttattaaaatgaggctggtctaggcctctgcagttatgtccatcaactgtggctcctgttttaggtcgttcctctaatgtcacagccttacccgtcatagggtaaccctatcgccactgggccccgtgtcttaggttggtctgtgcatgaggaaagttgcccgtctctggataccgcagtactgtgtgacagtaactgctaaatgacctagggcgaactctacaaaagaggccagccaaaaatgaattagtgggggaatcatgatcaccctatcaagtgcaatgaggaaacctcagcgatgtgcaagggctgatcaaggatcgttgagtctctctcatcccagtgcaatggatccacaaatccgtggggtgcaagagcagagaactcagatgccgactaattcttgagcatagataaccaaatttcaggggagggcccttgctctatggcagcaagtgcttgagcaatcactaccttgtcacgtttctgctgagatctgagtttgcagaccaaccatagcatgaacactaacccacaacacagggctgcgccaaacagacccactgccacccattctttgaagtaagaaaaaactgaagaaatccaggaagagagtccctccgtcagcgacaggtccactcgtgttgagttgatagccaacactgctgccctcaaagactcgagagtcttgtcaaatccttctgaccagtttcctgcaagatacaatgacaattgcctagacaaattagctgcttgggtaaaattttcctactgcacactggtaatgcagagcgcccccagctttctttcacatcct

SEQ ID NO: 2657 - DNA, 1000 bp, mus musculus
ataaaaatagatagacagatacatacatacatacatacatacacacatacaggcaaaacatcctaaaataaaataaaaataagtaccttttctaagaaaatcagagactaatggaagccatttctcagttcagatccctgttcccatgttcactgaaggtttctgtcaggttgatacctaaagctatgacattgcataaggagaattaatcaagctctctttctgaacctccaagaactaacatcagaacacacaggcgccttcaggtctatgccagcaccagggtactttgggcatagagtctgaggactcccccaaggtctcaacaggactctccatgggatcttaggacctctggtgagtggaaaaatacttctgctacaatccaatcaaacaggacttgagacggcattaattagggaagcagaaaacctggcctgacaagggtcacaagtcccttctggtcagtgccagcacctggacaccttgggctcagagtctacagacaaccccaaggtccccagaggactctccacaggatctgaggacctctggtgagtggaacacaacttctgccgggaggcagtttcgaacacgagatacctgggcaccttccctgcaagaggagagctagcctgcagagagtactctgaccactgaaactcaggagagagctagtcttccaggtctgctgatagaggctaacataatcactgaagggacaagctctaaccaaagacaactataacaactaactccaaagattaccagatggcgaaaggcaaacataagaatcttactaacagaaaccaagaccactcaccatcatcagaatacagcactctcacaccacccagtcctggccagcccaacacacctgaaaaactagacccggatttaaaagcatatctcatgatgacggtagaggacatcaagaagaactttaataactcactcaaagaaatagaggaaaacactgctaaagagttacaagtcctta

SEQ ID NO: 2658 - DNA, 1000 bp, mus musculus
atgtggacgtgctattggcagttgagaattgcttgaagagaagtagtcattgtcgtctttagtcatgtagccaccagtgaatgttttacaaatcaaaagcaaaaacaaagcaaaaaaacatgaaagttgaatatataatagatgaaaagagaggattggtattgggaaaggagaagcaaaagtaggatgatgaatgagaccagaattcaatatattcttgttggaaattatcaaagaaaaatgtttaagtaataatgccccaaattgtcttaatcaattgttgtcttttgcagaacaatcatctgaaggtttaaatcataacacttgctattaagtgatgcataatcattctttcatgtgatcagtctggataattgttaaagggaaatttaaaatgacaaattttgtgatttttttcaggttttgtgattttatttaaacataaaatatgcacacaagccatctattcattttcttcgctgcgtagcctggcgttgggattggagactctgatagccagctgtgctgctctttctacaatggcttctcggttcttagaggacacattgtgagcaatctcagcacagtaagatttgttacacatgagcagcacttccagctccttgacatcgtggaccaggaacttgcagaagctgctgggcagcatgtgcttggttttcttgttgctcctgtaactgatgttgggcatcaggatctcgcccttgaaccttctccgaaccctgttgtagatgcctctgggtttccaccagttttgcttaattttcacatatcggtctgactggtgtctgatgaacttcttggtcctctttttgacgatcttgggcttcaccagaggccggagggcagccatgattccacaaaacagatggcagccacctcgtaggcagcgccgaggaagaagcctaattttgtgattatcaactagtatattggcttaaatttatcgacattaatttatagataaatactggaaacatag

SEQ ID NO: 2659 - DNA, 1000 bp, mus musculus
ttaagtgagttattaatgcccttcttaaaatcctttaccagcatcatgaaatatgatttttaaaacagaatcttgtttttcgggtgtgttggggtatccaagactcgctgtgttgggcgtactgggttctgatgatgttgagtggtcttggtttctattagcaagattctttgcctttcaccatgtgataatctctggtgttagatgttctagctgtctctggctggagcttgttcctcctgttattctttagcctctgtcagcactcctgggagaccatctctctcctgagtcccagtggtcagagcactctctctaggcaagctctcctcttacagggaatgtccacagaagtctggagctcagatccacctcctgagttctggtgtcagagccctcactggaggccggctctcctctggtagtgaaggtgccaaggggtctgggtctcagctctgtctcctggctgaggatgaagacccgaagggaccctgtctaagaagctctgttgattctgctgcccaggtactctcctgggtagactggtctcagtgatcccaagattcttggtgtgctaggtcctgcctttgtcctttgaccctgttgctgctagcacaagaccctctgagtttttttggaatagatgatgtgttccactcaccagtgatctcaatatcctgggtgtgcttgggtacctgtagcatggatattcctctggggaccttgggaccctctgctgcgatcatgcccaagatgactccagtgtggtgctgaccagaaagaaccccagccactggtcgggcaggtgtcctttgaccttattcctgctagcacaagaccctctgggattttttggaacagatgattaccagtgatctcaagaccctggatgtgctaggatgcctgcagtgtggagagtcctctggggaccttgggaccctccgctgcgattgtgcccaaaaaagagaaaaatgttttctcgatatcttttagatccatt

SEQ ID NO: 2660 - DNA, 1400 bp, mus musculus
aaacagagcaaaaaaatggttcaacagtagtttaggtgaaatctctccattcttcccttaatctgcattttagctgaaaaaagctttaaagtaagtaaacgaaattttggaaagttgggtttattcaataaacacaaagcatcttatgtcatgaatgccaaatcacatatgaaacattggcaataagtctggattttgacagtcttagataattttaacctaaagaatagtccaagtgaaaccaagaaggcaggtaatgtagaggaaactattaatagatacatattggagaaatacagtagaaaacaaaaataggacattgcatttacacaatttgtttaactatcaaatataagtaacatctatgaaccatagtaatctgatttatcttcaattcaatctcaaaaacagatgattagtatgctaaaacatatgaaggaaatattgcctacctaatatttccagatccctcacatataacaatttgagtcttaccccaaatctcagtgattatatgatttaatttttttaaaaaaattctaatttcctggatatttacatataactttaaatctctttgatgggccaggcagtggtggtacatacctttatacccagcacttggaaggcagaggcaggcagatttgtgagttctaggccagcctggtctacagagtgagttccaggacagccaggcctacacagagaaaccctgccttaaaaacaacaacaacagtaacaacaacaacaacaacaaagagtctttgatgtcaagtttatttagtttagtagcatttctctgagttggaatatgaaacccccatgaaaaaaatcagataggaacttgtccatattctattactgtgcatattaatcttgctcttggctttattaatctagttcttgatagatttggctgctatagtgcctgtacctagcagcctgaccttgtctccagattctgacttgctccttggttcatagtacttggcagtaatctatgacatttctttaggaagaacccttttgatctattggtctttgatagcttatacataaactgagattaaggattgttggatatgactggtgtattgatacagaggaatatcatagaaaaagagtacacaaaagaagtggctagaaaagattaatggacctaacccaccgagaaagcctcatcatcaacaaggacaaggacaaaaactgtacagtgttactacctgtcttggaaattttcctcttgactaagaaagtgttaaaaatagaaactttatagttattcctgattctaaaccattttgcaaaagggtataatttataatttaagagaaatattatacctgaagcattttaaatggaaaggtctaagtttatgttaagggctttcattctccttc

SEQ ID NO: 2661 - DNA, 1400 bp, mus musculus
ggaaatagaaaagggaatatacatatatatatatatatatatatatatatatatatatatatatttcatccacaatgagtgaagttttgtcttttacaggaaaatagatgcaactggagataattattttaaatgaattaaaataatcatagaatgacagagtcacactttatctctatgtggctcttcaagtttatgtagacagaagcacatactcattgattatgaaagtagaagcaaaattgtctagtaggacaaagagttaaacaggtgtgtgggagcaagaaaacttcacatgtgttgtatgagagggaatcatgctaagcatataattcatacacacatgaaaccctgaaaatatatttaattatattttttaattaagaaaaagtctataacacaactggtaaagctaaggctcagggattgagataatagaaagactatattgccaggcggtggtggcacacgcctttaatcccagcacttgggaggcagaggcaggcagatttctgagttcgaagccagcctggtctacaaagtgagttccaggacagccaggtctatacagggaaagccagtctcaaaaacaaacaaacaaaaaacaaaaaacaaaaacaaaaacaaaaaaaacaaaaacaaaaacaaacaaacaaacaaacaaaaagactgtatcaaccaaccagaccccccggagctcccagggactaaacctccaaccaaagagtacacctggagagaacctatggctccagctgcatatgtagcagaggatggccttactgacaaaaaggggagaaaaggttttggtcctgtgaaggcttgatgccccagtgtaggggaatgtgaggaagaggcagggaggtggtagtgggtgagggggactggggatgggataggaggtttctaaaggggaaactggaaagggggataacatttgaaatgtaaataaataaaatacccaataaaaaaataaataaagactgtaagaaccagagaagagagaagtgagattgtttctcgtaggaatgtaagaatctacacctaaagcctcatttacattactaccaagcatgagctgaataaaaatgacattagcatacatggaaacaaagaagtgagaaactcatgtggcctcaacctagataaacagctataagcaactaaagaatactgagactaggagaaatagtctttgccatggaagagatgacaaattggttatgcaataacaagtgttcatttctgaacatttatacatacaaataaaaatatgcagactgagaggatgtacttacatatttaggaatgtgtgcatgcttctgtatgtgtgtgtgtatgtgtgtgtgtgtgtgtgtgtgtgtgtgtgtgtgtgtagcaacaatgaaagaatagagagt

SEQ ID NO: 2662 - DNA, 1200 bp, mus musculus
agtgccctctagtgtccagattctgatttctgaaactattttttccactataaaggaatcatggttccttgagaaaatgagagattctatgccctgggcagaaaggtacaaggtgaatctagaaagactagtgccaaatagaaacaaaatttctgttaacagattctactagaagtttgcattaataaaattaggaaggacttccattggccaaagttattctaatttgcacatcacagaaacagcaatgcttagaattgagggaagtacagtaactccccaagacgctatgcctccatgacactacaaagagaaatagtaacacatgattctaaaataaggtgaacagaatacaatgcatttctatagagccttgcatctcactcatgagacattattgattaatcttttctctcaatggagaatagaagaactaaaatcgtacatacaggaattgaagggcatttgggaaaacaggcaaaattctgaaaatgtcactgttgttaatgttcttcccaggaggagaaataaacaacatctattgcttcttctaaggttcccaacaacaaacagaggtgcaattctgccaaagttcactctggggaacaaatgagttctctacaaatgggcttccttacagaacttgggttctggactatttacaaggatgtggatgctcctggcccacaacaagcaacacctgcaaagctgttacctaacaggcatgagggctccccacataagacatagatggagccctccccctcccaggctaccctggccttttcactttagtccctccctgaggccatgtgcaattgaggcagagatttatatgacaggtggtagtaagtagaaggacactcaggtaatgtcttgtaaccagttctccctctccacaaaccagtgtaaacagtcagtaagtccagtaggagtgattctttgttcaggctagtacagccaaactctgccaagtggtggctgcttggcttggagggtagtcattcatagtagtccccctgaaactgagatttgaaatcagataaaaaccaaataaactgcctagaattcagttctgcacaaaattaagtatctttaagatatgtgcagtttcaagaacatgaatgaatgtaaaatgtctcagcatatctcaggatcccatctgcttccaaattctttagggtaagaaaaatgttaatg

SEQ ID NO: 2663 - DNA, 1000 bp, mus musculus
cgagagagagagagagagagagagagagagagagagagagagagagagagagagagagaggcggaggcattttcctgcacagtcccatcccccacaaggttcccccagttccgggaaggtagagggaggcccgagtctaggagagactcggggctcaggatcgggataccccgctacccggccgcgcccccgccctgccccgcccccgctcagcaggcggccagcaggaaagggggaggggagggaatgctagatggttctgccgccccgctgcccccatccctgcagtgattttggtacctgtcggcgccaaaaggtcagggtttgggcccctgtgaggggccaggcacgggatgtgtccagcacacacagagcgcgcgcacacacccctttcctatttacctccttcttctcgcccttctcagtggccgtggtgccttcggtggcggcagcagccgctccctcctctttaaaggtggacggcccgggctgctcatcctctacaaccacgactgtggctctggcatccgaaactgccacggtggctgcctctgtggccgtgtccggctccatggcgttggagcgggaaagacgaggtgggacgaggaaggggagaagggaggttcctgtgcgacagcggtggctgcgctggaaagagcttgctagagcaggggtggagaatactagcttccaaccccttcgctcgccccccaccttctttaaataaccctcaaccctgccccacttccgtccacccaccctacgtcatggcctccccccatcgccctcccctccgccccccctcaccaatcgcgagactccccctccccatccagagcccaggctggtcccacaggaccaactgttgcctgactgtggggtgcactcgggggtggagaacgaaacccacagctcgtggccccttaaattttctacttctccatatgcccccaacagtgagcctgagttcccctgacagatgtgtgcagaagaaattctc

SEQ ID NO: 2664 - DNA, 1000 bp, mus musculus
tagcacctatgaaaggagttggcaccaaataactgatcaatatgtatctaagaaatgcgtaaatcttaatctgtgtcaagaatacactgatctgaaggcagcatcaaggcacaatcagagacggggaagctggagagatcacagttatatttggaagctgtcgagtgagcctatacggtccctatcacctacacagcataaatccgtgacacttactgggctctgtggcaacaggctactgctggtctcttgagtacttggaggtcgacttccactttcctccagtggcaaaataccccttcgatccaggacactgaaagaaacagaagaatgaatcaaggacttgacagtcactcttctatcagctcagtccccactaaaccttggtctgtacatcagaaagcaccaacatgccttcagcaatctgtcctgaccccagcacacatctgtcttccatttactcttccacacactggaggatgtcacattaaccagggaacaaacgaaacagccagcccatggttttacggctcaggctcatggagatgtggtgccctgtgacaactcccaggaagacctatttgatatcagaaagttccatgcagaagaatgcagcagggcaggcatggggagaggtttgaatagtgcagcttaagagtccagggtggttttgttgcttgagtacctggggggcaaggggccacaaagcacttcacagcagttcttcacaatgttgccgtggctgtacggattctgcacacgattcttccctgtccatgatcctttgatctgcaagataaaagccagggcttacactgaaaaagaaatacgtcgaagaaatacaggcagtgtgggctaatgaagaagggcgagaggcaacaattacacaataaactgaatgcactacctgtcactgacctgttcctttaaaacagttaaagaggtcacacaccctggaagcctagaacttgggagaccaaggaagggattctgggtgcta

SEQ ID NO: 2665 - DNA, 1400 bp, mus musculus
ttatcatgtaagtctgcttggttagagttactccaagatatcttatactatttgaagctactgtgaagggtgttgtttctctgatttccttttcagtccatttgtcatttgtatacagtagggctactgatttttgtgagttaatttttgtatccagatactttgctgaaagtgtttatcagctgtaggagttttctagttgaacttctagggttacttatgtagaccaccatatcatctccaaataaagatatctggatttcttcttttctactttgtattcccttgatctccttcagttgtcttattgttctaactaagacttcaattcatactgtattgagtagacacacagagagtgggtaaacttacattgttcctggtttcactggaattgctttgaacttctctgcatttaatattggttatggattttctgtacattatctttattatgtttaggcatgtaccttgtatccctgatctctccaggatttttgtcatgaggggtgttggattttgtcaatagccatgtctgaaggaaatgagatgatcctgtgttttttgtatttcagtctgtttatatgatggattacatttattgaattgcatatgttgaaacatctctgcttctgtaggatgaaacctacttgatcatggtgatggatgatcttaatgtgctcttggatttggcttataagtattttattgaatttttgcatctgtgttcataagggaaattagtctgtactttttttttttcaagacagggtttctctgtatagcccaggctgtcctagaactcactttgtagaccaagctggcttgaactcagaaatccgcctgcctctgcctcccaagtgctgggactaaaggtgtgcgccaccacgcccggcttgtacttttcttcttttgtttgtttctttttgttgggcttttatgtgtttttgggtatcagggtaactgtggcctcatagaacgaactgggcaatgttccttttgtttctattctgtggaataatttgaggagtattgggtgttaactcctctttgaaagtttcctaaaattctgtgcaaaatcatctggccctgggctttttggtagggagactttattactgcttctatttcactagaagttataggtctgtttaaattgctgatcttatcttaatttcacttttgtaaatggtaatattgggaaaattatccatttcttttggattttccaatttggtagagtccaggcttttaaagtatgtctttaggatgattatctggatttccttggtgtctattgttatgtccacctctcatttatgattttgttaatttcaatattctctttctgcctttagttaattttggataaaggtttgtcagtttctcaaagaaactat

SEQ ID NO: 2666 - DNA, 1400 bp, mus musculus
tgtatatgtgttatattttttcttaactgttcttctattgaactgctaggttagctccatttcttagatatatgaatgtgaacatatctcaatggtgggatataaagccctttggggatacagaatgtttagacttattatgaatgttactgattataaatgaggcatgaaagagagagagactgagaaggagaagagagaggacgaagaggaagaataaatgtatgtgtgcacaaaagagaacgagactgagagagaaaagaggagaaagaaaggggaagagggaggagaggagaggagaggagaggagaggagaggagaggagaggaggggaggggagaggagaggaggggaattactgatttctatgtagttagtcattttacttcttttattagatatttccattatttacacttcaaatgttatcccctttcctggtttcccctccaaaaccccttatcccctcccctctccctgctcaacaagtgaaacactcccacttcctggtcctggcattcccctacactggggcattgagccttcacaggaccaatggcctctcctcccattgatgtctgataaggctatcctctgctacatatgcagctggagccaaggttccctccatgtgtattctttggttggtgctttagtccctgggagctctgggggtactggttggttcatattgttgtttccctgatagggctgcaaaccccttcagctccttgggtcctttctctagctccttcattgtggaccctgtgctcagtccaatggatgactgtgagcatccaattctgtatttttcaggcactgaaagagcctcacaggaaacagccttaacaggctcctgtcagcaagcatatgttggcatccacaatagagtctgagtttggtgattgtatatgggatggatctccaggtggggcagactctggatggtcattccctcagtctctcttccacactttctctctgtaactccttccatgggtattttgttcccccttctaagaaggaccaaagtatccacactttggtcatccttcttgagtttcatgtggtttgtgaattgaatcttgagtatcccaagcttctgggctaatatcgacttattaagtgagtgcatatcttttttttttttcagagagttccatcccactaaacctcagattgtttttttttttaattttttttattaggtattttcctcatttacatttccaatgctatcccaaaaatcccccatacccacccccccactcccctacccacccactcctcgtttttggccgtggcgttcccctgtactggggcatataaagtttgcaagtccaatgggcctctatttccagtgatggccgactaggctgtcttttgatacatatgcagct

SEQ ID NO: 2667 - DNA, 1000 bp, mus musculus
gtctaagaggttttctaaataatacaatctattgctgttacccatagtacatcctcaaacttgaaggtaagactcagctgctgacaacactacaaacatttatgaagcaggacttgaaagaatgaggctggtactgatttgggagtttcttttctaaggactagctctcataacatcagaaggtgctatgcaacatgccaagagagaaaaggaatcaatagccaaaaccagctgttaatcctataaaccacaacaaatgaccagcctggtatgttatctccaattgcttgctagtgatatttttatcttggtggtaactaacatctatataattggacttaaggggggttccccgattccgctgagactgatctgagcaggtgagagtgtggactgcagaggctaacaggttctgggacaggcagaagccacagagcttctggggcagaccacatttcgggctccaaacatccgggcaccttccctgccacaggagaggtgtccggcctgcctgggagggctttgccacagcatctgggggagccatcttggttcctggatcctgccaagactagtatgcacaggtgagagtgtaaactacagaagctacatagattctgggacaagacctgttacgagcctcatcttctgccaggaggcaggtccaaacaccaaatatttgtccactttccctgcaaaaggagagcttgctggcagagagtgctcttaccactgaaactcaggagagacctagtcttccaggtctgctaatagaagctaacagaatcactagaggaacaagctctaacaagagacaactatataaactaactccagagattaccagatggcaaaaggcaaatgtaagaatcatactaacagaaaccaagaccactcaccatcatcagaacccagcactcccaactcacccagtcctgagcaccccaacacacccgaaaagctagaaatggatttaaaagcataactcatgatgatggta

SEQ ID NO: 2668 - DNA, 1000 bp, mus musculus
tggtggtatgtatatatcaataaatactttcatttgacctaagccaaatggccaatgtttagtggggacacattttttaaaaattatttttattctttaattgttgtgtagagtccagacttcatctccctccaagtcccccccacctcacccgaccacaccccatgccataactcccctcatctcagtctccaagaggatgttctcacctccacccccacaccaccagggctcctcactccctggaacatcaagtctcttgagggttaggtgtagcttctctcactgatgcaagaccaggctgtcctcagctgtatacttgttgggacccccatatcagatggtgtatgctgcctggttggtggctcagtgtctgagagatcttgtgtgtccaggacagttgagactgctggtcttcccatggggctgccctcctgctcagcttcttccagcttttccccaattgaaccacagggttcccaagcttctgtccattggttggatgccagtatctatatctgactcttgcagctgcttggtgggcctctcacagggtagccatgctaggctcctgtctgcaagtccaccacagcatgagtaacagtgtcagggcccgggccttcccttgagctggatcccaactgggacctgtcactggaactcctttctctcatacttttctccatttttgtccctgcagttctttcagacaggaacaattatgagtcagagcttttgactgtgggatggcaaccacatcccaggtctctggtgcattttggagggtaccccaacctcctacatcccaaggttgcctgtttccattctttctgctggccctcagggcttcagtcctgttcccttcaatacctgatcatgttccaccttcccttccctgtctcatctcccacccaggtccctccttccctctccagccctgactgcgttcatttccctccaaagtggggattaaggtatcttcacttgggtctttctgctt

SEQ ID NO: 2669 - DNA, 1000 bp, mus musculus
atattagcccagaaacttaggattcccaagatataagatgcaatttgcaaaacgcatgaaactcaagaagaacaaagaccaaagtgtggacactttgccccttcttagaattgggaacaaaacacctgtggaaggagttacagagacacagtttggagctgtgatgaaaggatagaccatctagagactgccatatccggggatccatcccataatcagcttccaaagctgactcaattgcatacactagcaaggttttgctgaaaggacccagatatagctgtctcttgtgagactatgctggggcctatcaaacacagaagtggatgctcacagtcagctattggatggatcacagggcccccagtggaggagctagagaaagtacccaaggagctaaagggacctgcagccctataggtggaacaacattatgaactaaccagtaccccagagctttttactttagatgcatatttatcaaaagatggcctagtcggccatcactggaaagagaggtccattggacttgcaaactttatatgccccagtgcagggtgatgcctgggccaaaaagtgggagtgggtgtgttggggagtggcagggagtgtatgggggacttttgggatagcattggaaatgtaaatgaggaaaatacctaataaaaaatatacaaaaaaaagttatgtacctacggtatgtctgtagttcaagccagagggatcataggtatgtactaagggcctgtctctattccagccagagaattaaagttgggtgatatccctgctttccctctggatcataactttggatgtaatccccagccagagtagctattttgcttgattaaaattaatctaccaaaattcttttaaaatgtatttagcatttttgcttttgatatgtctggttggtttgaatctcttataaaatatacaatcatgaatattcttctaatcgtgtttctgtgaacacatacacatatccctaccacat

SEQ ID NO: 2670 - DNA, 1400 bp, mus musculus
aaaaaacttcagttattaagggggaatgagaaaaggttgatcagtaaacagcaaggtacagataggaatatgaaagactggtgtgttgttgctctgtcagcaacagaaatgtattgtacttttaaaaacctgggagaaaaggttaaaagttttcattttgggtcatggagatggctcaccaagtaaaaatggttgctgctaagcctaaaaatttaagttcaatctctgggacccaaatggtagaaaaagagaaccaacctcaagatagatgtcttctacacatgctatatgatatgtaggcattttctcttctcaccaaatcaataataaggaacatttttcctggttttaacactataacacacacacacacacacacacacacacacacacacatatatatacattcaaaactaccaaagaataaaacaaaaaaaattaaaatagagttaaatcaatatgaaaaagcaacggccactgctgataaaattattttgacaggagcctagcacaactgatctctgagaggcttgcatccatcagctgatagaaactggtgcagagacccaccatcaaacatcaggcagatctcaaggagtagtcttgtggaaggagccacggaaggatggagggggtggagggatcaagtaccaccacaggaagacatacatagccaactaacctgggaccatgggggcccacagagactgaataccaaccaaaaaacatacatgggtgggccctaggaatatatagcagatgtgcagcttggtcttcatttaggtcccccaacaatcggagtaggggctctatttgacttggactctgttacctgcctgtggatccttttcacctagctgggttgctttgtcaggcttcagtgggagaggattgcttagtccttatgatacttgatgtgtcagattggggtggtaccccagagtggctcaccttctctgaggaaaaggagaggggaagaatggaagaaggcaggtgggagggtaggactgggaggagaggagggagtggggctgtgattgggatgtaaagtgaaaaaataagccacttaatgaaaagtaaatgtaaaaattattttgatggtgttaagaatacaaatttttttgaacagtgcagtacaatagaaaaaaaaatgttcttgagtttgaaggatagctcagttagtggaagttcttgtacttcaagcatgagaacctgtgttcaatcctcagaaacaacattaaaaaaatcctaggaagcgtggtgcatgactataatcttagcctctagggagggagagataggcagatccttggggctcactttggccaaccattctaacctaactgacaggttcctagccaataataagctcagtatcaaaaacagaaagaaaacaaatg

SEQ ID NO: 2671 - DNA, 1200 bp, mus musculus
aatcagttaataatatgttctcagtatgtaccatgtagcatattaattgttttctgtgtcatttcatcaacttctttgtggtgtaattatttcattatatagacaggaaaaaacagctcaggaaagtaagtaatacagctgacagagttaggagcaaatgctcagatgaggttgcaaacccaacactaactctagagactagcatagtaaccaatagcaaatgcttcaataactcaagctataggataaaaaaaaaatattactcaagttgaggctggaggactcaagaggccctagagtactctccacaacacaggaccttgggatcacctcgagatcactggtgaatggaatgcaacatcagctccaaggaatcgcggagggtcttgtgccagcaggaacagggacaaagtaaccccgccagaccagagactgggatccataccagtagagccagccccgacatcttccacctgaacccactggagatctccagaagccctaaagtgctctccaaacaacagaacatctgaatcaccttgggatcacaggtgagtggaatacaacatcagcttcaaagaatcacagagggtcttgtgccagcaggaacagggatggacgaaccccgcctgaccagaggctgggattctttcagatcggggccagacccaccatcttctgcatgaaactggccaaggggattgagggccacagaggactctccactccacaggacccctagcacacccaggacctcgtgatcacgggagagcatatgggtgacagaaacaacagagcttcttggtcagggtcccatcaggccttccttctcagccaggaggcagacatgagacccagacacctgggcaccttccttgccagaggagagatggcctacatggagggctctgaccccaggattcaggaggtagatcagagctccagacttctggacacctgccctgtaagaggagagcttgccagcagagagtgctctgaccactgggactcaagtgagggttggattcccaggagtgctgacagaggctaacagaatcacagtaggatcaagctccagccagagacagcttgaacattaacaccagagatttccagatggcgaaaggcaaacttaagaatcttactaacagaaaacaagaacctgggcaccatcagaacccagtatgcccaccacagcaa

SEQ ID NO: 2672 - DNA, 1000 bp, mus musculus
ttgtgctgttgcatctatctcctcaaatattttcctctgaagctatttctttatggtgaaaaaaaaaagttctcctctcttctgggtttttgaatgcttgtttttgttttgttttgttttgcttttgctttgtagctatgcagtacttaattgacaattggcatctgtagtcacatttctgagcaagtcttttacccctttctgagctcacagggttggcagtataaaatgcccacaggagtgactgtttctgaggtctgaaaggagtaaggcatatagacacaagctgtgttggataaaacctagggagtcaggttggattttaaaggtgggcagggtaaaaaagtttcattttgcttctgtcttcagaagttctccagaagggatgagtgaatgactgcatttaccgaaaagtactgaggaatcattaattctcccttccagatcttccacttttaaatcctcttatgtgtgactactgtggaaagttatctctcccctgtggtagcctggtcagtaatataataatgatgaccagtcagtaggcctcaatgtggcgcttttccatgttgccccaaagggctgacaggtctggcgccagcaagaattgctgcccagggaagaatcttgcctagaacttttttgagacctgccaccatccagtctgctctttgttcctctttgagcttcgccttccttggctgctctccctctggtatgcccctggctggggtgccagccaaatggttacccttcacacactctgcctgcacaccgatatgcttcctccctttgcttggctaccaggcagaaggtttctgtcaggactgctcaactgagaaattctgagttccatacaggactcttcttcccttttgcagatctttaagctttgtgataggggaccttcatgggtgaatctactttggaatgatttgcttcaggtcttaggtttcacactctgcatctcacattccttcacttgatgtgactattccag

SEQ ID NO: 2673 - DNA, 1400 bp, mus musculus
ccatgaaatagatgtaggaaatgactttctgaattggactccatctgcccaagaattaaggccagcaattgacaattgggatttcatgagagttaagagattctgcacaacagaagaaacaattcattgaagtgaatgcccataatattggaaaaaactttatatgtgacaagagggttaatattcagaatgtataaagaactcaaaaaacaaagaattgaaagaataaaaaaaagtaaaaacaaccatacaacacacacacacacacacacacacacacacacacacacacacacggagggggagtgttagaaagccctggcccatgaatctgaatttgtcttgcagcctttgtaggttcttttgtgtgattttcaagcttcaattgttccaaaaaaaatcaaagaaatgtggggcttaagcatatcttagtgatagagtttaacatgtcttaggctctggggtcagaccacagcaccagaagaaaataatacatgcttatcttactaaagtgaagcatagatacttgaaatcccagcagttgggatgtagaggcagtaggaccatgagttcaatgcctgtctcagctacataatgagttaaaggcatgtactacatgatagctggctgaaaacaactactgtcatcacaccacctctactgtctgactgccaccatccttggactgcaacacttccaacaccactaccttcatcactgcctctaccaccaccacagctaccttcatggccaccaccaccatcaccactgccaccattgtcactactactacctcccactgtaaccatcttcaccacttccagagctaatattacctccactgccaccaccacctccaaagtcactaccacctccaaagacaccaccactgccattgccatagctactgccaccaccaactctactacttccactaccacctctatagctgctgccaccactaccactaactaccaccccccttcatcatctcaacaacaaagagaatgtgaccatggaaccagacactttgcagaatctaaaatgctctgttgtctcttttacaaccaattcagctactcctgttttatattattatttattgctatcaatatatgattttatatatatatatatatatgtatatatatatatatatatatatatatatatatatatatcattaattctatatggtaatgttatacctcttaatttaatggttatatcaattgaaagaagtcttcatcttataatggtcaatacttttcattccattctggtaacctatttctgtctgttcagttttgttcaacttgaagaagatacttatttcccctaaggaaattctgttgagaaaaaaaattgttacttcaattttttgtcatttagagctgtgt

SEQ ID NO: 2674 - DNA, 1200 bp, mus musculus
ttaatcttcaaatttcatggtagaaggagagaactgactactgcaagttgttgtctgacctcctcaagcaccataataatgtataattgctcccttgcaatggacaaacagacaccttgatggtgatatttttcttagatcagtaagggtcagagcaattggcagtcctttgttcatccttgcttgatgcctgtcttagtggacaaaactgttttatgcctaggactcgtaaaaatcagatcaaagcaaagcaaatccaggcaggcagcacagggggaggaagacagagacctgtagactgtgatgctgttcatagaaattccatccagtggactgtacaggtaggccagggacacttgcttgccaacatgtcacacctggtaccatggaagtcctgaagctttggaaggctaccttttcacaaatttcaactgtgtataggtgatatagatttttgaggtgggtcaaatcagatccctggatctgggtggtagctgaactggtcatcccactggctctcccttatctgcaccaccagggtgagctctccagcactgctccaggactagctctcctgagctcatgatcctgtgggcagctttcctaactgccagaggtggtgaggctctggggtgggaaggagcttcccctctgtatccgtgccatcccataactgatgagtagtgtggtcagctctcctacactcatgccctatgattggttcacagaacatccccaccatcagaaccagctccactttgcagcttgaatgaggaaaatagcctgcttgctaaagtactgtcataggtgagaagctctcaagaagccctgccttcagtgaggagcagaggcagttgtacacagcccttggacatacaggtagtcccaagcagttgccccaaccaaggacatccccaaattctctagtggtaataggctacaggccttgacaccgacccctgccactgagtagccatggactcagacatggtcctcagtagcagcttaggctggcaccttactatggctccaggtgtcagggatgggcactgacaacagactcttcctcccaccctgggtctccagttccatatctcttgagaatgttcaaattgctccaattctctttctagcccaggatctccatgatataggtcaacaacaggataactagaagaggtcctgataaagatccaatat

SEQ ID NO: 2675 - DNA, 1200 bp, mus musculus
aatctccacggatatgtgtacttaatagagatttgcttgctatccatttaagttttattgtatcatttaaacacctgaaggtatttaattttttctgaatctgttagaatttatttttgtatttcagaacattgtctattttagagaagtttttatatgctattggtgagtagaggaattctttgctgtttggagaggatattctgcatatatctgttaatttcacttgatgaaacctgtttaatttttttatttttgtccataacatttgcctattacaaaacagtgaggctgtagcacctgggggagcaaccttggttcctggataacgctgagaatattctgtacaggtgagagtgtggactacagaagctaacagagctcctgaggcagaccctgttttgggctacagacatctgggcactttcccttccagaggagagttggctgccccgcctgggagggctttgacagagcacctgggggagccatctttgttcccggactctgccaagactagtctatggaggtgagagtgtggattacagaatctagcagcttctgggacaggccctgtttcaggccttcatcttctgccaggaggcagacccaaacccagatatctatgcaccttccctgcaagaggatagcttgcctgcagagagtgctctgaccactgaaactaaggagagatctagtctcccaggtctactgatagaggctaacagaatcacaagaggaacaagctctaaccagagacaactataacaactaactccagagattaccagatggcaaaaggcaaacgtaagaatcttactaacagaaaccaagaccattcaccatcatcagaacgcagcactcccacctcacctagtccagggcaccccaacacacctgaaaagttagacccggatttaaaagcatatcacatgatgatggtagaggatatcaagaaggactttaataactcacacaaagaaatacatgagaacacagctaaagagttacaagtccttaaagaaaaacaggaaaacacaaccaaacaggtagaagtccttaaagaaaaacaagaaaacacatccaaacaggtgatagaaattaacaaaaccatacaagacctaaaaagggaagtaaacacaataaagaaaacccaaagtgaggcaacgctggagatagaaaccctaggaaagaaatctg

SEQ ID NO: 2676 - DNA, 1000 bp, mus musculus
tgtataaatcaaaaaattttaatggctctgacagggctcaaggaaaaagttatcagatttagtttttacatcattaagatgtttaggaagtgacatttttatgaacataagttcaccaggtagatgttcattttatagacctttgagctcacaaatcgatagttccaaatgaaaaaagatagttccctgaggaaatgcacttccttggtcatttccagatttagacttgggagtttggggcttttcattcactccctcacacattcattcatctcactaagtcattcatagagttcttcagtgcctgctgctttcccagccagtctccaattatttctttgaaaggtggcccatttgggaagcaactgaaagggctagtgagtagcttgataattttcagcccaatctgagtacgtaaaatttgaaggctgtcagaaaggcctttggaaacgggttcatcatccctgccactgcctctgctgtgaatacccaggggactttctgcaaaggagggggcaggaaaaatgtcacctctgaatgtcctccttcaagttcccagtggatgtctgagatggggctcacactgcttttgcctgcttagccacatggagcctctttctgcccttttcattcaccctttttgtcacgcagttccttggcagttaacatccctgcttcccaggtgtctgcgtagggaggacttgatatttctcgagaaagagcacaaaatagagattttagagacatttccacagcaggcgttctgactgttttgatgtcggttcctttggctagaagagaagccaacactttggttaaatgaaaatccataatcgccccaacaggctatgtgccattcagtgttcatgtcgtattagtgtaccttccatctgtgtcttcatacacaattcaggttgacaaaaatgtttagaaaatagaaaaatgaacttggaagatttttaatttaaaggtgatgattgaatcattcatggtgctttgc

SEQ ID NO: 2677 - DNA, 1600 bp, mus musculus
aagacttctaacccacaaacatggactatccattccaactatttgtctgaagttgtaataatttctattttcactctttatataaatttccctgtgtttattcttagggaccttatggtttgcttctatttgattttattttacttttagtttgctgtcgtgaggaacaatgcagccatttctgcataatatgcaagctcaaagttacatcttcagccttcaacttgaactcttaaatttgcatttttacaaatagcacaatgtttcagaagttgttcaatagttctatactaattattaatatattaattttaatgtccaatagaatttcttttatctgacatggtctctttattttggtgatgattcttgaaatgtatgatttttctgtctctttcaagtgatagaattacgggtatccttcacgacactttgcatacaggtaatggtttaaaatcttttccttgaaataggaacatactttggacattggtagacacattaaatcacagtggggtgattttcagctgaaagtaattagattgcagtttacatcataaattgcttgctgttgagttctgctcagtttttttccatgttgctaggataaactattctagcaaaacaatgtaaaggaccaatggtttattatgtgtcatagtccaaatccatcatggaggggaagtcgaggaagcaagaagtggaagcagttggttatatctcactcataagcatgaagtaaagagcagtggtagtcatgctgctacttcctttctccactgtacagtccaggatctcagcagtgggaatagctggcaggtctatccccatcaattacggcagccaaaatagcctccctgtaggcttgctcagagacctgtcttctaggtgattctaaattctttcaaactaacaagtgacattaatcatcacatggaccaaatgcattttttgtgtctacttcagttcattacatttttttcactcaggatgttagtataatctataatatttactcattttctaaggtcaactcttaacatcttgagataaatttagattggtcactgtatatttatccttaaatatttctttaattttaagattttaaaaatcacaattataaatgggaatgttttatgatttctcctttcatatttttagcttgagtagtaatattataataatttcattgactggattggagaaaattctccattttggtttctagaaagttttaacatgagaactgtctgatctttatattttggcagaataagtggcagaaacattcacatacagtactttttgtgtgtggaaagaatcttaatcaatgctttaaatatattcatagttattaaaagcataagagtatatagtttgtgtacattttcataatttatatgtgactagaagtttgtctattggcttaagttttcattttgacataaaatttttcttatcatacttttatttttaaacacgttcttgcaatgttagctcaggccttgagcttttgactcttttgtcttagtctcttgtgccttagaatcccgtgattacagacaagtattgccctcctggattttattatctattt

SEQ ID NO: 2678 - DNA, 1200 bp, mus musculus
tagggtttctatctccagcgttgcctcattttgggttttctttattgtgtctacttcccgttttaggtctttgatgattttattcaaatccatcatctgttttgtcgtgttttcctgcaattctttaagagatttttgtgcttcctctttaaggtcttctacctgtttagcagtgttcttctgtatttctttgagtgagttattaaagtccttcttgatgtcctctatcatcatcatgagacatgcttttaaatctatgtctagctttttgggtgtgttggggtccccttgactgggcgaggtgggagtgctgtgttctgatgatggtgagtggtcttggtttctgttagtaagattcttacgtttacctttcgccatctggtaatctctggagttagttgatttagttgtctctggttagagattgttcctctcatgattctgttaccctctatcagcagaccttagtgactagatctctcctctgagtttcagtggtcagagcactctctgcaggcaagctctactcttacagggaaggtgcatagatatctggtgtttggatctccctcctggccaaagatgaaggcccaaaacaggacctgtcccagaagctgtgttgcttcggcctgtcacagaagctgttagcgtctgtagtccacactctcaccttcggtggagtcccggaaccaagatgcctccctctgatgctcaggcaaagccctcccgggccgggtagactcctgtcctctgacagggaaggtgcccagatgtctggagtccaaaaagggggttgcctcagaagctctgtggttcctgcctgtcctagaaggtgttagtttctgtagtccacactgtcacctgtgcagactactcttggtggagtcccggaacccaatttacttgtgtttttaaagttgtatcttgggtattctaggtttctgagctaatatccacttataagtgtgtgcatatcaagtgaatccttttgtgattgagttacctcactcaggatgatatcctccagattcatccatttgcccaagaatttcttaaattcattgtttttaatagctgagtagtactccattgtgtaaatgtatcacattttctgtatccattcctctcttgagggacatctgggttctttccaggttctggctattataaatagggctgctatgaacatagtggagcatg

SEQ ID NO: 2679 - DNA, 1200 bp, mus musculus
aaccatgacattgctttaaattattttttagagatttatttattttatgtatatgagtgcactgtagctgtcctgatggttgtgagccatcatgtgggtgctgggaatttgaattcaggacctctgctcactgcagtcgaccccgcttactatggatgactctgcttgctccagtcagcccactaaatacactgtggatgtcttcagacacaccagaagggggtgtcagatctcattacgaatggttgtgagccacgatgtggtttctgggatttgaactcaggaccttcagaagagcagtcattgctcttaactgctgagccagctatccagccctttaaattattaattttttttgcttcttatttgtatttattttcattagatattttctttatttacattttaaatgttagcccctttcctagtttcccctccaaaaccttcctatctcttcccttctcctccttctcaccagcccacccactcctgcttcctgaccctggcagtcccctatactggggcatagaaccttcacaggactaagggcctgtcctcccattggtgaccgactaggccatcctctgctacatatgtatctagagccataagtcccaccatgtgttttctttgattggtggtttagtcccagggagctctcatccctcaacagaggagtggatatagaaaatgtggtacatttacacaatggaatgctacacactattaaaaacaatgaatttatgaattccttagacaaatggatggatctggaggatataatcctaagtaaggtaacccaatcacaaaagaacgtacatgagatcttcggctccagacaaccggccaccttcctggtgagagcacaggggtccgcccggcccgagaggtttgagcctcaggccccggcgggagccttggctccgggactctgcggagggcaggctgcacgggtgacggtgtggaatacagaggccagccgtttctgggacaggcgagagccacagagcttctgaggcggtgccatcttcggctccaggcaaccggccaccttcctggtgagagcacaggggtccgccagcccaagaggcttgtgcctcaggccccggcgggagccttggctccgggactctgcggagggcaggctgcacgggtgatggtgtggaatacagaggccagccgtttctgggacaggcgaga

SEQ ID NO: 2680 - DNA, 1000 bp, mus musculus
agaatgatgagcagaatattgaaatcagttttaaaagtcctgcaatagggtgattattaagaacagaaccgactcgagccccgggcttccttgccagcggagttgcctgacacccgcaagggcccacacaggattccccacaggatcctaagacctctggtgagtggaacacagcaccggccccaatccaatcaagcggaatctgagactgcggtacatagggaagcagactacccgggcctgacctggggctcaagccccttccactccactcgagccccgggctaccttgccagcagagtcgcctgacacccgcaagggcctacacaggattccccacgggatcctaagacctctagtgagtggaacacaacttctgccaggagtccggtttgaacaccagatatctgggtaccttccctgcaagaagagagctttcctgcagagaatactctacccactgaaactaaggagagtgctaccctcccaggtctgcttatagaagctaacagagtcacctgaagaacaagctcttaacagagacaactataacagagagattaccaggtggcgaaaggcaaacgtaagaatcctactaacagaaatcaagaccactcaccatcatcagaacgcagcactcctaccccacctagtcctgggcaccccaacacaaccgaaaatctagacccagatttaaaaacatttctcatgatgatgatagaggacatcaagaaggactttcataagtcacttaaagaattacaggagagcactgctaaagagttacaggcccttaaagaaaagcaggaaaacacagccaaacaggcagaagtccttaaagaaaaacaggaaaacacatccaaacaggtaatggaaatgaacaaagccatactagaactaaaaagggaagtagacacagtaaagaaaacccaaagcgaggcaacgctggagatagaaaccctaggacagagatctggaaccatagatgcgagcatcagca

SEQ ID NO: 2681 - DNA, 1200 bp, mus musculus
aatgaaaatgaagccacaacgtacccaaacctttgggacacaatgaaagcatttctaagagggaaactcatagctctgagtacctccaaaaagaaacgggagagagcacatactagcagcttgacaacacatctaaaagctctagaaaaaaaggaagcaaattcacccaagaggagtagacggcagtgtggggagcgggtgtggcggcagtcccaaaggcgccagagactgcagctaagtcatatgacttgcacctgacttcctcatataagacacaaacatcttgagtgctgcgcaggtgtaccaggatacaggtgaatccaatttggtggagatatgcccctgctgccctgattagctgaagcttcgtgcctggtgaggtggcgtgacctgctgtgcgtggatgggaactgagagtataaaagagtgagaggcccgggttagagggaggattattattcgagagaggattgttattattgggagatataaacgagggagatataaaaacaagggagatataaacaggggagatataaacaggggagatataaacaggggagatataaacaggggagatataaacaagggagatatatggagaaagaagaaacaggactgaataaatgtgtgcagaaggatcctgtagcagcgtcgttcttcctggcctgttgggcacacgtaacagttggtgctgaaacccgggacgggacgagaagacctaggacgagaagacctgggacgagaaaacccgggacaagaaacatcttcaggcatgagtgaagaccccctactacagggaggattcagaactgcataacagggaagaaggggttaataaagtgttcccgtaaaacagactgttgagaaggatctggcgtggattcagaactcttcagctggggaacggtactgatgaagagaaagaagaaagatgaagacggaataaactgctgttagaaggactggtggtcacatcgttcttgctggtcgagagcaggcgcgacaattggtggctggtacggggaaccgactcccccaccgagttcagaactttcagcagtcagtggttgccggcagggtaagttcacggtgagtgaaacttgcgaccccaggagtttgggaaggacctcggataaaatagaggtgagcataaagttgccaggaagtaggcacaaagtaacccaggagtttgggaag

SEQ ID NO: 2682 - DNA, 1000 bp, mus musculus
tttactatgaagaccagggtggtctggaattcacagaaatctgtcttcctctgcctcccaagtgttgggaacaaaagcatgagccaccatacctgaatcatttactcataaatgcttctgctcatgacctgctactcctctaatgtaaacacgcattcaataactcaacctgtgccaaatattcctataatgtaaaacatcaggcttctgagtgagtcccgagatatcccctcctcataggaaaccattttcttgtcctttctattgtttaaatcaactaatatactcatgattaaaaaataaggtgtatataagatggcacacattagcaagtctcaccctcttgtctctttcccccttttttcctgctgttctccatgtgtttatgtacatttattttcttgttcacttgttccacaaaagttgatcacactaaccagtgtcctgtaccttcctttagaagtgttgtatttacagttacttttccacaatgggttgccttgtggtaaaatgatgcctatactctggacacagactacctttgtggacttttccctctgaacccatatatatatattggtaaaatttctatgcatttctcttcccaaatatttgtatttatactttggtgtttatttatgtatttgagataagatgtcatatatcccagggtggtcttaaactagctatatagtcaatgacgaccttgaacttctgttcttcctacctccacatcctgagtgctgggatggcagtttgtgtgatgctaagcatagaacccaggactttgtgcatacccagccagcatgctaccaactgaaacacaaccctagtcaagtttattttattttttttttatacttttacatgatatacaaaggatgggaatgggtgggaaggtgggggagcaccctcatggaggcaggaggaagggatgggatggggtggggatcgaagaggataccgggaaggggaataacatttgaaatacaaataaaaa

SEQ ID NO: 2683 - DNA, 1000 bp, mus musculus
tttcgggtgtgttggggtgccctggactgggcgaagtgggagtgctgggttctgatgatggtgagtggtcttggtttctgttagtaagattcttacattttcctttcgccatctggtaatctctggagttagttgttatagttgtttctgtttagagattgttcctctggtgattttgttaccctctatcagcagacctgggagactagatctctcttctgagtttcagtggtctgagcactctctgcaggcaagctctcctcttacagggaaggtgcacagatatctggcgttcggacctcctcctggctgaagatgaaggcccaaaacaggacccttcccagaagctgtgttgctttggcctgtcacagaagctgccagctcctacagtccacactctcacctgtgcagaatactttcagtggagtcccggaaccaagatggctccggccgatcctgaggcaaaagcctcccgggccaggcagacacctgtcctctggctgggaggttggcctggtgtctggagcctgaaaagggcgctgcctcagaagctctgtggttctggcccgtcccagaagctgctagcctctgtagtccacactctcacctgtgtagactactttcagtggagtcccagaaccaagatggctcccgccaatgctgaggcaaaggcctcctgggccgggtagacacctgtcctttggccgggaaggtggccggatgtctggagcctgaaaagggtgctgcctcagaagctctgtggctcccacctgtcccagaagctgccagcttctgtagtgcacactctcacctgtgcagactacctttggtggagtcccggaaccaagatagctcccgctgatgctgaggcaaaggcctcccgggccgggcagacacctgtcctctggctgggaaggtggccggttgtctggagcccgaaaagggcgctgcctcagaagctctgtggctcctgcccgtcccagaagctgctagcctctgt

SEQ ID NO: 2684 - DNA, 1200 bp, mus musculus
cctctgttatctaccccagtgtccttccctggtgctctgaataacggcaagtatatttcttaaagtctatgaccacttttgcaatcggtgtctcctgatttctcttgtgcacattaaccaacacatatgtgacaactccttggcaaccttgccctagactcccacccaccaacaggccttctactcattcctcttgaaggctgactaaatctgagaccttacttgaaaggaacaaagggagttgggtgaaatcgtggtccctgaacatccacccatggcaaacaactcagactgaatccattcttgcttccacatacagactgggagtagaagcaaggggcaatccctgttcagactaagagtgcttccgtgctcctggaaggagaagaaagactttcaagggacctttgtatccctgatggtgggaactggacaaagtcccttcccacattggcctactaccaagagaatttggcagaggttcagtttcacccaactcatgggtacctggggacaccctccagctcaatggccactgaggacagctgcagggcatgaactttcacacacacacacacacacacacacacacacacacacacacagccttgtgctcatagcttgctaaggaagagcctttctgaggtgtttcatgcaaagaagaccagtgacctgaggagtaccttcctggtgtatctggcctctttccacagatggcacatcccattgaaagtagtacactaccccaagtatcagcctgagtaaacatctgccaacacagttgaagaaacagcagcagcaggagcatgaaggcctggatgttgtgacccccatggtgccaccttttgaagacctgcctcactcctgggaagtggtaccagatgactacttggcagccctcaggacagccaggctcatcttgccaccccagcagctcagcaggagtccctcacacagcctctcctgagaccttggtaaccagtgggcattgttccacaaaccaaccaatgggagcgcagcatgcgctcacaatgctcctctggccaatggcaagcttcgggaggaaaaacatggatcctcctatgcattttgtctctagcacagcaagaacacataaatgtgctgtccgatgatgcctggaatgttctctgaatgctggaaagagattattagaatgattttttttgggggggggacact

SEQ ID NO: 2685 - DNA, 1600 bp, mus musculus
tagccatcttgccaaaagcaatcttcagattcaatgcaatgtccatcaaaattcaaactcaattcttcatagagatagaaagagcaattttcaaaatcattttgaataaagaacatccaggatatcgataaactattctcatcaatgaaagaactgcagggtaatcatccctgacctcaagctgtattatagagaaatagtgataaaaatgtatggtaatggtacatagacaatgacttcatgaaattcacaggcaaatggatggatctaaaatatatcatctgctgtgaggtaaaccaatcccaaaagaacaaacatggtatgcactcaatgataagtggatagatattagcctaaaagctcagaatacccacaatgtaattcagaccacatgaagctcaagaagaaggaagaggaaaatgtgggtgtttcagtccttcttagaatggggaacaaaatactcctgggcagaaatatggagacaaagtgcagagcagagactgaaggaatgaccatgtagagtctgcccaacttgtggatccatcccatatacagacaccaaacccagtcactattgtgaatgccaacaagtgcttgctgataggagcctaatatggctgtctcttgagaggctctgccagagcttggcaagaacagaggctgatgctcacagccaaccataagactgatcatggggtccctagtggaggagttagaggaaggactgaaggagctgaagggttttgcaaccttataggaagagcaacaacatgaaccaaccagaccccccagatccaccagggactaaaccaccaacaaagagggggacccatggctcctgctgcatatatagcagaggatggccttgtcagacatcagtgggaggagaggtccttggtcctgtgaaggctcgaagctccattgtaggcaaatgccagggtggggaggtgggagtgggtgggtgggggaacaccctcatagaagcacagggagggctaatggaatatggattttctggggtgaaaccaggaaagggctaatatttgaaatgtacataaagataatatcggataaaaataaataaataactaaataaaaattaaaataacaatattcacaaaatactacatataaataggaataagtcattcagatgtcatagagtatattaactaatatttcctaatatataaattatgttaatactatatagttttaaacaaattatatatccaaaaatgtaccttcaaattttcccagaatattttgtactggagatctgtgaagaaattaaagttttaaaaagtaaggattctgaagatacagtttgatggctcagcttttgtcctacaagcaggtcgatgagagttgccccacagcattacatcctccaagaaatccattcagattaaggattaatcttacggaattcttgtttggaatatacatcatatgctaaatattaatatagattacttgctatacaatcaattaaacttttctggaagtacttacactatgaaggaaataataagtttgaacatattaccgtgtatctccaactacttcttcaggatttgcattctcatcatcacgagtt

SEQ ID NO: 2686 - DNA, 1200 bp, mus musculus
atgaagactcctttaataaaacttgcaagatatgtcatagactgttgagcaagtaacttagtgaatattcaactttaccttgtgtactactttaatcatttcacctcattaattcaagattacacaaaattgggagaagggtcccaaggtccacagaggactcttcatgctgcccgtgccctagcacacccaggatcttgggatcactggtgagtggaacacaacatctgttccaaaatatctcagagggcttgtgccagcaggaacaggggcaaaggaaacccgcccaaccagtgctggggttcattctggtcatctccagccccccccccctgccatcttgggcatgaacttgacagagggtcccaaggtccccagaggactctccatgctgcaggcgccctagcacattaaggatcttaaggtcactgatgagtagaacacaaaatctgtcccaaaaaacccagaggatattgtgccagcagaaacaggaataaaggaaacccacctaactagcagctgggattcattctggtggctccagcccagcaccatcttgggcatgaaatggcaggccctggcacacccaagatcttgggagcactgagaccagtctacacaggagagcacatggagcagcagaagataaaggccttccttgtgaggagggggtgtggcagcagtcacaagaaggtgccctggactgcagttaagtcttatgacttgcacctgacttcctcatacacctgaaaataagccacgaccagcgtgagaactgcacaggtgcaccatgatgcaagatcggatcatatgacaagtgatgattctggccaatggactgctgttacatggaatgggctgatggggcatggttgagaggttatataagggattgtggttgggggtggtttggttgttgttgttttttcctggagagattgatttctggagagagattcatgcatgatgttgaaaggttcctgaataaactgctttgagaagaatgtagtgttgtcgttcctttctgctggttggaataggagactacacttccttcaggccattatcctcagtcaggaggcaggacaaaaatccaaacccctgggcaccttccttgccagagaagagtctgtctccagggacggctctggctctggactcaggaggtggatctgagctccagaattctgtgcaccctca

SEQ ID NO: 2687 - DNA, 1000 bp, mus musculus
aattcatctgaacagtattaattcatgaaagttcaactttatgttaatcttcaggaaatctgctcaacagggtggagtaatgtccaggaatccttaggtgatgtaatagtgacaggaaaggcatatcagaagcaagaagcaatcctggaataaagtatcctgggacctggcctcccagagctcacccatcttaggccatgtaaaacggtgggactttttattggtgtcctagatagtttaatgtcagcctgacaaaaggtagagtcaattgtggtgaaggactttctgttgagaaacacctcttataggcaaatcctgtaaagcattttccagattagtgattgatgtggaagggcccagcccattctgagtaaagccgtcctttggctgctggtcctggatcctataagaaagcaggctgaacaaaccatgggagccagtcagtaagcagcacacttcatggcccctacatcagctgctgcctctaggttcctgctttgatttccttcagtgatggactgtgctgtggaccttggagtgaagaaaaccctttcctctccaagttgcttcttttttttaaaaaatattttttattacatattttcctcaattacatttccaatgctatcccaaaagtcccccataccctcccacccacttccctacccacccattcccattttttttttttttggccctggcgttcccctgtaatggggcatatacagtttgcatgtccaatgggcgtctctttccagtgatagccgactaggccatttttgatacatatgcagctaggatcaagcgctccggggtactggttagttcataatgttgtttcacctatagagttgcagatccctgtagctctttgggtactttctctagctcctccattgggagccctgtgctccatccaatagctgactgtgagcatccacttctgtgtttgctaggccccggcatagtctcacaagagacagctataactgggtccttt

SEQ ID NO: 2688 - DNA, 1000 bp, mus musculus
tgcataaggtcgaggggcgctagggcctggagaccgaaccatgccctgacttaaaccaccatttccttttaacttcctccttggctttctatttctaccctcatcagggtggtatctttcttccccacagtgggctgcttcttcctctaagtcttcttcctctgaggaactaagttcttcacttgaacttgagctctcaagtcctaaaccctcaatttcttttaacgagtaaaggttcttcctcgcgggggactccttcccctacttttttctcttctcccctttatctttcctcatctttctctctccattctcctttttctctcccagggcttcctttcccttttcactttcttactcggatccagaatccttggaagtgtcttgtttcttaagtataccttttttttttctttgagctcccaatcttttaccccactttgtttctgaagtgctgtcttgaacctcctccagcactccctgtcctgctttcactatatggaaaaggataagtgctgcaaaaacaattacaaaggcttccattgccccttctaattatagagaaagaccagaaccaaacatgccactcagaaccttaaaaaaaaaaaacaacctgactgcaattctgaatcctccccgcaaaaggagggcctcctcagtgctggcgagagtaaggcagttctgggtttcggcacgaattctcacaagggctattgtctcgccagcaagaacacacacgtgagaaaacggatcctactgcagcaaatttattacaccactttcaacatgaagaggaagaccccaagcaccaaaaaggcgctgcttatatacaccttagtgtggcgtgtccacacctgattgtctgctatcccagagcctcatcaccatgccccgggatgggccgtgacttgcacgaaaacattctcgcacatgcgcacattgcttgtttaccaattaggccatgcaggcacagcacaaactgcttcccacaagttgatat

SEQ ID NO: 2689 - DNA, 1200 bp, mus musculus
attttctcttttctgtcatctacaattttggattcccagtgctcacacttttcagtgttttacctccgttgcttattgctagccttaccatctaaatagaaaactatattgagctctaataaaagaaaaattggatgacaatatatttatgttcattccataatatatacttaaattattgaagaaagccgtgtgtccatgccctgcctgtcaatcccatcagcagcaagctctgccccttttacactcaatttccttgagcacagctctgactgcattcctagaagtctgttgctgccagggccaaccaggtgagttactcaagccccaaaagccagcatgtggggactgaggcaagttcagcagccttgaaatctgctctgacccctttgagctccatcttccagtttcatgcctctaaaaccacaacctcagatatatgcagccaccagtgaacaccaggtgagacccctacccacaattccctgcctgacagctcctctggaaaatacagcaatggtgagctctgccttgcttcttctgcactccatatctggggccacaacttcatatacatccacggatacctgctgctacctaggacaaatagagcactccaaccctcaggaatcaccagtttacctgtgttcctgaaagactacctcatatgggacaatcagaaacctgaagccatcaaggcctactacatctgccagtattcctggaaacatgctataataagggacacacagttctacctgcaatattcgaggcctgctgacatcaagaaatacaagctcttcctgtagctccagtggtctaattctgccaaggactatcatgcctgtcaatactaggaacaaccaaatgactaaagccaacatatgaacataatcaacaaaagttagggcaatatggcactaccacaacacaactctcctactacagcaatagttgaatatcctaacacacctaatataagaaaatgacctagattctaatcttatgaagattatagaggcctttaaatatgatatgaatatatcccttaaagaaatacaagaaaatgcaaacatatatgttaagcatcttaaagaggaaatgaataaatgtaaagaaataaaggaaatataaccaaacaggtgaaagacatgaataaagatgctcaaggcctgaaaatagaaaaaagaaacaatgaag

SEQ ID NO: 2690 - DNA, 1000 bp, mus musculus
gatttcttggagggtgtaatgctgtggggcaactctcatcgacctgtttgtaggacaaaagctgagccatcaaactgtattttcagaatccttactttttaaaactttaatttcttcacagatctccagtacaaaatattctgggaaaatttgaaggtacatttttggatatataatttgtttaaaactatatagtattaacatactttctatattaggaaatattagttaatatactctatgacatctgaatgactaattcctatttatatgtagtattttgtgaatattgttattttaattttcatttagttatttattcatttttatccaatattatctttatttatatttcaaatattagccctttcctggtttcattccagaaactccctattccattagccctccctgtgcttctatgagggtgttcccccacccacccactccgacctccccaccctggcatttgcctacactggggcttctagccttcacaggaccaaggacctctcctcccactgatgtcttacaagaccatcctctgctatatatgcagctggagccctctttgttgttggtttagtccctgggagatctggggcttctggttggttcatgttgttgctcttcctataaggttgcaaaacccttcagctccttcagtccttcctctaactcctccactagggaccccatgatcagtcttatggttggctgcgagcatcagcctctgttcttgccaagctctggcagagcctctcaagagacagccatattaggctcctgtcagcaagcacttgttggcattcacaatagtgactgggtttggtgtctgtatatgggatggatctacaagttgggcagactctacatggtcattccttcagtctctgctctgcactttgtctccatatttcctcccaggagtattttgttccccattctaaaaaggactgaaacacccacactttcctcttccttcttcttgagcttcatg

SEQ ID NO: 2691 - DNA, 1200 bp, mus musculus
aacacctaaataattttcttgtttaaatgtaagagcctctttatattaacttccaaataaaatgtaaatgaataagtgagtggcaaatagtcctttgtaccaaacttcacacactaatgtagtgaattatttaaaatttattctttaatctttttttaaagtccagactttatccccctccttgtccgccctctgactgttccacatcccatacctcctctccccacgcccatctccaagaggatgtccccaccatcctaccccactccaccagacctccctattccctggggcctcaagtcttctgagggttagatgcaccttctctgactgagttcagacccggcagacctctgctgtatatgtggtggggggcttcatatcatcttgcatatgctgcctggttggtggctcagtgtctgagagatcctgggaggtccaggttagttgagactgctggtctttctacaggttctccctcttcctctgcttcttccagcttttccctaattcaaccacagaggttcccagattctgtccattggttgcatgtaaatttctgcatctgactctttcacctgctggttaggtctttcagagggcagtcatgataggcccatttttgtgagcacaccatagcatctgtaatagtgtcaggccttgatgcctctccttgagctggatcccaattttggcctgtcactggatctccttttcctcaggcttctctccatttttgtccctcctgttctttcagacagaaacaattatgagtcagagctattgactgtgggatggcaaccccatcttttcacttgatgtcctgtccctccgctggaggaggactctacaagttccctctccccactgcacggcatttcatctaaggttcctttctttgagtcctgagattctctcacctcccaggtctctggtacattctagagggttttttcacctcctacctaaacaaagtttcctgtttccattctttttgctggtcctcagcccttcagtcctgttccccacccccacaatacctgatcatgttcctttcttcccctacttgtcccctttcctacccaggttcctccctctcccctccctgtagtatttaaaaaaaaaaaagttgcatcagcaatttttcttgcctttatttaaacaattctcaaaacatttgagtgaattgggcctcctttg

SEQ ID NO: 2692 - DNA, 1200 bp, mus musculus
gtagcagaggcagagaaaggcagagggagcaagggggaggtagataagtagatgaatagaggtctgcgaggcagtgggcatgggggaaagagggagtgggggaaaacccgcatcccgccagagttccggtgccctgggcgggcagacatataaggactgctgcacactttccacacagcccagggtaaaccccagctcgtcggaggatggacaaggggcagtcctaggtaccaagttctcagcccctggcatcccagacaccactggacaccgcgaaagagctgagaacagaatgggggccccaggggcggctcagtcagctctgggccgaagggaggagagggcaggggggaaagggaggcgctgtgtggttcccacgtgggtgagagtccttgagagtcagtgtctggagcacagaaaggccttctggagggaggttagatgtggctcgttaggggaaagcctatccatcatcgttcaagcactgcaggccttgatgagcagagacagtttatggttttaggactttattgtggaaaggcagggggaaagagagaaggtagaaagagggagagaggctggccatggccacgtggagagagggggtgggaagggagagagagaaggagagctagagatgagagtaagaaaggtgagaacttaaaaagagcaacgaggggccaagcagccccttttatagtgggctgggctataaggtaactgtggagagaaacatgcctgactatagtcaggtaactgtgggggtggagtctagccagaatgccaggagccttcgtgactgacagtcacacacctctcctgcggggactgtgggggcagtaacttcaacaggagccaggggtccaggagacaagatcgaacactttctgtcccatgtaggaggaaatcaccacccattgagtctcccggggttcaagacctatgctcgactggagaccaggctgtctgtgcgcatcccacagccctacagaggctggccatgagcacatgaagagagggaagaagggaatggggagagagaggtagcaggaaggcaagagcaagagagagagaagggggcaagcagccccttttgtaatgagttaggtatacctggctgtggggcggagcttaaacttacattaaaatgctaacatcccccccccatttttatttaattaaaaaagaaaaaataggaag

SEQ ID NO: 2693 - DNA, 1200 bp, mus musculus
gtcttactcggggagggggaagggaggttcttgtagattcccaaggaagtgtcaaaaaagcaaaatatggccagtatccatctgcttttttggggggtttctgggtaaacagtacatcctaggcatcggagctcaggtttgctcgttggttttaatatatatactgcgaagattgagatttcagttggaagacaccctgaaatactgaaagtagcacacccaaccaaccctctctaatggctagcttgtctgcacaggcagggcgattcagctctcagtggagaccagaggccatctagatggctggaagtttgtggatgatcttggggttgcttgcctcatttactggggaaaaaaatcaggaagtggctggccttcagggacactttcacttggaaaattacaacactaggaacaagtcaaggctcacacatctaccatttgcttgttgaaagcagctcatactagcaaataaaattaaacacgtcttactttttccctcacaagaacataaaaattattaaaagggaacaggaaattttaaaaaggtaacacaatttttccttttagtagtccttgggtagtttatgacagaaagtttccacttttgtttgttgctttgaatggggatttttttggtccaaaagttttgtttgttcctagtatctgcttctgcctccccctctatcagatcggcttcctccacggccaccacctcttggtgctccgcggcttgaactgctgtaggaatcacgtggaggagggtaccccctttccatagaagggggaagccctctttcttgtctgcccacgcgatcacgaccacttgagtagagatcacttcggctgcttgagtaactgtctcgacttccaccatatccgtcacgtgagctgctgtaatcatcatagcgactgcttccaccataagatggcgggggccctcgtgtaggtggagcactacgtgagttacctgcagggtcaatggtcaggtaatatggcaacactataaattgtatatatacaacatttaaatctgaatttacagaattctttgtattaaaagttcactttctcaactgggaagttttaaactctaccattgctggccataagagggaattgctcatctgctgaggtacggaaacggattgattttaatgtttgtttgaaaagactgaagacgttgtgtatttcaagagg

SEQ ID NO: 2694 - DNA, 1200 bp, mus musculus; identical to SEQ ID NO: 2693

SEQ ID NO: 2695 - DNA, 1000 bp, mus musculus
gcagagggaatgatgttgtggatgcctgcacgcgaatgcaatttgtgtttctatccaccaccttagaattgaccaaagcctttcatgataagtttcatgttaattctagtaccttgcagaaaaggtttcatatctctagggctgaagcacgagacatagttgtctcctgtgggcattgtgctgtgttccaacatcctcctccttttggagtgaatccttggggcctattgccccttcaggtgtggcaaatggacgttactcatgttcctgagtttggaaagcttaaatatgttcatgtctcagtggatacctgctcaggtatcgtacatgccacacctatgtcaggggaaaaagcaatttatgctatcaagcattgtctcgatgcctgggctgcctgggataaacctcaacagcttaaaacagataatggacctgcttatactgcaaagacctttatgtccttttgtcaacaaatggaagtgcaagtgaagcatggcttgccctataatcctcaagggcaggggattattgaaagaacccatagaaccatcaaagagatgttatacaaacaaaaggggggaataggctatagccgcacccctaagatgagactttctttagttctttatactttaaattttgtaaatttgaataaagatagccatgcagcagcagatagacatgttcaaagagtacctggcctacaaggatatgccaggtggaaagatgtgcttacaggcacatggaaaggaccagatccggtgttgacgtgggtgagagggtctgtttgtgtgtttccacaggaccagacggaacctctttggtgagacgctgcaagaatgaggctcctgatccagttgcccctgtggatgtggtggatgatcccacaagcacaaaggatggagctgagatgagagatcctttcgatattccagaagccgataccagctagacatgacattcaaatttttccacgctttttgatccctgaatccccctt

SEQ ID NO: 2696 - DNA, 1200 bp, mus musculus
ctttcatcatcatttttctggaaagtgatagtttactcattcataccctttataaattagaactcaaaatgggctctaggcttgaagcatttcagaatagaagttacataatcaattaaagaccagtgataaggcatttctcctgatggcagattatgtacctgacttgaagccaccaaaagtagagagttcatggtaagaaaatgcatatgtctaagaaccgatgctttgcacaagcaaacgttgtctgatttcacgccagagatgaatctgtagcaccagcataagtaatgctcacactgaaaagccattatatgaaagtcacaacacaggaacctggatgaccttcaaaggcatttataatatatgtggaggaagacacacttcatattattaggatagaatgaactaagttggaagagtggagagataggtaaggcaagtgataagtataaacatttgtaggactccagttatctcacaacttaaatggaatataggctatacggtcttctttaaagatttatcatcacggtcaccagaggactcttcaccccacaggcaccctagcacgtccaagatcttagaatcactggtgagtggaacacaacatctgtttcaatagagctgagggtgcctggggacagttggagcacaaacacaggaaccccaccagagcagtggttcaggttccttccagtcagtgctggtctaccttggtttagaactcagcagacagccccatggtccccagaggaggtaccacttccaggtgctctaacacacccagaatcttaggatcccaggatcccaggagcttggtcacaccaggatctcagggtctcagaagaagcttgacttccaagaactctgacatacccagaatctcagcatcacaggatcccagaatcacaggatcacaaaggaagctggattctaagaagttctgactaacctgggaacacaggaataacaggctccattcagatatattgaaggcagggaacaggagataatcagatggcaggaggcaagcataagaacagaagcaacagaaaccaaggttgcttggcatcatcagaaccaaactctcccaccatagcaagtcctgaatacaccatcacaccagaaaagcaagatatggatctaaagtcacttctcatgaagatgatggaggactataagaaggacataaataac

SEQ ID NO: 2697 - DNA, 1400 bp, mus musculus
tgctacgttctgatgatggtgagtggtcttgatttctgttagtaggattcttacgtttgcctttcgccatctggtaatctctgaagctagctgttttagttgtcactgttaagagcttgttcttcaggtgactctgttagcctctataagcagacctggagggtagcactctccttagtttcagtgggcagagtattctctgcaggcaagctctcttcttgcagggaaggtacccagatatctggtgttcgaaccagactcctggcagaagttgtgttccactcactagaggtcttaggatcccgtgtggaatcctgtgtgggcccttgcgggtgtcaggcgacttcgctggcaaggtagcccggggctcgagtggagcggaaggggcttgtgccccagatcaggcccgggtagcctgcttccctatgtacggcagtctcaggttctgcgcgattggattggggcaggcgctgtgttccacttaccagaggtcttaggatcccgtggggagtcctgtgtgggcccttgtgggtgttgggcaagactctgctggcaaggtagcccggggctcgagtggagcgggaggggcttgtgccccagatcaggcccgggtaccctgcttccctatgtactgcagtctcaggttccgtgcgattggattggggccggtgctgtgttccactcaccagaggtcttaggatcctgtggggaatcctgtgtgggcccttgcgggtgttgggtgagactctgctggcaaggtagcccggggctcgagtggagcagaaggggcttgtgccccagatcaggcccgggtagtttgcttccctatgtactgcagtatcaggttccacgcgattggattggggcaggcgctctgttccactcactagaggtcttaggatcccgtggggaatcctgtgtgggcccttgcgggtgttgggtgagactctgctggcaaggtagcccggggcttgagtggaacggaaggggcttgtcagagtcacagttttaaagtcaaaattagagtcacatcccaagactgaaataccaagcctttccgagattgtgatcttttgcaactgtaccaatcacatgattgtgaagttggttcttttttttttttttttttttttttctatttgctagtaaaatttacaaaatacatgtgtgttagaaatatacattttctattttaaaacataattcaaagttctactcaaatattgtagctttaaggtgttatactcacatttaaagtttatttttttttccattttttattaggtatttagctcatttacatttccaatgctataccaaaagtcccccatacccacccacccccactcccctacctgcccactccccctttttggccctggcgttcccctgttctgggg

SEQ ID NO: 2698 - DNA, 1000 bp, mus musculus
cagaggatggcctgttgggcatcaatggggggagaagcccttggtcctgtggaggcttgatgtcccagtgtaggaggggtgctgaaggagtggggccggagacttgagtgggggagcaccctcgtagaagcatagggaaaggggatgggatagggggttgtggaggggaaaacaggaatggggataacatttgaaatgtaaataaaataaccaagcttttaataaagaagagacgcgtcttgagagcaaccgtgtccacagtgatgaggtaagtgcctagaacaaagaaatgcttaaatgttaataatatcaataaattaataagtactttaagatgtagccacaattttttctataagcaaggatttacatattattaaagatagctagccttttgttttcaacaaatattgaggattccatattccattccccgcccttccacatccaacctctgactgctccacatcccacagctcctccccacccaacccggtctccatgtggatgctcccactccccaccccacctgacatctaaactccctggggcctgcagtctcttgagggttagatgcttcatctctgaatgaacacagactgggcagtcctctactgtatgtatgtttggggtctcatagcacctgatgtatgctgcctgtttggtggtccagtgtttgacagatctcggggttccagattaattgagactgctggtcctcctgcaggatcccccttctcctcagcttctttcagctttccctaattcaaccacaggggtcagcagcttctgtccactggttgggtgcaaatatttgcatctgattctttcagctgcttgctggatctttcagagggtagtcatgatagcccatcccccatttcccatcccttatcctctgaggatatgtgctttccctgggtgtgcccctaccctgacaatatccaattttttgtgggtttaatttttatgattataaaaaatggcatactcataatta

SEQ ID NO: 2699 - DNA, 1000 bp, mus musculus
gaaatagattactcagctttaagtagtcaaaccaattttaggacatagacagttaatatctcccagcgacttttgaaaatcattaagagctctgaattagtctctcctggtttgtaccttctgtggttgaatttccagcagatttaccttatatcctagataattaatagaatctcctccttgtattgtttcaggagcaatttgtaaaaccaaaaagtcaaaactctctgtgcttcattaaacattctttctttctaaagtgtttccatatgaattcatcagcaaaatatcatccatacaatggtaaattatggattgaggaaattgcttacagaatttttccaatggatgttgtacaaaatattggcataaggtagaactattcaacattccttgtggcaagaccttccagtgatgtgctttgaatggcatagaatggttaaatgtgggcattgtgaaagcaaatctttatcttgttcctgtaaaggaattgttcaaaagcaatcttttaaatcaatcactatgatagcccattacttaggtaattcagaaggcaataggattccaggctataaagaaccaattggctgaataattttattaattgctctcagatctgtcaacagtctccatttgctagatttctttttcttgacaaagaattccaagggttggtggactcttctacaattgagcttccagtttttcttagactagctgttctagtatatgttctttttcctttgtcatagaccactgctcagtccaaatagcttggtcagttaaccactttagtggtaaggccattagtgttttatcagcagtggcctccctcagctaaaattgaagagtcagtctctgctgtatcttgtttatagacagcctggacagcatgtaactgtctttgatagcatgtttaaatttattttatcaagaatattatctcttttatgtcttgtttctgaagttggagggatgctaattgtgttttctgttgtaa

SEQ ID NO: 2700 - DNA, 1000 bp, mus musculus
tagacaaaatcgtcccttgacttgatttacaacacatatatagacataaagaagacagggaaatgtaattagtagtcaagaaataagcaggtggtcaattttttaaaaaaaatctgctatagtgaaaaattatgaagcatagataagtttttgataaactgagaaaatagaaaaaggaaacaagccttctgatctgtctgggccagtgccctgagcataccttgggcacaaactcagcagccagccacacaacacccagaggcagttccactcctaagagctccaacatgcccaggatcagagggtcagaggtgaggaggacacaacatctgttcccaacactgggatgattgggaatggtgagacccaggcaggcaggaactccatcagaccagtggcatgggttccttcctgtctgtctgggcctgtaccctgagcagaccttgggcacaaactcctcagccagccccacaacacccagaagcagctccactctcaggcactctaacatgctcaggatcagagaatcacaggatcccaggagcttggtcactccaagatctcaaggtctcaaaggcagcttgactcccaggagctcaaacaggatctcaggatcacatgatcccagaatcacaggatcacagacaaagcttgactcagagttctgacacaaccaggatcacaggaaggacaggctcccattagacatagccagagaggtagcactagagataaccagatggcaagagccaagcataataataagcaatggaaaccaaggttacttggtgtctccagaacccaattctcccaccttagcaaatcctggataccccaacacgccagagcaggattcagatctaaaatcacttctcatgaggatgatagaggacttggtgacagcagatgctggcgaggatgtggagaaagaggaacactcctccattgttggtgggattgcaggcttgtacaaccactctggaaatcagtctggcggttc

SEQ ID NO: 2701 - DNA, 1000 bp, mus musculus
cttccttccttccttccttccttccttccttccttccttcctttctttctttctttctttctttctttctttctttctttctttctttcttttatcattttttacagtccagacattatccttcaccaggcctgccctctggatgttccttatcccataactcttccccaatctccaagaggatgtccctacctgtctccctcatcccaccatacctctcaagtccctggagctctccagggttaggtgcttcttctctcactgaggccagaccagacagtcctctgctgtatatgtatcagggccctcatatcagtcagtgtatgttgcttgataggtgactcagtgtctgaggaatctcgcgggtacaggttagttgaaagggctagatatatcatcctatagggtctcattttctttctttttttactagatattttctttatttacatttcaaatgttatcccctttccaagtttcccctccgaaaatcctctatcccctcctcacctccccctgctccctaacccacccacacctgattcctggccatgttatttccctatactggggcatagaaccttcacaggactaagggcttctcttcccattgatgaccaactaggtcatcctctgctacatatgcagctggagccatgagtcccaccatgtgtactctttggttagtggtttagtcccagggagctctggaggtactggttagtgcatattgttgttcctcctatgaggcttcagaccccttcagctccttgggtcctttctctagctccttcactgaggaccttgtgctccatctaatggatgaatccactgtgagaatccacttctgtatttatcaggcactggcagagcctctcaggagacagctatatcaggctcctgtcaataagctcttgtttgcatccacaatagagtctggtttgggtggttgtgggacttgttgctctagacatatatgccccagtataggggaatgcca

SEQ ID NO: 2702 - DNA, 1800 bp, mus musculus
actccccctttttggccctggcgttcccctgtactggggcatataaagttggcaagtccaatgggcctctctttccagtgatggctgactaggccatcttttgatacatatgcaactagagtcaagagctctggggtactggttagttcatattgttgttccacctatagggttgcagttccctttagctccttgggtaatatctctagctcctgcattgggggctgtgtgccccatccaatagctgactgtgatcatccacttctgtatttgctaggccccggcatagtctcacaagagagagctatatctgggtcctttcagcaaaattttgctagtgtgtgcaatggtgtcagcgtttggatgggtttataattcacctggaagaataaaggatggtagtaggagcaaggaccggggaggagaaacaaaaggttgttattaactagatcttatattgtatgtgaaatgacataataacaatctgataagatgaagatatgctcaattaattgctaaagcacagatatagtaagttagcaaagggaataaaatgaaatcataaatggatatgcataaataaggtagaacattgatgaaaactataattttttaaagatttttttatttcatgtatatgagcatactgtagctgtcttcagacacaccagaagagggcatcagatcccattatagatggttgtgagccaccatgtggttgctgggaattgaactcaggacctctggaagagcagccagtgctcaacctctgagccatctctccagccccccaaactgtaatttcttaactaaactgctgcatacaaaaactgaatggttgttccctacaactcctcaaagaaggacagaatttaattgggtcttgcttacagtttcagaagtttagtccattatcataatgtcagggagcatggtggagtgcaggcaggcactgaagcagtagctgagagttacatctgcatccataagtagagagaacctgggcctgccttgggcttttcaaacctcacagcccaacctcagtgacacactttctccaacaaagctacccctactctattcttactcaaaccaccatgtaccctgagtagtgaattaatttttccctatgcatcatgaagtatgtgaaactgttgtgctttgcaactgaaaattgagcaaatgtgctgttttgtaggtttcgctttttgtttgcttaaagtaattactatttagctgttttaaagcaaatacttttttagttttttaaacttaaaaaaagattaaaaaaatttattctatatgtttgagtatactgtcactgtcttcagacacaccagaagagggtgtcagattccattacagatggttgggagccaccatgtggttgttgggaattgaactcaggacctctggaagagcagtcagtgctcttaaccactgagccgggtctccagctcaaagcaaatacatttaaataaaactatgttttccttttcatagtgaatatcttagtcatccttaatacttgaagtgtctgagcacatttttataagagggaggaagtaaaccaacatcactgtctagaggattgtgatttgacctatggtctgttatgagaatgttctataatatgtccttttctatcagtcttcatccaaccttaatagtttctgaaaatgttgaggcatggattttaaataactcataagaaatatattttgttacagtatagaaatgttataaaagcatgagagtatggacctaaagtagatatgaagacagacagaatgaaccact

SEQ ID NO: 2703 - DNA, 1000 bp, mus musculus
tcagatacatacagaagtgttgctgagaggtaagtatatagcaccagatacttaaaatagaaaggaggaaagaccttaagccaatggtgtgatcgcctcagaaaatcaaatattactgttctataaaggagcatagcaacaaaatgattcctcaaggcattttgctatatgcatagcttagtgccttgctcagctatcatcagagagcttcctccttcagtagatgggagagagtgattacagagacccacagctggataatgttcagagtgtgagagagcttgaggcaactggtcctaagtgggatgcctctgtcaacttcttcctgttggggctcagagaatcctatggaagaggaggcagaaaggctgaaagagccagaggggatggagaagaacagggaaattaggccttctaaacacagcacaatcaatgcacatatgaatttagagtctgtggcagcatgaagagggcctactcacaggttcttacctggtgggtcccagctctgagagaggaatggacagaagcctccatccctaactcagaagctatctccaactgaaaaccactagcaaattaaaatttagctttcaccaagggagtctctctggggaaacaaaggactcttaagggtaggcccaacaggagatgtcaacagaaaatgaacttaatggtatttttggaggtttttttttctatccaaccctacaggttttttgcttacatattattgtttctgatttgtgtttttaggggatttctatatgtgccaatgtatgtgtctccatgtctgtgtttcctgtgctttttcttggctctttttttctattcatttgtttgttttgtcctattcaggtttatttgcttttatttagttgtattattttcttcccacccctccctccctccctccttccttccctccctccctcccttcctttcctccttgctgatgcctgttttcaaatgagagagcaggaaagggtgtggatttgaa

SEQ ID NO: 2704 - DNA, 1000 bp, mus musculus
tgattctccagtttctgcctctgtgtgttcattctctcatttcctcccccacacctctgttccagtgtacatgttactgagaaaaccagggccttgtagatcctatgcaagtgttctaccatgaagttttatcttcaacctgaccagtatatatttttatagagtgctagtataaatctgcacacaaagtaatggattttactatgtgttttcctatctacagttttactttgttcatatttatcttctctccaattgcttccccacagccccatatttttctttcattggatattttctttacttacattttaaatgttttctccttctcaggtctcccctttggaagctccctatctcattccctctccctctgcctctatgagggtgctcctccacccacccacccactccctccttctagccctggcattcccctacactgtagcatcaagctttcacaggaccaagggccactcctcccattgatgcccaacaaggccatcctctgccacgtatgcatctgaagccatgagtccctccatgtgtactctttggttggtggtttagtccctgtgagttctgggggatctggttggttgatatttaaaatgttgcattttatcattttttaaatgccattatcaaggctagccttgaaataacaggcacaaagtgattctccagtttctgcctctgtgtgttcattctctcatttcctcccccacacctctgttccagtgtacatgttactgagaaaaccagggccttgtagatcctatgcaagtgttctaccatgaagttgttcctcctatggggctgcaaacatgttcagctccttgagtccttcctcaaactcctccattggggacccagtattaagttcaatgtttggctgcaagcatctgccaatgtatttgtcaggcactggcagagcctctcaggagacagctatatcaggctcctgtcagcaagctcttgttggcatccacaataggtt

SEQ ID NO: 2705 - DNA, 1000 bp, mus musculus
tttcattgtgtaaatgaaccacattttctgtatccattcttccattgtgggatatttgggttgtttccagcttctggctatcacaaataaggccgctatgaacatgtgcccctgtggcatggtggggcatcttttgggtatatgcccaagagtggtatagcttgatcttcaggtagacccatttccaatttcccgaggaacctccagatttatttccagagtggttgtaccagcctgcaatcccaccagcaatggaggagtgttcctttatctatacatcctcaccagcatgtactgtcacctgagtttttgatcttagccattctgagtagtgtaaagtggaatctcagggtcattttgatttgcatttccttgatgactaaggactttgaacatttctttaagtgcttctcagccattcaagattcctctgttgtgaatcctccatttagttctacaccccattttttgactggattgtttggttctttggaggttagcttcttgaattctttatatatattggatattagccctctatccgatgtggacaagttaggggcagaggaagggagggaactgggtgggaaaggaggagcacaatcaggtattgggggtggggaaacaggagttaagccctgagggccagcagaaagaatgaaaacaggcaaccttgggaggtagaagctgtggtgactctctagaatgtacaagagacctgggaagtgagacacacaggactcaaagatgaaacaccctacagtggggagagggaaactgtagagtccacttctagtagaaagatagggcatcaagtggagggatagggttgccatcccacagtcaaaaactctgatccaggattgttcctgtttaaaagatctgcacggacaaaatggagaagagattgagggtaagaagggccagtgactggcccaactggagatccatttcagggggagtctccaaggcctgacactactactgatagtgtcacaca

SEQ ID NO: 2706 - DNA, 1000 bp, mus musculus
ttaactttaagagtgaagctttaaagtccttgtaagcataagatgttcaaataaaccatggtttcttgaatatcacttcaaaaacacatgcaaagcttacaaattgcacttcaccagtctttaaaaaaatacatactacatactttaaatagcagaaaactagcccacaggctagggaaatgtgtgtcagtcatacatctgaagagggacttggatgcagacattagatatcaggaccacttacagtttggatataaataagtaaggaactgaagtgatgaaaggagaacagatttaaaactgccattttccttagaggctatgcaaatggtcaggaagaggaaaagaagcccagtgtcattatcatcaggaaattcagttcaaaaccataatgaacaagatgggttgctcatgcctgcaacctaagcacttgagattcttagaccctgagagctctgggtatgagggagggatctggttggttgatattgttgttctttcaataaggttgcaaaccccttcacctctgtcagtcctttccctaactcctccaatggggtccccaggcttagtccaatggttgactacgagcatccacatctgtattggtctggctctggcagagcctctcaggagacagctatatcaggctcctgtcagcaatcacttcttggcatccacaatagtgactgggtttggtgtctgcctcagtgtaggggaatgctagggcagtgaggcaggagtgggtggttgggtcagggagttcccccatggaagcagggggagggggagagaaggtttgtggaggggatgtggggaacagtgataacattttaaatgtaaataaataaaataaccaattaaaaaaaacagaatcttagacgtgagagctcacatgtacatggccaaattgggtcacatatcatgagcttgtcacaagtaaacacacaagcaagcaaacataagtggatataacctcatatctcccaagatcgccgaa

SEQ ID NO: 2707 - DNA, 1000 bp, mus musculus
aaactctcctttggagggttttttttttccatttttttaattaggtattttcttcatttatatttcaaatgctatcccgaaagttcactataccctccctccccccgccctgctcccctacacacccactcccacttcttggccctggtgttcccctgtactggggcatataaagtttgcaagaccaaggggcctctcttcccaatgatggctgactaggccatcttctgctacatatgcagctagagacatgagttctgggggtactggttagttcatattgttgttcctcctataaggttgcagaccccttcagctccttgggtactttctctagttcctccattgggggccctgtgttccatccaatagctgactgtgagcatccacttctgtgtttgccaggcactggcatagcctcacaagagatagctatatcagggccctttcagcaaaatcttgctggtgtatgcaacagtgtctatgtttggtggctgattatgggatggatccctgggtgggacagtctctggatggtccatccttttatctcagctccaaacttaatgaatttatgaaattcctttggaattttatgaggctattgatgatcaattaagccttcagcccatctttactgtctgaagctgctagaacaagcagaccttagatttctaattgtgctgtgaactttcttgttcctgaagctatgtagagctctctcatcattttaaaaatcccaagagttttagaggttgtattccaggaagctatttgttataccacagtaccactgtctttcttatctgttgtgatctccctagagaccataggttggcacataacaggtgcttaataaatagtcaacaattgaggaaaaaaaaacaaattgtcttgtatataagttaaagtagcatctttaattacattttcctttacttctttttccaaagagaggacagaaagataaagtaatcttgaggtctaacagtcacatcaa

SEQ ID NO: 2708 - DNA, 1000 bp, mus musculus
agaaactgccagactgatttccagagtggttgtacaagcttgcaattccaccaaaggccttcatcttctgccaggaggcaggtccgaatgccagatatctgtgcaccttccctgcaagaggagagcttgctctaaccactgaaactcaggagagagctagtttcccaggtctgcggatagaggagttgttcttgattcctgttgtaacttaaagagaagcttacacaatgtttggagcccttgaagtcctaaagatgaataaggagggtgtcctcaaatttcttggtacagaaacccacttaggtagcaccaaccttgactttcatatggaatagtaattttactaaaagaaaagtgatctatgtcttaatctgaagaggacctgggagaagctgttgcttgcatgcaggtcctgctattgtccttgataatcctgctgatgtcatttccagaaacactggccagccagtgagctgtgctgaagctttctgctgccacaggagtcactttcattgctggtctcttcatacctggaaccctcactaaccagatccaagcagccttcagggagccacagcttctagtggggactgatcccaggattaaccacctcttatgtcaacctgctcaccttgctctatgtaacacagattctctcctacgcaccatgtgagcattgccatctcgtgcagcaacaagggagctcactcagtgggtctgatgtggtggatcttggtccagaagtactctgcattagaggtactatctcccgtgaccacccatgggaggctatgcctgatctttacttttacagagacccagaggaagttgagaaggctgctgctgaaaaggctgtggtgaagggtgaatggatggaccagctcctgagttcactgctgctcagcctgacatggctgactggtttgagagtgtgcaggtaccttctgtgcctatctagcagccccacccccatggaaaactagagttccctgccaaccac

SEQ ID NO: 2709 - DNA, 1600 bp, mus musculus
atatttgtgtcttgtagattcgataaaaatcacatagtttgtgttaataacttatttaaccacaagtgatttgtaataaaaagtgagaaagaagacattgaagtatcttttgtgtaacaaaacaagataggcatacaaatttttgtcctttcagatataaggatagtacaattaacatatgcaaataacttagaaatcaaaacatgaaaacacaggcatagtaaatgatgtagtttgcattatcagtaatggtgggaaaatggtgctataccaaaccctcccccttctccctttcattgtctctgctcccagttgccctcatggactctatcagccaatgatacctgaaggcaaggagagtcaactcaactcagcactaaattcaggatacctgttcaattttcatagcctttccatttaagatacgatgatgatgattatgatgatgattatgatgatgatgattgtgatggtgtttatatgcttggcccagggagtggcactattagaaggtatggccttgttggggtatgtgtgttggggtgtgggcttaagatcttgattttttttttttttttttttttttggtttttcgagacagggtttctctgcatagctgtggctatcctggaactcactctgtagaccaggctggccttaaactcagaaatccacctgcttctgcctcccaagtgctgggattaaagtcatgcaccaccactgcctggcaagaccttcatcttaactgcctgcaagccagtattctgctagcagccttcagacgaagatgtagaactctcagctccttctgtatcatgcctgcctgaatgctgccatgttcccacatgataatggactgaacttttgaacctgtaagccagccccaattaaatgttgtccttgtaaaagttgcttcagttatggtgtctgttcacagcagtaaaactctaagactatgatgataatgacgatgaagatgacagtgacgacgatgacaatgatgatatttggctttttacagataggacctcactatgtagtagctcttgctgtcataaaactcaccatgtagataagactggcctctgatggaattaaaggcatgttccactatgctgtgatttccattccagatttaaattcaagcaataaagaatgtgttcactgtgtttcccatgtccacccctgggttaataagtatgactaatgaacctgtatcctataatatgagcgtgaacactggaacttatcaacccctacatgctgaaaacattctctgaggaattgtagactagggtgccactctaagtaagaagtgtttactatggatcagagcagttaaaagatgagtcagtcagcatttagcaaatataagcaggatgaagattaaagtttaggccagcctgaactacatgaaacactgcctcaaaaaaagccaaaaagaatgactaaaggagagagacttttcaaacagcaaacagcaagacttgaaagctccttattttttactttataacttttgtcttaaactactgaactttcttcctggcaagaattttgacagaaagcaatttttatttatctaggaatttagaaatgt

SEQ ID NO: 2710 - DNA, 1600 bp, mus musculus
cctgcagaagaggaaaaaacagagtctaatcaggaggttgctaacccagagcactatattaaacaccctctacagaacaggtgggcactctggttttttaaaaatgataaaagcaaaactaggcaagcaaaccttcgattgatctctaagtttgatactgttgaagacttttgggctctatacaaccatatccagttgtctagtaatttaatgcctggctgtgactactcacttttaaaggatggtattgagcctatgtgggaagatgagaaaaacaaacgaggaggacggtggctgatcacactgaacaagcagcagagacggagtgacctcgatcgcttctggctagacactgctgtgccttattggagaatctttcgatgactacagtgatgatgtgtgtggagctgttgttaatgttagagctaaaggtgatgagatagcaatatggactactgagtgtgaaaacagagatgcagtcacacacatagggagggtatacaaggaaaggttaggacttccttcgaagatagtggttggttatcagtcccacgcagacacagctacaaagagcggctccaccactaaaaataggtttgttgtttaagaagacaccttctgagtattctcacaggagactgcgtcatgcaatcgagattgggagctgaaccaaagcctcatcaaagcagagtggactgcactgaagttgattccatccaagtgttgccaagatataagagaagtctcattcgcctttgtcttgtacttctgtgttcattctcctcccccacccccaatttttgctagtgtgtccactatcccaatcaaagaattacagtatacgtcaccccagaacccgcagatgtgttcctggcccgctctgtaacagctggttagaattaccatgacacacacatttgcctttccacagtattcgaaaaagaacttgcatttctattaccttagcaggaaagatctggttttgctccactccatgcaggagcggactttgctggtgtgagagtatgagtacagctttctagcaaccttttgtttcctttcacagcattgtccttgctgtcctcttgctgatggctgctagatttaatttatttgcttccctccttgataacattagtgattctgatttcagtttttcatttgttttgcttttgttgttttcctcgtgtaacattggtgaaggatccaggaatatgacagaaaggtggaataaacattaaatttgtgcattctttggtaatttttttgttttttgtaactacaaagctttgctacaaatttatgcatttcattcaaatcagtgatctatgtctgtgtgatccctaaacataattgtggactataaaaatgtaacaccataattacattcctaactagaattagtatgtctgcctttgtatctctatgctgtactttaacactttgtattcttaggttattttgctttggttacaatggctcaagtagaaaagtggtcccatccatattaagacagtgtacaaaactgtaaataaaatgtgtacagtgaattgtcttttagacaaaaaaaaaaaaaaaaaaaaaaagaggacaaaacatt

SEQ ID NO: 2711 - DNA, 1000 bp, mus musculus
ttcacctatttgtttgtattttcctgtatttctttaaggagtatattcacatcctatttaaaggcctctataatcttcaaaaggtcattttcttgtattaggtgtgttaggatattcagctattgctgtagtaggagagctgtgttgtggtagtgccatattgccctaacttttgttgattatgttaaattgccctttagctatctggttgttcgtagtattgacaggcatggtagtccttggcagaagtagaccactggagctacagaaagagctggtagaccttgttgttagcaggcctctagttttgcaggtagagctgcttgtccctggttgtagcatgttttcagggattcaggcagaagtagtagaccctgatggcttcaggctgctgattgtcccatgtgaggtagtctttcaagaacacaggtaaagctggtggtccctgatggttgcaggctctatttgtccaatgtagcagaagatattcatggatgtatatggagctgtggccccagaaatggagtacagaagaggcaaggcagagctcaccattgctggatttgtccagaggagctgtcaggtagggaattgggggtatgggtctcacctggtggtccctgatggcatcagatgtctgaggttgtagttttagaggtatgtaactggaagatggagcacaaagttgtcagagaagatctcaaggctgctaagcttgcctaggtccccacaggctggcttttggggcttgggtaactcagctggttggccctggcagcagcagacttctaggaatgcagtcatagatgtgctcagggaaattgagtgtagagggggcagagcttgctgctgctgcgattgacatgcagggcatggagacaaggctttcttcaatattttgagtatatattatggaaagaaaataaatacattgttacccattttttttaaatcagagcttaatgaagcttactatttagatgataaggctaacaatatg

SEQ ID NO: 2712 - DNA, 1000 bp, mus musculus
gagtaactgggaccagcatgaccaaggcacacaggaacaccaccagaccagtagcatggatcccttctagtctgcctgggttggtgtcctgagcagaccttgggtgaaaattctgcattcagccccacaacacccagagtcagctctactcccaggcccagcatcacaggatcacaggattccaggagtttggtcacaccagaatctcagggtcccaaaggcagcttgactcccaggagctcggacaaacctaggaactcaggatcacatgatcccagaatcacaggatcacagatacagcttgattcggaagagttctgacacaaccatgatcacaggaaggacgggctcccatcagacatagccagcgcaggtagtactagagataaccagatggtgggaggcaagcataagaacataagcaatggaaaccaaggttacttggcatcatcagaacccaattctcccacgatagcaagtcctggataccacaacacacaggaaaagcaagattaagatctaagatcacttctcattatgataatagaggacattaaggacataaataattcccttaaagaaatacaggagaacacaggtaaacaggtagaagcccttaaagaggaaacacaaaaatccattaaagagttacaggaaaacacaatcatacaggtgaaggaaaggaacaaaaccatccaggatctaaaaatggaaataaaagcaataaggaaatcataaagggagacaacccaggatttagaaaacccagggaagtgatcaggagtcatagatgcaaacatcaccaagagaatacaagagatagaagagagaatctcagatacagaagatactgtagaaaacattgacaaaacagtgaaagaaaacacacacacacacacacacacacacacacacacacacacacacacacaagctcttaacccaaaacatccaggaaagacaggacacaatcagaaggccaaacataaggataatatgc

SEQ ID NO: 2713 - DNA, 1000 bp, mus musculus
gctttaagggattcattttaggaaaaaatcctgctattaatatacttttcctgctattaagcatatataataatcactcagtaatagcacaaccatttggagtagatctctgcagatccaggaagatgtactgtcctatagtgatgctatataaatagatgacttaagtttttataatgatcctataagaattcctaaaattatatgtgattattattttttttagtggggctgctattaggtcctttactttttctcttttttttaattctttttttttaaaatttgtaattgttttatttttgctctcttggatactttttgggggggttacattcatgtcttcttttttgattttttaaaatttattaggtattttattcatttacatttccaacgctatcctaaaagtcccccatacattcccccgactcctctacccacccactcccacttcatggccctggcattcccctgtactgaggcatataaattttgcaagaccaatgggcctctctttccactaatggccgactaggccatcttctgatacttatgcagctagagacatgagctacggtgggtactggttagttcatattgttgtttcacccatagggttgcagacccttttagctctttgggtactttctctagcttctccattggggggcccagtgatccatccaatagctgactgtgagcatccacttctgtgtttgctaggccccagcatagtctcacaagagacagctatatctgggtcctttcaacaaaatcttgctagggaatgcaatggtatcaaagttgggaggcttattatgggatggatacccgggtatggagtctctagattgtccatccttacctctctgctccaaactttgtctcagtaactccttttgttcccaattctaagaaggggaaaagtgtccacactttggtcttcattctttttgagtttcatgtgttttggaaattgtatcttgtatattggtta

SEQ ID NO: 2714 - DNA, 1200 bp, mus musculus
cacagacaagaaagaggaagagaaagaggaagaggaagagaatctcctgaggagaggatagctgaagagttgccttcttcagataggcctgtgagcatgtccatggaagcatcttcttcagtaataattgatatggattgtcccagcccattgtgggtggtgccaccagtttggcaagtgcttccaggttgtacaaagagataaactgagcaagctaccaccacagagaataaggagagtaagcagggtttctctttggtctctgcttcaattcttgcctccaggttcctgtcctgcttaacttttaaaatcacatttctattatcatcgctctctatcatcaatcctttcattctcacatccttcctctcatcttctactctctgctgatgctgtgaataacttttattgtacttgaaacatgaaaattccagacagttctgtcttggctctttattatttatccctacgggagtatgttttcaaaagcacatattgtgtggctgttattcaattatatctgtagatcaatatatctaaaaatgaagaaaaagtaaagttataaccattcagggaataggatatttaagtgtaaaactagagaaaaagaaacagcttttgttgcttgggagatctgtggaatggttctgtgagtgagtgccttaaaaagtgtacatatggtgaaccttgacaaagagtcgtgtcattgaggaatgtcctagtccctggtacaaacttctgtctttgttagaatttctattactgtgaagaatcatcataaccacagaaacacttgtgaaggaaaatatctaattggctgacagtttagaggttttagtcaattatcatcatagtgggtcacatgacagtgtgaagacagacatggttctggggaaagaactcagagttttgcacatccagattggcaggcagcaggaagagaactggtttgagcatttgagatctcaaagtctgtctccacagtgacacatttcctccattgagaccacacctaactctaataaaggccacgccttctcataatgccacagcctatgagccaagcattcaaacacatgagtctatggggcatttcagttcaaacaacaacaggcagaaaatgtttgcttgagtaattgcagtttgatgactgttcaatagaagtttaagcaataaattacagtaccttaatagttaaga

SEQ ID NO: 2715 - DNA, 1200 bp, mus musculus
ggttcagaaaaattactgaataaaacaaatgtgattacaacaaaataaaaaaaaaaagacttgacagagcgaattaaactaaatctgaattctgaaacgtataaataaatttaaaagagctatagttttaataaaataatgagaaggcataaaatgacccaaattgaatgatatatacataattcccaaatcaaacgctatcaatagaatgagatacctgtatattagatattttagattttggtttggtttgtttttctatttgtttgtttgtttgtttgttttgttttgttttgtttttgaggcagggattctctgtgtagccctgactgtcctggaactcactttatagaccaggctggcctcaaactcataaatccgcctgcctctgcatccttagtgctgagattaaaggcatgcaccaacactccctgtttttagattttttttttttttaagaaagggtctctatatcgctgtggatatcctggaatacacattgcagaccaggctggccttcaactctgagaacccagctgcctgtgcctcctaagtactagtactaactaaagttttgcgccattttgcctgggtcatattaacagtcttaatagattaacaccttcaaataatcaatgatgctttttcagtcttcaggtgattagaatgtacatagacatatgtactacagcactacatgtacataaccatatgtactaaagcattcttttcaagttgcactgtgatggtaattttctggagattcacatgtgacttaatgaattgaatggagaagtttcaccatgaaaattacaaggctccaaataatcacctgaataagtttgagtagaacaaagaaataaagtaaaaggccatgttttctagaaatagtatatgctttttctccttcatttagatatataaaaaaaaatcacatatcttctcccttttggatttctgaagttagtatcattgccctcaaagctctcaagcattcatccctaatgaagagtagcattataggcttcttttgtcccaaagtccttaagcttaaagtgaggcttctacctgcatctttaaacttccagcttgcagattacttgttataggatgactttgattttataattgtcaacatcactaataacttcttttcttatcatctgtatgtctacctatctacctaaccattcattgtat

SEQ ID NO: 2716 - DNA, 1000 bp, mus musculus
tatgttcctatctctgggctggtagtcttgggttctctaaaaaaaagcaagctgagtaagccaggggaagcaatccagcaggaagaatccccccatggcctctgtatcagctcctgtctccaggttcctgccctgtgtgagttcttgtcctgatttcctttgggtttgaatagcaatgtggaagtgtaagctaattaaacccttttctccccaacttgcttcttggtcatgatgttttgtgtaggaacagaaaccctaagacacaggctatgttgagctgcctgatatggattccagaaactcaaccttgttccatgtgaaacaaatttaagtcatctggaagagcaagtacccttaagcactgagctatctccccagttccaattaaatatttaaaataatttcactaaagaaggatgttttctttcttttttactggatattttctttacttacacttcaaggatttttccctttctaggtcttccctctggaaactctctagcccattccccctccccttgcctcaatgagggtgatttccccacccacctatctacacccatctaactgccttggcattcccctacactgggacatcgaacaccttcagtcccaagtgcctttcctcccacggatgtccaacaaggccatcctctgccacttatgcagccattgccatgggtcccttcatgtgtattctttggttggtggtccagtccccaggagctccgcggggggaggggtctgcctttttatccctgctgctccctccatgaggctgcaaaactcctcagctccttcagtctcttcttcaactcctccatcatggagccctgcattcattccaatggttggctgtgagcatctgcctctgtatttgtcaggctctagcagagcctctcaggagacagcagtaacagacttccatcagcaagcacttccaggcatccacaatatcattcaagtttggtgaatgtatatgggctagatccccaga

SEQ ID NO: 2717 - DNA, 1200 bp, mus musculus
atttgctaaacacatgaaactcaagaagaacgaagaccaaagtatggacacttttccccttcttagaattgggaataaaacacccatggaaggagttacagagacaaagtttggagctgagacgaaaagatggaccatctacagactgccatatctggggatccatcccataataaggttccaaatgtggacaccattgcatacactatcaagattttgctgaaaggacccagatatagctgtctcttgtgagactatgctggggcctagcatacacagaagtggatgctcacagtcagctagaggtaaaaatgattgtactgtgattaaaaaataaaatgatacatgatatttaatatttgatattttatatcaccattacaaaagtgttaactgtgtggtacttcacagtaagcccataaaatatgtccttgtgtatttatcttttctccactgtgaagctaccctcctttagttcttcttgcctgagaatatacataaccataaacaacaacaacaactgtggggcattgggctatacacagaccatctggtctccagttgagctgagatgctgaacccaagatccagtggtgataattcacctacaagggacggaaggagttctctcatgtctcctggaccctggctgctctctaagttactgcctcctcagcccccacaagagaagcatggctagaagtcaactaggcaatgtctcaagcttctgaccttcaggctaaattcctccccccagttacctagcaacagaaaagatacagcataccataagagaggctgtttggccactcctcattctcttgctttcttccttttattcccctcactctcctctctcctctcactctcttcctctctctctccctcttcctctctagtctttcttctctctctccttttcccccttctctcctcttggccatggctggtctctctctctctctctctctctctctctctctctctctctctctctctctttctctctctctccaccttctctcttttcccttctgcctttctacaataaagctctaaaaccataggctctctctgttcatctgcattaaacttagctgggtgggatcttgaccttccatcataactccctaaatttggtagtacagccacctttgttctttagatatgtgaatctccttatccaattcatatttcatc

SEQ ID NO: 2718 - DNA, 1000 bp, mus musculus
ctaaggaaagtatttcatactcacacaaagttaaatgatattagtatttccataaacactgataacaaatgtgcagatatcagataggaaatatgtttaacatatttaacatgtttaaaatatttgtgcatatttaacacaagccagtatatggtattgaaacctgacaaaaatagctgggtatactggtgctaatatgtagcaggcatagtaatataattcaagcttttttaatagggaaattgaagagaggtggcactacctggcaatctatttcaaaacaaagggaaaagataaaaaaaaatgaatctataaatctcaaattgggtcccaagaaggctcactttcctaaacatcagacaaaagaactaaatatcctttgaccatatctttatatatactccaaacatactataatgaatgtttttgaaatttttatttaaatatacattttgcttaaactataattacatcattttcttcttcctttctcccttgaaccatttcagtgtgttttcttcttattctcacaaatgtatggtctctttttttattgttaatgttacatgtaagtacatatatatatatatatatatatatatatatatatatatatatcctgttgagtctgttttctattgcttacctgtaatgattgttttgctttgtaattgtcacagtgctataagaaccttgtgtgtatcacatatttcattattatccaagaaagcacagagacagtttatatcagaaaacaataaaatacttagtacttaacattagtaacttttagtggtggtttgaatgagaaatgtccctcataagctcacttatgtgaatacttagttgttggtgctgtatgggaagttttagttggaggggcctggtggaggaagtacgtaggtgttgagttttgaagattcataacaagaaccagtgtgaatctgtgctctctctctctctctctctctctctctctctctctctctctcttgctctc

SEQ ID NO: 2719 - DNA, 1000 bp, mus musculus
cattctgatgatcgtgagtggtcttggtttttgttagtaagattcttacatttgcttctcgctatctggtaatctctggagttagttgttatagttgtctctggttaaagcttgttcctcttgtgattttgttagcctctatcagcagacctgggagactagatctctcctgagtttcagtggtcactctgcagagtgcaggtatgatttcctcttgcaggaaaggtgcacatatatctggtgtttggtcctgcctcctagcagaagatgaaggcctgaaacaaggcctgtcccataagctgttagcttctgtagtccaaactctcacctgagcagactagtcttggagggatctgggaaccaatatggctcctccaggtgctccagcaaagcgccccacccgccccgggcagggctgacacctctcctctggcagagaaggtacccagatgtctggaacctgaaacagggtctgcctcagaagctgtgtggcttctgcctgtcccagaagctgttagcttctgcagtccacactctcacctgtgcagactagtctcagacagatctaggaaccaagatggctcccccagatgctccagcaaagccctccaggctggggccaacacctctcctctggcaaggaagttgcctggatgtctggagcctgaaatggggtctgcctcagaagctgtcttctagggaccttgggggtgtctgcttactcagtgcccagttgacttggtgctgttgccgaccagaagggacttgtgaccctggtcaggcagggttttctgtttccctaatgctgtctcatgtcctgtgcaattggaatggaacagaagttgtgtttcactcactggtggtcttagattgagtggagagtcctctagggaccttggaggtgtctgctgactctgcacccaaggtgacccagtgctggtttgggttaccattcttagcatgatcttttcttattccatacatttgcctgaaagtttca

SEQ ID NO: 2720 - DNA, 1000 bp, mus musculus
tctaactaaaaggctgagataaaatatacaaattttaaaaatcagaaatgaaaatgtggacataagttggactggttattggacctcctttccttcaatgttttctccttttttgtccctgcatttcttttagacaggaacaattctgagtcagtaattttgactgtgtgttagcaaccctgtccttccacttgagaccctgtcgatctactagaggtggattcttcgagtgtcctttcctcagtgttggtcaatttggctaaggtaacctccaatgagtcctgagagtatcacctacagactttaagaagtataacaagcagaaatgcccaagtgaggaggcctcagtcccacttagaaaatggaaaggaaataatcaagagaggcagagggaggagcacatgggtggaagacgggagggtggggaaaagggaaccaagatcaaatatgaggggaggggacaggagagaagtgcaaatggccaagaggatgaatggaaataagcaatctcgaggagtaaaaagtggggagccttctagagagtaccagagacctgagacctgagtcactcttaggactcattttagcccttcttaaagaaatgtagatttttaaattataattgcttgcttattttatttatttacatttcaaatgttgtcccccttcctgatctcccctctataaaatttccattctatcttccctctcctttgcctctaatagggtgcttcccaacctactctcccactcccacctcacccatgaactgagccctggaatctcaatggaagagttacaggaaggactgacacagctgaaggggtttgcaaccccataggaagaccaaataaatagatgaccccagaactcccagggactaaaccaccaaccaaagaaactatttttaaagtaaagaagtgagaaatttttgaaaataaactgtacaactgccttgcttgtgacaatatctattttatgttagctaacttcaagttaa

SEQ ID NO: 2721 - DNA, 1000 bp, mus musculus
tatagaagctttgcaatttttatgaggtcccatttgttgattctcaatgtaatggcacaagctattgctgttctgttcaggaatttttcccctgtgcccatatattcgagacttttccccaagttctttctcagagctcatgtctctagctgcatatgtagcctagtcagccatcaatgggagaagaggcacttggtcttatgaagattatatgcccaagtacagtggaatgccagggccagaaagcatgggtgggcagattggggagcaggatggagggagggtataggggacttttgggatagcatttgaaatgtaaatgaagaaaatatctaataataaaaaagaaaggacccagtatgtaagaactcattctttgtcatcccacttaaaaatgttgaaccaattaattatgtgtagacttgtgaaaagtgtgaggaaaaatctagtgagtcctctatagaggctaatgaagtccaaattatgatggtggtatattaatgggatgccagtttaattggaggagagaagctatcacttatattgttaagaaattgcttcaagaatctgaagatatcatactcccgagatcttcaggctctttgaataaaatgatgtaattttatttgcatttagcctatacatatcttataatatactttgttacttcaatttctttcaatatctaatacagtataagtgccatatgaataataattaatattcttttgtaaatcatagcaagagaaaatctatatgtatacaataaagccatattctcattattttcaatttcaaacatataaatactggttagcaactataaattaaagatatttatcaggtttcttctggtctgtaatagatagggggcacaaatgaattctagtttgagtgttaaacaaccaaaataaaaaaaatagcatctagaagttatcaatacatatgaaaacaatgggctttgttgaaaagatacaagtttggttagggcatactaatt

SEQ ID NO: 2722 - DNA, 1000 bp, mus musculus
tttttgggggggttgcctttccagataaatttgggaattgctctttctatgttttagaagaattgtggtggaattttgatgggaattgtgttgagacctgggaggtgagaaactctcaggactcaaaggaccttagatgaaatgccctacagcgagaagagggaacttgaagagcccacctccagcagaaagaatgggcatcaagtgagagatggagttgccatcccccagtcaaaatctctgacccataattgttcctgtctgaaagaactgcaaggacaaaaccggaaaagaacatgagagaaaggagctccagtgacaggcaggcacaaattggaatccagctcaatgggaggccccaaagcctgatactatttctcaggctatggaatgctcacagaaaggggcctatcaatactgccctctgaactacccaaaagcaggtgaaagaatcatttgcagatatttatacccaaccagtggacagaaactgctcactcctgtggttgaattagggaaaagatggaagaagttgagaaggagggcaaccttgtaggaggacaagaagattcagttaacctcaacttccaagatatttcagccactgcaccaccaaccaggcagcatacatgagctgatatgaggtccctaacacatatacagtagagcactgccaggtctgggttaagtcagagaagatgcatttaaccctcaagagactggataccccaaggtgtagggaggtctaatggggtggagagtcctggagacatcctcatggagacaagagtgatctggggaggagttacaggatatggaagagtcagagggtggaccagggtgagaataaaatatggcatgtaaaaaaaaaaaagatttaataaaatttaaagaaaaataaaacagttaggatggtaatttatgtccagaagttagagagtaggttgactgaaagaaaatgagtgggctatttttgctgaccagatctaatgagtttctt

SEQ ID NO: 2723 - DNA, 1000 bp, mus musculus
gtgggattaacactaagaaagatataaatgaagaaataaaaattacatcctcatcattaccaccaccaccatcaccaccaccaccaccaccatcttctctatgaaaatagattaattcactgtaggacagtgggccatgtcacaaaacctggtaagttgagcaggttcaaagtcctccaacccaggcacccacataagatgggaggtagctccctaccacattacttcccatataggacatgtgacctgtgttcatgtaggccagaacagagttctaaatgttaatgagatatttacatgagccctgtaggtatagccaataagctttccttctcagacattcctttatgcaaagggtatttaaattctggcccaccctgatgagttgatatgctcctgatttctacactgatcaatcaataaacagtttggaaccaaggactgtctctttcatcaagaatcaccttggggagaaaggagaaagccttcatctacagaccatcacactctaagtctcctacagaaggcccttctgtgttcctagacaacctcctctaagctaaggatttttacagatgagctaagcccaagtccccccacaccactctgggctcatcttcagcctgagggcctcatccattctctgctgttcagcgatccatgtctggatgtccaggagaatggccaccttgtcacaggccagtcgaccattaaccctcccttccatgcagtttccagtggagactggatgcccaggatcttgggaatcccagcttttacctcccacatcctaggctgtatttccctaccccctgtgccttatattgacagttcactagatcatagcatcctacagaatctcagggtagattcagtctagtatctccacattcttcctgctcaagtagctgtttccacacatgaacatcagggcagaaagcaaaaccacaatttaccaaagggcaggcaggggaaaaaggaaaatcaagatacaaaagtg

SEQ ID NO: 2724 - DNA, 1000 bp, mus musculus
ttatatctcttgtattatgtggtgatgttgtgtctgtagttcttgttctcattcctaggtttctcatctccagagctgcttctatgtgtgctttctttaatgcttctattttcatttttaggtcttgaactcttttatttattttcttcacatactttgtattgtcttgtatttctttaagggatttatttctttcccctttaagagattgtatctgttcaactatgttttcctgtatgtctttaagggaattatttatgtctactttaatggcatgtaattgtctttataagatggaatttaaggtcagaattctgctcttcaggtatgttagtgtatccatggcttgctgtagtaggagaactgggttctgatggtgtcaaattacattggcttctgttgcttatgttcttctgtttaccttcctccatctagttggctctggccagggtatcccaaattgtagcaggcctccccagagggagatggaggtctgtgtgatgagttagagaagacctcctgggaggcaggcagtcctgtggccctagttagagtaggcctccagggagacaagcagagattggggatagggaggaaaccaatgtgcctgatacaagtggaggtatggaaggggaagaagatgtggctcaacagatggatcagagtccagttctggtggtctctgtggagacccagctgttttgagtaattgaggaatgggtctcacctatattcctatttagtgaagtcttccctggaaataggcagaggtgtgagtttagggcgtagcatgtctatctgcagtgggtgcaggaggaattgctgactggaagggagccagggttccaaccataagtagaaattttatagcaagagttttacactagaacatagccctgagcatctcaaccaccactccacacccaccccaattactacattaaaagatatattgcttccaaattgtgtccttaaaagacactttgaaaaattatttttt

SEQ ID NO: 2725 - DNA, 1200 bp, mus musculus
caactgttatattttgaatagtcctataaaaagattcacatatatagtagggattagaaaccctctgccaataggttcaatatgaattgaacataaggcttttttgtttttatttgtaattaactactttatttatttactactttatttatttacatttcagatgtttctcctcctggtcccccctcttccttttcatcccatttctcctactcctcaagtctctacaagattagatgcatcctctcccactgaggccagacaagaaagtcctctgcttcagtccagcctgtatatgctctctggttggttgctgtctctaggacctcgcaggggttcaggttagttgagactgctgatcttcttatggggtcaccctctccttcagctccttaaacccttcccctatttcctccacagggtccctgacttcagttcagttgttggatcaaagtatctgcatctgtctaaatcagattctggtagggcctctcagaggtcagccatgctaggctcctatctgtaagcaaatcatagcatcaatggtagtgttaggccttggtgtatggatcccatgttgggccagtcactggacagtaaggcatccctaaaggaaatgttccagctttggtcaaaccatcaagtgagtgcattggaaaagactacttgatcttagctaatgaaaaaatggatcctaagaccacttactaaattgtccaaaaattttgctccccacagaaactgaaagagtaaatatttgttgtatgaaacaaagatggttgcttttgtggcaagttgttacacagtaatggaatattttagttaaattttttggcttagccagtttgatgtcaagaaaacatccacatgggcacatgcccatccatccaccccccacatatacacataaacacacacatacttctataaattatattttgttttgtttaattttctaaaatgtacctttggtatatgaatactacagagttcaaatatgtttagggatgttagagataagggctatgctgataactagagatgaagtgaggtacaagaataaattggtatgataggaggcttatacattggttgtgtatgaaaatcatgtgaaaaatatttgagaaactgggttataacaaatctatactcttctcataatagataaaaagccttttatggtaacttggatgtattttc

SEQ ID NO: 2726 - DNA, 1000 bp, mus musculus
tttgcttgggtcaggatatataggacttgtgctctgaaggaatcatattgccctggctcctgttgattgtgttcttatgctgacctttggccacctggtcgtccctggatgttcctagcatagcaggtatcaagatggcaggcctaacctggatattcctggtgatagaaggcctctggtagggaaccttgtgttatcaagagtaggtgttcacagcaatattttgtaatgtggaaattgattttggtgaatattcttcagtgtttcttagggtatgatctgtggtgacagaaacatatactaaaccatatcttattattgattgatacctacatcaatatagtagcccaattgataacagaaataatcttagattacatttcctttttttctacactttagtcatcagcaattatttcccctattgttttgaaaatatcctatttcagttattttaaaaattttttcatatgttatattttggtcatagttttacctcccaaaattcctccaaaatcatataaacaaaacaaaactaacaaacaaaaaatccaaaacacacaaaataaagacacaaaaacacatcaaaatgaaaattaaaacaattaaaagaacattaaaataatgccaaaacaaagcaaaatggagaaaaaggtatacaaaataccactgagtcgaattttgtcttggctagctatgccagagcatggggcctacactgaagtgtggttgacatactcagtgataccccattaaagatatttttttttcttctctttgccagaggttttcgattcaagatagcttttttgttaggcaaagatgcattcctgtgtctgtctacatgtccctctcagtgctgagaactcatgtagcttgaatctctgcaggtcttatatgtactgccaaggtctctgtgggttcatatgtgcatttgtcctgttgtgactgaaatacgttgtttagagttatcaattccctctggctctttgaatctcct

SEQ ID NO: 2727 - DNA, 1000 bp, mus musculus
agaatgggaattgatccattcctatctctttgtactaaggtcaaatctaagtggatcaaggaactccacataaaaacagacacagtgaaacttatagaggagaaagtggggaaaagcctcgaagatatgggcacaggggaaaaattctggaatagacctttagtcttttgggtagtttggataatgggttatcaatcattgatttttcagaattctgtttcattgattctttgtactggttttgtttgttttcttctttttcctctttcttttttaaaaaaaaaacattatattttatttaatcttttttttctacattatagattttatcccctttctgttccaccatctgactgttccacactccatatgtactccccgccccctccccactccctcaggcctccagtctcctgacagttaggtgcatcttctatgactgagcacaaaaacagcagtcctctgctgtatatgtgttgttggcctcacatcagctggtgtatgttgcctggtagatggtccagtatttgagagatctcggtggtccagattaattgagactgctggtcttcctaaagggttaccctccacttcagctttttatgtcttttccctaattcatccacagggatcatcagtttctgaccatagtttgggtgtaaatatatacatctgactctttcagttgcttgttgggtctttcagagggcagtcatgataggctcctatttgtgagcactacacagcctcagtgatagtgtcaagatttggggcatccccttgaggttgatcctactttggtcctgttactggacttcctgttcttcaggctcttctccatttttgttcctgcagttatttcagacaggacaaattgagagtcagagtttttgactgtaggatcacaacttgatacatcacttgattcactgtctttctgctggaggtgggctctacaagttccttctccccactatagggcatttcatctaagattctt

SEQ ID NO: 2728 - DNA, 1200 bp, mus musculus
tggcccctttgtaattgtttattattattattattattattattattattattattttcacttctattttcaaatcctggatggttttattcagttccttcacctgtttggttgtgttctcctgcaattctttaagggatttctaagaactctttaaggtcttcaatctgtttatttgtgttctcttgtatttctttaagagcataattttttgtccctcttaaattcctctatcatcctcataagatgtgattttaagtcagaatctgcttttctggtgtgttggggtaatcagggttctataacatgggggaattgagttgtaatgatgacacatattcatggtttctgttgcttattttcttgggcttgcctttcactatctggttatctctcgtgttagctggtcttagtgtctctgactttggcttgtcccccttgcaaacctctttgttgctaatcctgggagaccagttctctccgggaggaatttagatatggagagttgtggcacagggtcagctctggggtacagacagagaccagaaggattctgtccccagctgatccgtggttcccctgtcttgatggctctgtgagggtctctctttggcaagaaatttgaagagaagtagtggtcttatctgtacttacaggtgtgtaggcactcctggcagaccagatctttcctggcagtatttgtgtatgtagttctgtggcacaggatcagctctgggtacaggtggagaccaaaagactcctgtcacagtcagccccttgttttctgtgtcttgagagttcctagcaggttcctctgagcagtagtggtggtccaacctgcgttcatgggcctgtctgtactccagggagtctcaattcctccaggcactatttgtgtatggagccctatgggagaggatctgctaccacaattttaaatatgtataaataaactgattatcccctcttctttttactatcccccaaacactaaaatacaattttatttttgtgtgtgtcctttgcacttctttataatacttgacaattactttcagttgcagtccttattaacagccaatagacttgcctttaaacacagatttacaagtactgaattgattgataccttcctggtttattaaaaacaaaacaaaaaacaaaaatatatctacagggatataaactttattcttttag

SEQ ID NO: 2729 - DNA, 1400 bp, mus musculus
atttttttttcaattccctcacctgtttggttgtgttttctggtaatgatttaagggatttttgtggttcctctttaagggcttctgtgttctcccatctttctttaagggagttgtttatgtccttcttaaagtcttctattatcatcctgggaagtgattttagatctgaatcttccttttctggtttgatgggttaaccagaacttgctgtgatgggataactgggttctgaacaagtagccttcattctgttacttattttcttgtgcttgcctctcaccatcaggttatctctcattcttcctggacttgctgtctctgactggagtctatctctcttctgagtccagctgtccctgtggtcctctgattctgggatcctgggatcctgagatcctgggatcctgggtatgtcagagctcctgtgagtcaagctgcctctggggtctggaaattctggtgagaccaagattctgagaaatgttgtgtcagagctcctgggagtcaagcttttctgggtgttgcattgtttggtggggagctagagacctaagtttgctccaggcatacctggtgcaagctggaaggaacccgtgcctctggctgtgttgggtttttatttccctggttcctgtggggatcccaattatgctgggtgttggtaaagatgtgacctcagctatgatcttgagtgtgtcagggatctagtgttttttggtgggtctgatatccttggagttggacttcctctgtgatcctatgatcctgggtatttcagaacccctgggtttggacttcctctgaatattttaagtgtgtgcaaagccagcaccccaggtctgctccagatgcaggttccaactggaaggaataagtggccctggctgggcagtgtttcctgtgtccctggatcctggtgaactcagttactctgggtgttagggccaatattgtggcctctgctttgattctgagtgttttagcccctatgagtcaagctttctctgggtattatgggcctgggtgtggagccagtgcccaagggctgctcagggcacaggctcaaactggaaggcatcactgactcttgaaaaggcaacacattctttacagcatttactactctctctctctctctctcttaaaaaaattatttctctcccctagtgctcaaccataaacctatattaaaagacttgcagaataattttaaaattggttttacaatggctcattctgaaacaattctctacagcataatttaggaatctcattttcacacaagtagaggcctctgtaaaaattcctaagatgtttacaggtcaccacattgacctgaacctctaggaggtgctgctgagaataagtgagaagctgagaatcaaattcccttttcc

SEQ ID NO: 2730 - DNA, 1200 bp, mus musculus
ttattaaaaatggttgaccccctaacaatatgtacaaaaatataaaatgtaaatataaaatacagacaaattttccttttaaaatatttctgagaaagaaaaaaaaaagcagggcctgggaaggtctggttcttttcccccacatgttgccagtccatgttgtggttttattgggggtggtggagaccacatgtcatctgtgggtggtatggcccgctgtaggtgggcggagcctgcttctctactctaaggtgaccaaattctgagatgggaagtggagtgtgaataggtcacggtggtgtgtaaggtaagctattccttgtgctgtctaatcatcctcatcagtcttctgcttcttggtgtcaacattgtcatcctcatcattctcagctacctgcttgtccgtaggaatctcaccttcctcagcttcatctccatcctcttcctcaccgtcaccttcctcctcttccttctccgtctccccttcctgctcttcctccccaccttcttccactttttatctacctcattgtcagcctcctgctcgccattttcctcattttgagcattcccattggcaggcgcatcccttccattctctgcctctttgacaacttccttcttctccttcaagtccttggtggtgatctcggagctggtatctactgctgagtctgacatggtgggtcacgcaggtggtccaatgccgtgagtgaggaattagttgagttcgaggactctagcgagaaagctgccagagtccgcattggaggaggcagtgggaagcgaaggtggctgcagtgaacatcacggagtataacccgggaacaatgcagatgggttttcagagcagccaatttctttttcttcttttatcttgtattcaaaacagattttcttcacacagcatatctaatatctggttatggtttcctgtccttccattcttaccagtcccttcacacattgcccacccctacccccaaatctggagccacacctttctatctctcattatcagccaaccatcacactgaacactgggatcccaatggaggagatagggaaaggactgaaggagctaaagtggtttacagtcccataggaagaagaatatcaaacagccagacaccccagagcttccagggactaaaccaccaaccaaagagtacacactgtgggattcgtggttctagttgc

SEQ ID NO: 2731 - DNA, 1000 bp, mus musculus
ccttataaagtatggattaggtatccaaaactacctctcaggcttccaaaaggggcaaatttccctattcgtgctcccatctcttgatggtgccaagcaagacattctgctcccaaggctacccaggactgcacaaaccttgccctaccataaatccagcatccacaagagtgccgctcctagcgcttcatgtccaagcagagagagggagcctgcagagtgcaaaccactgctatggggtccgcaggtcgacgtggcttcacaacagcggactaggggaaccttagctgctcccttcccaagggccgaggtgggggtggggtgggggtgtaggagaacagtggaagatcggccgctgctgtcccccgagcgctacctcgacctggaggcgacgcggttggaggggccgctggcgtgtaccgcaatgttttgccgcatcccagtgcccagagccggcgcgcagccccctcttgggtacccggaccgagcagcagcctcctcgcaggcttggtggcgggggcggggtactgtgcacgatgtcgcgggggccttcagtccctctgcgcacacatttctccgcgcgctcccgtcccacaaggggtagctgctggagttttctttggcctccctagacccaaacgtgcagtgggtgagcaagaaggagagatgactagttcaggccgcgagggatagctactggggcttcaaagacccatttgctacagtcagagtgactccatagttcggttgcctggagctgtggcccgggctttgccccccacccccacctgcccacgccagctataagatcctattcacccagccagaaatcacttcaacatttaggaatcttgcaaagtgtcactgctagcattcccccagcttcgctgggctttcggagttacccacgggttcttcctcctatactgcctgtcttgcagagtgccagcggtctctgagcagtctgccggccaccgcctgaaaccccacattcaagtcc

SEQ ID NO: 2732 - DNA, 1400 bp, mus musculus
aagctttttcagcagaacaaaacaaacaggaagtatcaaataacatttgcagatgctatgctttcgttgtcatttacactactcaataattggtctaagctacaaaataaccaactttctaaatcccttaaatacatttggaaatttttccctcatcacacttttagacatttattgttaaatggaacagaaacatgcttcaagttaatcttcgaatgctactgtaagcaggtatttctatacttcactaagcattggcaaatgaagttttctcaatgaatctgacaatatatttgaatggtctctgttatgttgtacaatgactccctgtgtcacaatactttgtgaggcttactttgtgaaattgttactgagcaaattcctgaattcccagtaccagggataggctgaaaatttataattcctatgaaggaagtatttaccagctagtggttagttagtgagcaaaaggatactcactgtgatggtttgtatatgcttagcccaaggaatgatactattagagggcatggccctgttggataaggttcacatgatcttgttggaaaggtgtgtccctgtaggcacgagctttgttctagtgtctggaaacaagtattctgctagcagccttcagatgcaggtgctgaactctcagttcctcctgcaccatgcctgcctggatgctgccatgctcttgccttgatgataatgaactgaacgtctgaacctgcaagccaggcccaattaaatattgtccttacaagagttgccttggtcatggtgtctgttcacagcagtaaaaccctaatgatgacacttactcattagactcatagcaggaaatgaatgtgtttagtctaagtaggaaaaaaaaaacagctaggaccatgatttcatggtattaggtataaaagaattccatgactaaaaaatggctgatacagtaggactttgagtagactcaagatgaggggtattatatatcattgtgaaatgtgaactgcaggataaattgtttttatggattaaaagaagtagtattactatgtaatgtattttagcaaattttctttgctaaaacatagcaagatgttaagaagaaaactagtgctacaaatcaaaactcagatttttatttctggaagttttctcagcccattaaagaaacaagcaaaatctaaaattaacatagaatttaagagaagtctctcttggtaaaacagtcttaaggaaaacatttgaggttatatacttcatagtttccaatttcaaaacatattacaaatttatagaaaccaaaactatatagtacatttaataagaaaagaaaagaattgaccctgtgcatacacatgtatatgtttaaaggtcttctataaccttgacagattatccaa

SEQ ID NO: 2733 - DNA, 1000 bp, mus musculus
cttttttgaaaaacagttattcatttacttatttatttattcttttactttatggttctataattgtttcctctatttgtcccctctcttacagtcctaccctcctccccctctccttctcctctgagagagtaaccccccctttccatatccccctaccctgccacttaaagtccctgcaggactaggtgcttcttctattgaggccagacaagacagctaagttggggaaacagttttaaggatagtccctgctccaggtgtttgggacccacaggaagatcaagcttcacatctgctacatatgtgcagggaagcctaggttcagcccatatattcatcatggttggtggttcagattgtgggagccccaagagttcaggttgttgactctgctggttttcctggagagtttctatcaccttggaccataattatttccctgactcttccataagagtccccaagctacttgcaaactttatatgacccaatacaggggaatgccagggccaaaaagtgggaatgggtgggtaggggagtgggggggagggtatgggggacttttgggatagcattggaaatgtaattgaggaaaatacataataaaaaaatatattaaaaaaaaaaagagtccccaagctccatccaagttgtggatgtctgtatctgtctgagtcagttgctgggtggaacctcacaagaagatgctaagatcctgtctgcaagcataacagattattattagtggtgtcagcaaatgatgtttgctcatagaatgtgtatcatttggcctagttattgcttgatccttccctcagtctctgctccatcctaaatacctgcatttcttatagaaaggataaatattgggtcgaaagttttcagtttccatatgtccactgctgtgagtcgtgaccattgattcttgggagtcgcccctattccatgtctctggcatgtccttgagatgtccccaacttccccccacactgtacta

SEQ ID NO: 2734 - DNA, 1200 bp, mus musculus
tttataagtcttggtattttttcatcttagagctggtaaggactaacataggaagttatgggggaaaatgcacactgaagcattgtgaggttccagtgcaatagtccaagaaatacaatgtaaactaggattattacatgccatttaccatgcagtaaattgtttttgtcatacttatcttttattcatatttgtaaatctttgctacatccaccccagtagtgacccacgagacaggccgaaaagcctggacgctgtcctgaggcaaaaagttcacagaagcatagtcttctggaaatttggcattcccatagctgggatgtcccagatttgtccctgcattagtgttaagggtcttgcatgttttcttacagtattttactggataagagttagaaatctcagggcaagcttagcaaagtatacttagaatcttcattaccgtcaggtaaggcagactacattacttattagtagaaagtccccccacacaatcacttagaataatagccgagctactttcatatgcaaaaaattaccattatctaggaagaaggaaggttgtggtctaaggaggaactaaagtaaatacttagaactatggatagctgagttacatccatacccaggaatttacaatggcttagtgggaaggtagactatacaatagactagaattggaactatggcaagggtgtgaagcccttcccctggcttctaagattaaactgaccttaggtggggctgcttttgatcccagttgttaacattgatttttctcccagttggctcctgttagctcttagtacacattcctatgttttgtgtaaaagtcacttataagactggtgcttgctttgagacaaattacattcagatacagcacaatcccttgcatctgtatttgtttgtcatttctcaccaactcctgtccatctgtctagaaccctgatttctcccgcacattgaggggggcccaactagggccggtccatggcaaatcttcatatataagaattttcattacgtatgcactcattatttacttaattatcatctttacttagctatccagaccaccgaagcaattacaatctacccctcaaatgattgaacatagtaatacatattattgttaaaataaaattaaaaaatttgcttcccttagtcttggttgcatgaacaaaaaagtgtgtgtgg

SEQ ID NO: 2735 - DNA, 1000 bp, mus musculus
tcatctatctattttattctgttggtgatgtgttgggagctattaagacacctctattgtctctatctctgaattgggcatctcgcccccgaaaagaaaagggggtcaaatgcgttccaagaacaaccacagaatgttccatccctaagtcactgccagatgtcctgaccacaagatgtaccctgataccaccaagttcctgcttcccccgtgtagttgccaaaagaaaaatttccgctgccccatctctcctactgagaagtactttctcctttccttgtgcatttaagccttgagccttgctgaatacagtgacacctcgatgctactcagactgcttccgtgtgttcttgtacttggtgtccgtctcgccctcccccatttgattcttaggagaaggtcccctcaagaccctcaaataactggacctgctggacaggtcaagtggcacccaacgtggggcatgagggatgaacaccctctggacaatgggttcaagaggtaccgagtagacagtgagacggttcccggccactttgctcaagtgccgcagacgttgaaaggtaagcctgggcataaaattgttgtcccattcaccatggggaaggttctgtccaaagagacagtttctattcaagagatgaaagggtctcttaaggagagagggataagagttaagaaaaatttaataacatcttttatttattttatttttgttttgttttgttttgttttgttttgtggacgagagatgtacatggctggtattgaatggtcctgaaatacaccctttaacttggaataaagtaggcaaagatatcaatgctttgataaaacaaggagaaagtgttcctgagtccgtttttagttattggggaatcatcagagacctccttgagcaggcagaaaagggcggagaggtcgcttgcctcctagcccttactgaagattttttagaaaactcctaatctctgtctcacaaaagcaaaactaagccgcc

SEQ ID NO: 2736 - DNA, 1000 bp, mus musculus
ctgagttcaaggtcatccaggattaaaggtgtggtgcaacacacctttaatctgggctacaccttctgctggagacaatacaaggacattggaagaagggagtcttgctcttgctcctttgcctgctttctgtgtgagactgggtaactgctagatccttggactgagtaactgctagatccttcacagctactacagaaccattgggaattgggctgcagactgtaagtcatcaataaattcctttactatatagagactatccataagttctgtgactctagagaaccctgactaatacaggggtttattcatgtaactttttattggatatttcctttatttacagtttcatgtaacttttaaagtccttaaacatgttcataattggtattttgtagtccttgtcttatgtttcagctgtatttcatttattagtgactattagaatactggcttctggtggaaacacactgttttggatgttcatgttttgattttgtgttgaagttgaggtattagaccaatattaaacaaatcattcagtagtctgaatttgtaaaatgttaatgagaaagttcatttcaagaaaaaaaatagggtttacacaggcaatgcaccacaaagaagtaaatatattctctgtgtggatactaagaagaaaagtgagccatgaaagaatatgccttaagagagatttgaagaataaaagaccacataactcagatttaagtgagcaaaatacagcacagcagttatttctcccattgaggggatataaagtcatgctgcatgggaatcagatacccagaaagcaacagacttccatgcagctcagggagaaactttcagacagcattcaaaaggaaagttgtccttccagggaatcatagaacaatgcctctgaaacagctgcattgggctttaatttgaattcaaaagcagctgcaaagacatttgcagaactgaaaaagtcacatctccagcatttacacagatt

SEQ ID NO: 2737 - DNA, 1200 bp, mus musculus
ctaaaaaccatgagtggccttgtatcactgtataaaaataaatatataattcacatttcttcatgtttactactactgtcttattctaatatgtttatatataactggtaatttatgaaaaacaactttcaaattttaatgatatattatacatgtacctaaaacacattaatacatttaaataattattgtttttaaattttacttatgtataaacctgtttgtgtgaatgtatgccatatgtatgagggtgcctgcagaagctggaactgagttttagattcctttgactgggagttatgggcttttgctgaagaacacaatacacttttaataatgaagctatatcttcagacagaccctaagttaagcataaataatggtgttctgctataaggaataatacagtgaaattttcttatgttcagcaagaagataaaaaaaaatatctgaaattaggtggttgcctatggaagaaagagatagtttctattgaaagtagttaaagtcagaaggttgaaaggatggaccatccagagactgccccacccagggatccattgcataatcagccaccaaacacaggtactattgcatctgtcagcaagattttgctgaaaggaccagatatagctgtctctagtgaggctatgccagtgcctggcaaatatagaagtggatgctcatagtcatctattggatgaaacacagggcccccaatggaagagctagagaaagtacccaaggagttgaagggatctgcaaccctataggtggaacaacaatataaactaaccagtacccccagagctcctgtctctagctgcatatgtcacagaagatggcctagtcggccatcattgggaagagaggccccttggtcttgcaaactttatatgccccagtacaggggaatgccagggccaagaactgggagcggtgagtaggggagcagggcagggggagggtatagaggacttttgggatagcatctgaaatgaaaatgaagaaaatatctaataaaaatagaaaaagaaatttgaaattaggtggttggctatggaagaaagagatagttccttttgaaagtaattaaagtcagaaggttgaaatcttggtggtcatgtagagtagataaatgcttgttatagatcactatgagtattttctacagttttttttttttgttgttgttgttct

SEQ ID NO: 2738 - DNA, 1000 bp, mus musculus
gaagggggagggtgggaccttggtggaaaaggagacacagaggggaagaggagaacatgagcaggtattggagaggaacaggagtaaagctctgagggccagcagaaagaatggaaatgggcaacctcaggaggtaggaagtggggagaccctctagaatgtatcagagacctggcaggtaagagactctcaagacacaaaggggggtatgaaatgcccaacaatggggagatggaacttgtagagtccacctccagtagaaagacagggcatcaaggggaaggatgggactgccatcccagagtaataaaataaaataaaataaactctgacccagaatttttcctgtctggaaaagctgcagggtcagaaatggagaatagcctgaagggaaggatatccagtgacaagcacaaatttggatgtagctcaagtggaggatccaaggcctgacactattactgatactatggtgtgcttacaaacaggagcctagcatgactgccttctgaaaagctcaaaaagcagctaaaagaagcagatgcagatatttgtacctaactaatggacagaagcctgggactccagggttgaaataggaaaaagctggaagaagctgaggaggagggcaaccctataggaaaagcagtctcaactaacccagatccatgagatctctcacacactaagccactaacccagtagcatacaccagctgacttgaggcccccaacacatatatagcacaggacttccggaactggcctcagtgagcgaagatgcacctaaccctcaagagagtagaggccccaggaaatgtgaaggtcttgtgtggtggatgtatggggttggggacatcttcttggaaacagggaagcagtgaggatgtatgggatgtggcatagctagagcgagcacttggagggggaaaaagactggactgtaaaaaaaaaagaattaaagaacaaaggggaaaaagttgcttttgacatggtatttt

SEQ ID NO: 2739 - DNA, 1600 bp, mus musculus
tttcacattttactatatcttaaccaatccacatgtggtcattgctacataagaatttacacaagtcctaactgacagtagagtgccttgctttgctggggtaattttatatgaattagcttgtgctaccagcaatgtgtctgctttcttgatttttcttagaacctactgagtatgatgctctgtaaggaaatgaattttacttaaaggaaggaaaataagatatggaaagacaataatacttttaagtttcttccactctaacttaggcaatatttgctactaagggtaaaagtattgttcaaggtattttctttacatgtacttttattttaaagacataattctctcagaacaactcagttgaaaaggctttttctagactttatagttacactgacaagcacaacaaaatttagtgacaagcttgtgctgtaagtcagagagcagcagaggtcttgggtatcatcttatcttgtcagtgaagtgtttctctcataaattgcattgccttgtactaggaaacatttgataatatttgcttaagaataacgttgaaaggatcttttcaaacaatgcacccatataaaagttttgtgactaattatctctgtctaatgatccttaaaatatccaaaagtaaatcatacataattttcatggaaaattgtcttaggcactttgttattttatggagaaaaaagacaataggttgattggaaatttagcgtgtaacagatattcaaatatcagcgaagcagggcatggtggcgcacgtctttaatcccaacacttgggaggcagaggcaggccgatttctgagtttcaggccagcctggtctacaaagtgagttccaggacagccagggctacacagagaaaccctgtctcaagaaaaaaaaaatcaaatatcagcagataattacctcttggcaactaggaacagtcacctattatatcttgttaaatataagattatatctttctttatgctgtgtatgtttaagtttagatttcttaatatttactgaattccattttctgataaggtgtgcatgggtgaattggatatcaataagaacttattcctggaataaagcaatttatactttagaaaacaaagagttgacagtatgtctggaacaagaataagaataaagtctgctctacaaatcaatttttgagtttaagtattctaagacatattctacaaggatttatacaataagaaatggatcatattaatgcaaagcatgcaatactaaaaatttcatgcaatattaaatacaaacattccaataataaagcatttcatataatttccttggtgatgtttggcaaaatttttcaatcttttttaaatgtaaaaacacatgtgaactcatcttccagtaaggttgtctctaatggtttatctagtagctatttcattccataatatttatagaatgtaagaattattaataattgggaatagatacatgtttggtcttaataggcaaaattggtcagtggtagatagatttggttgaaagtgacaaaattgattatttacacaaaatggcccacagtttgagactttacctcaccaaaaaaggcc

SEQ ID NO: 2740 - DNA, 1200 bp, mus musculus
acagttcagaacagatctctcctgtgctatatctaatctagtagtaacccgtgtgacaggctgaaaagcctggacacagtcctgaggtgaaaagttcaaggaaacttagtctcctggaactgtggcatcctgtaataaggaatgctctaaaactgtccttgttttagatcagtaaacggatctgtgtgctttcccttaatattgcttcattataagtgcctctaaggattgattttgacatatagctaagttagattcctcaccaggcctaggtagtccttgagctgaccataggctttgaattcagtaagaatgttgcctattcagtgacattccgatttgcctctagtattgtaatagagatagtgaaagaaatcaggcattactatcgactacctagagttagaaatctaagagcaagcttagcaaagtatacttagaatcttcataacagtcagttatggcagactacattactcattagtagaaagtcccccccacacaatcacttagaaaaatagccaaattactcccatacgcaggaatttaccattatctaggaagaaggaaagttgtggtctaaggaggaaccagagtagatgcatagaacgatagatagctaagttacatccatacacaatacaatagactagacttggaactatggcaagagcatgaagcccttgctcctgacttctaagattaagctgaccttaggaggggctgcttttgatcccagctgttaacactaatttttatcccagttggctcctgttagttttttgtatgcactcctttgttttgtgtaaaagtcacttataagactcctgctcgctttgagacaaattacattcagattcagcacactcccttgtgtctgtgtctgtctgtcacccccttctcactaactccattgactacctgtctggaactccgagttctcctgtggattgagggggccccccccgactgaggccagtcctaggcactcctgtataattagtttgaagatagcttgagtcacatgaggctctctatacaaaaaaaaaaaaaaaaaaaaaagatcagaaaaatttaaagataagcaaaagtgttaacacaaaagagagaaaaatcattactgaccataagcaattttaaatttcaacaacagaggttaagttatgttttaaagactgagaataattctgtatttctgga

SEQ ID NO: 2741 - DNA, 1000 bp, mus musculus
cctaggataacaaaaactcttctcaaggataaaagaacctctggtcaataaccatgcctgacctaaagctttactacagagcaattgtggtaaaaactgcatggtactggtatagagacagacaagtagaccaatggaatagaattgaagacccagaaatgaacccacacacctatggtcacttgatcttcgacaagggagctaaaaccatccagtggaagaaagacagcattttcaacaattggtgctggcacaactggttgttatcatgtagaagaatgcgaatcgatccatacttatctccttgtactaaggtcaaatctaaatggatcaaagaacttcacataaaaccagagacactgaaacttatagaggagaaagtggggaaaagccttgaagatatgggcacaggggaaaaattcctgaacagaacagcagtggcttgtgctgtaagatcgagaattgacaaatgggacctcattaaagtccaaagtttctgcaaggcaaaagacacagtcaataagacaaaaagaccaccttggggagatccttcaggtgaggctttctggaacccaaagaggattgtcttcttcctgtggaaagacacaaataactcccatggatcttattaaaataggatccgggcctctccattttctggttaagacatctttccatttgatcatttctctaggtctgtttggttctgaacagtgacaatcagccgcagtgtggccttgttcatcaagattcaaaaaattagagtaaagagtgccatggagatggccactcacagtgttaagggcagagcctcgttgacctcccctttctgtgtgaataggtaagatttaagagtgcagtgggcacattccacaatgccttgtccctgagggttgtatggcaaaccagttaaatgagttacattcatctggcgacagaactgtcaaaatttttgagaggtgtagcccggtccattatctgttttaagaattttgggttg

SEQ ID NO: 2742 - DNA, 1200 bp, mus musculus
aaatctttctttatttcttttttcttttttttcctaacacaaaatttttattgatcatttggaaatttcaataatgaactcccatcacatttacttcccagtctgcccaggtccaacccccacccatgtgaccttccccaaaacaaaagaagaagaagaagaaaatggaaaaagaaaaaaaaaaaaacaagtccatgctttgatctttaaattctccttagtaatcataaggttggtttggggctcagatcattggtgttttattcttgcattttagcacagtacctttgtgatcaagcaaacatatttgaattttttattacttattaggtatttatttcatttacattcccaatgctatcccaaaagtcccccacaccctcccacacccactcccccacccacccactcccacctcttggccctggagttcccctctactgtggcatataaagtctgaatgaccaatgggcctctctttccactgatgggccgatcaggccatcttctgatatatatgcagctagagacatgagatctgggggggggggtggggtggtactggttagttcatattgttgttccacctatagggttgcagatccccacagctccctaggtacttcctccagctcctccattgggggccctgggatccatccaatagctgactgtgagcatccacttctgtgtttgctaggccccagcatagtctcacaagatacagctaaaccagggtcctttcagcaaaatcttgctagtgtatgcaatggtgtcagcgtttggaggctgattatgggatggatccccgggtatggcagcctctagatggtccatcctttcatctcagctccaagctctgtctctgtagctccttccatgggtgccttgctcccaattccaagaaggggcaaagaatccacaccttggtcttcgttctttccgagcttcatgtgtttcgcagattgtatgttatatcttgggctaatatccatttatcagtgagtacatatcatgtgagttcttttgtggttgggttacctcactcaggataatgccctccaggtccatccatttgcctaagattttcataaattcatttttttaatagctgagtagtattccattgtgtaaatgtaccacattttctgtatccattcctctgttgaggcgcatctgggttctttccagcttctagct

SEQ ID NO: 2743 - DNA, 1000 bp, mus musculus
tctcaggtatgaaatatgagttatgcatctttcacctgaacctgccagaggccgccaagggccctagagtactctccacaccgcaggaatttggaatcacctcggaatcactggtgagtggaacacaacatcagctccaaagattcgcagagggtcttgtgccagcaggaagagggacaaaggaaccctgcacgaccagaggctaggatactttctggtctgggccagcccctccatcttccacctgaacccagccaagggcaccaatagccccagaggactttccatgccacaggacccctagcatacccaggacctcaggatcacaggtgagtagaacacaacatcagctccaaagaatcaaggagggtcttgtgccagcaggaacaggcacaaaggaacctcacccagccagaggctgggattctttccggtccaggccagccccaccatcttctgcatgatccctgcctagggctttgaaggccacagaggactctcaacactgcaggacccctagcacacccaggactttgggatcactggagagcatgtgggcgacagaagcaacagagcttcttggacaaggtcccatcaggccttcatcctcagccaggaagcagagctgagacccagatccctaggcaccttccttgacaagggagagcctgcctacagagagggctctgaacccaggactcaggaggtggatcagagcttcagacttctggacacctgccctgcaagaggagagcttgcctgcagagagtgctctgaccactgggactcaggtgaaagttggactcccaggaatgctgacagaggctaacagaatcacaggacgatcaagctccagccagagacagcttgaatattaaccagagattaccagatggcgaaatgcaaacataagactcttactaacacaaaacaagaccactgggcatcatcagaaccccatacgcccaccacagcaagtcctggatactccaatacaccc

SEQ ID NO: 2744 - DNA, 1200 bp, mus musculus
gcaccccttccgggtgtccctctcacaaagaccctctgcacaacccccttcccttctcctctgagagggtgccccccaggtatccacccaacaagtgaaaaatattttaagactgaatgatcccatatacaaccaccaaacccagacactattatggatgccaacaaaaacttgttaacaggaacctgagacagttgtgttatgtgaggctctgccagtgcctgacaaatacagaagtggatgctcacagccatccaatggatattggacagagcacagggtcctcactgaaggagctagagaaagtacccaaggagctgaaggaatttgcaaccccataggaggaacaatatgaactaaccagtacccccagaactccctgggactaaaccatcaaccaaagagtatacatagagggacccatggctctagctgcatatgtagcagaggatggcctagtaggtcatcaatgggaggagaggcccttgatcctgtgaaggttctatgccacagtataaaggaatgccatggccagcaagtgggagtgggtgagttggtgaacagtgggaaggtaggagggcataggggatttttggagggaaaacaaggaaaggagatagcatatgaaatgtaaataaagaaaatatctaagaaaaataaataaataaaaccataacaaaacaaacaaacaaaaataaaaaaagactgaatgcacttattttcctagagacctacaaatcagctttttgcagtatgtgagactggccacaagggggcagaagaacaatgtaatattttttaaaggtcttcctagaaaacagcagcttaatttttaccaaatgttgccaaatattcactataattattcttaaattctaacaatccagtgtatcacttctacttattcatattatacatataaagtacacaattggtaaacaatgcaaatattaatgacagtgcataggaatattaatgctttctatatgtatacaaacatataaacttatttatgaatatattttattgggctatagagaataatagtttcaatattatcaatattcctggattattttgtgttaatttaatcatttgatagagttgaattcttcattaatatccccccaggaagatgccgtgaaagaaacaaattcaactggaatgacttataaggaagctttcaagagctcctagact

SEQ ID NO: 2745 - DNA, 1400 bp, mus musculus
ttcacattttatttgattgttgtgtccatgttttctatggaatcttgtgtaccttagattctctcttccatctcttgtatactgtcggtgatgcttgcatctatggttcctgatttccttcctaggatttctatctccagagttgtctccctttgggttttctttattgtttctacttctctttttagatgttggatggttttgttcaattccttctcctgtttggttgtgttttcctgtaattctttaagggatttttgtgtttcctctttaaggaattctacctgtttagctttgttttcctgtaattctttaaaggattcttgtgttttgtctttaatgacttctacctatttagcagtggtctcctgtatttcagtaagtgagttatttatgtccttcttaaaatcctctaccatcaccctgaggtatgattttaaatccaaatctttcttattctctggtgttagatgttctagctgtctctaggtggatcttttcctcctgtcattctgttagcttctgtcaggactcctaggagtccaactctttcttaagtgccaaggcagagcactcactgcaggcaagctctcctgtggtagggaaggtgcacagaggtttgaggatcagctctgcctcctggctgaagatgaaggccaaaagggaccctgtccaagaagctctattgcttctacagcccgcatgctctcctgtgtgggctgatctctgagagacctgtgatagaagataaagatcttgcctgagtcctggggttacagccttccctggaggccaactctcctctggtggcgaaggtacacagaggtctgaggatcagctctgcctcctggctgacaggactggctcaaagggaccctgaccaggaatctctgttgcttttgcaggcagtgtgctctcctgtgaggactggtctctgagagacctgggatagaagatcgccagaatattcttgattgattgttcagtgtgtatttgaaaaaactgaacttattttcttagttctttaaaattaacatattaaaatatcaagacaaaatagcataacacacacacaaaacaaatttattcttttgaagttctaaaaagtagatttcaaaagtaaaactctatgcagggtcatagtctttgaaggctctagttaaagttttagatactgcttatctccagcaatccagtttccttggcttggggatatatcattcccatttttgcttctgctttcacacagctttcttatttagataactatacccaagactttctccctttacttgcaaagttccataatctaagataatgccatctgaggaatcttaatcacaactgcaaagatcttattaacaaatcagaatctgggtaggtatttttttttttttttt

SEQ ID NO: 2746 - DNA, 1400 bp, mus musculus
tttaagatattatattgttgtgagggaaattagccttaatttgttcatctacgactattctgatattcctatttgttaacaaacttctcaataggggaattgaactactctaatacaataattaaaaagtaaactcaaatgtatcatataacatgcttattaacataaagttaatgttttttttaagttaaactgtatgtacttagatgtattaatacactgaaattgtattaagggaaaattgtgagagaaatgttaagtcaaagtaaaacttgaactttaaaacatgcaacacaaaaactaaaaaaataaaaaagaagtaagccatgaggtggtgtcacatgcctttaatcccagcacttgggaggcagaggtaggcagatttctgagttcaaggtcagcctggtctacaaagtgagttccaggacagccagggctatacagagaaaccctgcttctaaaaagcaaaacaaaacaaagcaaaacaaaacaaacaaaaaacaacaacaaaacatgcaacacatataagtgtcatgatacatgtctaaaaatactagtcaacaggcaaaaaaaggatgcatcagggatttcagcccacttttggttaactactgaactctatatcaccccagctaatctttgcataaataaataaataaataaataaataaataaataaataaatagaatgaaaaaatggggaaatacctcagtacttttgaaaaatgtgcattatcgatcttcagtgctgtctgggcctgcttggacaagccaagctctcctgagcagcctgctttctcagagagacctccattctcccaccacctctcctccaccttcattgtacatctgaaccatacaggctagctcccctttccccatttatcttccctgctgtctgagccctctgggtcaagcttgagcagcctactctcccaggaagacctccattctcctgccatcttctatctaacttcattggacctgaggctcctgaaacatacagacctgcactgcaggtccagagccatacagcccaagaataccaatcagaggcttgcctcacaagaaccatcgaggttcacccctcccaatacccactacaataaagacatacagggaccaaaactatccagactgctaaaggcccttgaaagaacacaagcaacaggcagggcaatatgacaactccaaagcacagatacaccactatagcaaaccctgaatatcctaaaaactgaaacagatacacaaaagataaccttaaatttgatcttataaaggtgatagaggcctttgaggagaagatgaataaatcccttaaacaaataaaggaaatgcaaaaaaaaaaaaaaaagaaaagaaaaaaaaaacagaaagagatctttaaagaggaaaca

SEQ ID NO: 2747 - DNA, 1000 bp, mus musculus
acactgactctagcagccaaaagtatagttgctttatgttgataagttcactgattatttctatcacagaaatagattatttctactttatcacagaaagtctgtgataaaaaatgaaagtcaattcatccttagttatttttctattgttgtaataaaacagtgtccaagttgaattacagggaggaaaaagagtttatttatacttacagttcagagaattagagtgcacaatggtgaagtgaaggcattttggcaggtatgataacaggagaagctgctaagggttcacatcttgaacctcaagctagaaacaaagagaaaattggaaaggaatgaggtgtgagctctgtaactaatcccacaatacccagaggaaggtagactacaaggagctctaaaacaaccaggatcataggtaaggaggatacaacacctgccccaaacctggagtaactgggatcctagggggtccagggacacaggtaccccctcctggccagtggttggattccttccagtctgagctgaggcccttaacagacattgggccagagctctccaccgaattcctcaacacccagaattagctggactccaaggagctctaacacgcccaggatcatagcactcagaggaagctctaatgtgcccaggatcatagatactttaacactcccaggatcataggatcacaggatcgcaggaacttggtcacaccaggatttcaagatcccagaggcagtttgactcccaggagctctgacacacccaggatttcaggatcacaggatcacagagacagttggaccctgaggagttctgacaaaaccaagataacaggaggggcaggctgcagtcagagacagtgagtgcaggtagcactggaaataaccagactgcagcacaataacatacgtgacagaatcaaaggttacttggcatcatcagaacccagttcttctaccatagtaaatcctggatacaccatcacacttaa

SEQ ID NO: 2748 - DNA, 1400 bp, mus musculus
attccaactcaattctacatagagttagaaagagcaattctcaaattcatctggaataacaaaaaacccgggatagcaaaaattctcctcaaggataaaagaacctctggtggaatcaccatgcctgacctcaagctgtactacagagcaatcatgataaaaattgcatggtattggtacagtgacaggcaagtagatcaatggaatagaattgaagacccagaaaggaacccacacacctatggtcacttgatctttgacatagtatttaaaaccatccagtggataaaagacagcattttcaacacgtggtgctggttcaactggcaatcaacatgtagaagaatgcaaatcgatccattcttatttccctgtagaaaactaacgtccaagtggatcaagggtcttcatataaaaccagagactctgaaactcatagaggagagtggggaaaagtcactgatacatgggcacaggggaaattttcctgaacagaataccaatggcttatgctctaaaatcaagaatcagcaaatgggacctgaccagggagtacaagtcctttctgtttggcaccaacaccgggtcacattggcctcgagctcttctgaaggccccatggtacccagatgattctccatgctatcttaggatcactggttagtggaacacaatatcagttccaatccaatcacattaggcctgagccagcagcagagaagcagaaaacctgcctgaccaggggcataagtcccttccagtctgcaccagctcctgatcaccttgggcaagaactctgctgatagccccacagtccacagatgactcttcacgtgatcttaggatcactggtaagcagaacacaacatcggtcccaatccaattgtgattggcctgtgacagcaggagcaaggacacaggagcactgcctgaccagcagctccggttacttctgatctgtgctggtatagcttgattttgaacacaccaaacagcactaaggtccccagaggggacaccacttccaggcaccgtaacacgcccaggatcttaggattccaggatcccaggataacaggagcatggtcacactaggatcaaagggtctcagaggaaacctcactgccaagacctctgacacacacagaatctcaggttcacaggagcacagaatcacaggatcacaaagaaatctggactttgaggagtcctgaatcaaccaagattataggaaggacaggctccaatcaaatatattgagggcaacaagaacttaacataatcagatggcaggaggcaaccataagaacagaaacaacagaaaacaaggatatttggcatcatcaaaaccaaactctcccaccaaagcaagtcctggatacaccatcacaccagaaaag

SEQ ID NO: 2749 - DNA, 1000 bp, mus musculus
taagagggaattcttatgtgagtgctttcaaacattatctttgctagaaaatcactcaacttacttccaaacagtacagaatttttaatttcttcttgttagagatattgatttaaaacatactaaatgagctcaggtttcttaaatttgtaaagaaaaatagtggcttaagataatatatcctgaacaatgaatgcatttgagaagagtgtatttttttctgctaggttaacagttttctatatacaaatgttaggtatatttgacatatattcttgttaaaatgcattggtgatgccctagaacttggattcataattgccagctagtttttagcaggaatgggaactgtgtctacaaaggccctatgtactgcaatattttgcctaaatctcaagttcatgtggattgattctcaagggagacatgagacaaaggtctaccaggaaaagaataacctgggattggccatgagttttgatcaagtacctgggcatatgataacttcgccattcctggcaaaaaactctgtggagaaagaatctctttgaacaccttatggtgattgctgtacatagcaacaaaccggtgactgtgtatatgggctagagtttatcttttccctctcagtgttctaaagaataagaccttgtaattgtttggattatttagctgataatcatgaagtaagagctattatcttgaacttgatgccttatgctggaattaagatccataacaagatatctctctctctctctctctctttctctctctctctcatacacacccatgatagatagatagagagagagacagacagacagacagagacagatagacaaagagaaacacaaaatatcagagaagcaatgaagcacagattaaaatatttttaaaagaaaaataattccatgattttgtctgtatttggtccttacaaaaccttagccagaatttgcaaatgcagcaccaaacagatcagatcacaaggtttcaa

SEQ ID NO: 2750 - DNA, 1200 bp, mus musculus
tggtggtttttaaacactctaacctcccatctagcccaccatccaccagctgtagtggaaaagaaaggatacaggggaagtggacttgtttagaaatgcttctttgaagcaactcccatctgtgttgtcaggaaaacagcagttcaattcacaagtcagcagtggcagcttgatccacttgcaagtacttcaagaatataccagcagtccagtttgatagcagcagcagtggcatgacctagcaggaacagccaggcttccactgaatcagcaccagtcagcaggggctattcaggccagctggaattccaggaggagttctcagctgtgcctctctagtcaaagtgaatatcagcaaagacacaagataccaacaagcattgcacagctagttctaccagcaagcaagtaagccaagctaagcctcttttatagtctattgagtcctattatactccctccaaacatcacctgtccatcagcaggtgtcctgcctcagcatgtgagtctgacttaggaaaactccacttgagtctgtctcagctgacatcactctgccaattgatggagtctgaagaagcagcaagaactacaccataccaccagacattttttggtgcgtttctctctatggagtcatgacaaatggagctcaacaatgcaatgtaaggtggaccaatacatgcttgtccttagttaaaactcttcatcacatgtcctttcatgtgcttcctttagcagaacattctttcacctgtgtctgcttcagctaaacatttgttcgtgagtctgccttagccttttgcctgtgtccacttcagtgaaatgttccttcgcatgtttactccagcaaaaccccatccgatgcaactgactttctgaagaacccttaagtttttagccctggtaagctgcccatgccccagtggaaatccccaccacaatgcacagatggccaacagtaactgatcttagtgggatataaagtttaagaaaatgaagacatgatgtaagaagcaggatttttttttttctgagttgaactgtatgaggaaaatgttagacagctagtatcaaaatacattgcttatgtgtatgaaattttcagttaataaaatattatttaaaaaatcctattcttcatagttgtattttattacaaagaaaattcttgccttaatgactaagtaagtaaaaggg

SEQ ID NO: 2751 - DNA, 1200 bp, mus musculus
ttaatcatcagggaaatgcaaatcaaaacaaccctgagagtccacatcacaccagtcagaatggctaagatcaaaaattcaggtgacagcagatgctggccaggatgtggggaaagaggaacactcctccattgttggtaggattgcaagcttgtccaacccctctggaaatcagtctggcagttcttcagaaaattgaacatagtactaccagaggatcccgcaatacatctcctaggcatatatccagaagatgctccaaccagtaagaaggacacatgctccactatgttcatagcagccttatttataatagccagatgcccctcaatagaggaatggatacagaaaatgtggtacatttacacaatggagtacttctcagctattaaaaagaatgaatttttgaaatccctaggcaaatggatggatctggagggtatcatcctgagtgaggtaacccaatcacacaatgactcatatgatatgtactccctggtaagtggatattagcccaaaaacgtagaatacccaagatacaagatacaatctgcaaaacacatgaaactcaagatgaacaaatccaaagtgtggtcactttgccccttcttagaattgggaaaaaaaacacccatggaaggatttagagagacaaaatttggagctgagatgaaaggatggacaatttagagactgaatacctggggatccatcccataatcagcccccaaatgctgacaccattgcatacatagcaagattttgctgaaagaaccctgatatagctgtctcttatgaggctatacttgggcctagcaaacacagaagtagatgctcacagtcagctattgcatggaacacagggcccccaatgaaggagctagagaaagtacccaaggagctaaatggatctgcaaccctctaggtggaacaacaatatgaactaaccagtaccctctggagctcgtgtctctagctgtgtatgtatcagaagatggcctagtcagccatcactggaaattgatcagaggcccattggtcatgcaaacttcatatgcctacgtacaggggaacaccagggccaagaagtgggagtgggtgggtaaggggtgggggtatggtggacttttgggatgacatttgaaacataaatgaagaaattacctaattaaaataagaatgaaaaaagaaaaaaaaaag

SEQ ID NO: 2752 - DNA, 1000 bp, mus musculus
acccaaagaggttaaataagaaggaaagcccaagtgaggatgtttaaatcccacttagaagggggaacaaagtagtaatgggagacagaaagaactgggtgggagagagaatgtggaggggaaatggggtatcaggatctggtgtggggagagagagaagagagtgtcagaaggccaggagaatgaatggaaatctgcaactggagagggaggggaagtagagggacatctggaggacataccagagacctgggatgcacgaggctcccaggagttaatgtgggtgaccttaactgagattcatagtagtgggaatatggaacctgaagagaccccctcctgtgggcaggcagggaccctagtaaacagataagggcaccaacccacccacaaaactttcaacctaaaacttttcctgtctacaagaaatgcagagagaaagtagagcagactgaggaaatggcaaaccaataactggaccaacttgagacccatcccatgggcaagcaccaatatctgatactattaatgatattgttatgctttcagacaggaatatgttgtcctgagaggctctacctagcaactgactcagacagaagcagacacccacaatcaaacagaatggagcttggggactcttatggaagaatatgagatcatggctggaaggagttaggaactccacaagaaaaccaacagattcaactaacctggactcatgggactctcacagtttgactcaccaaccagaacatacatggactagacttaggccccaaagcacatatgtagcagatgttcagctcagtctccatgcaggtccctcaacaactggattgtgagatgaacctaaagctgttgcctgtctatggaatccagttcccttaactagattgccttgtctggcttcagagggagaggatggacctagtcctgtagtgacttgatgtaccagggtgggggagatatccagaggtagcctctaccctgtcagagg

SEQ ID NO: 2753 - DNA, 1400 bp, mus musculus
ttttctgtatctattcctctgttgagggacacctgggttctttccagcttctggatgttataaataaggctgctatgaacatagtgaagcatgtgtccttcttaccagttggggcatcttctggatatatgcccaggagaggtattgcaggatcctccggtagtactatgtccaattttttgaggaaccgccagactgatttccagagtggttgtacaagcttgcaatcccaccaacaatagaggagtattcctctttctccacatcctcgccagcatctgctgtcacctgagtttttgatcttacccattctgactggtatgaggtggaatctcagggttgttttgatttgcatttccctgatgattaagggtgctgaacattttttcaggtgcttctcagccattcagtattcctcaggtgagaattctttgtttagctctgagccccattttttaatggggttatttgattttctggagtccaccttctcgagttctttatatatattggaagaagaacaaagaccaaagtgtggacactttgccccttcttagaattgggaacaaaacaaccatggaaggagttacagagacaaagtttggagctgagacaaaaggatggaccatctagagactgccatacccagggatccatcccataatcagcctccaaacactgacaccattgcatacattagcaatattttgctgaaaggacccagatatagctgtctcttgtgagactatgccagggcctatcaaacacagaagtggatgctcacagtcagctattggatggaacacagggcccccaatggaggagctagagaaagtaaccaaggagctaaagggatctgcaaccctataggtggaacaacaatatgaactaaccagtatccccagagctagtgtctctagctgcatatgtatcagaagatggcctagttgtccatcagaggaaacagaggcccattggtattgcaaactttatatgcctcagtacaggggaacaccagggccaagaagtgggagtgagtgggtaggggagtttgggaggatggtatgggggacttttgggatagcattggagatgtaaatgaagaaaacacctaattaaaaaaaagtaaacgatcttgcacataagtgaacagtcaaaagtgattcctgagtacaatattataaatcagttttgctgtgtagaattatttattctattactttttttattattctattaccttagtaacttttaaaactttgcatttagagaaaagttaaatctatacaaaagtgatattttcaaataagttctacatacccttatcccaaagatttcattcaagattaactagttgtctcaataatacagtatacttttccaatccagaaccaaaaatc

SEQ ID NO: 2754 - DNA, 1400 bp, mus musculus
cagatcatttttaatagcatgtaggaataagtatacattttaatatttacctttaccatgatgtgactatgctggttgtatatctatacacagttcatttgttcaaaaagtatgtaaaagggacggagctgagacaaagtttggagtcattagtcactaaactacaactaagaaatgtttaggtgtgaactggagcctggagataaaaaggagttagcatagaaaagaaccttagtcttggaaatggacaggcagagaaacacaggaaggaggaagatattaaaaacagcttgctggggaccagccccatgcatgtgcactggtgattctctttggaaggcagctgattgggcagagcattgcagggccaggagggagtgcaaaacttggttttgtaagtgttaagtatgtctagtattaataacatttattgtctttaattcttagttatactggggccaaaagcgatggctttgggcgaattatcaccttttgcttaacagcagggtatgtctagtggggggtgttaggtaaaggatttattgctggggttcccttctggtcagttagacagaagcctctcacctgctaggctggttaactcttcctgaaacagagaggatggaaaagacaagaattaagatcctttacagggaaaagaaactgtccatgcaggagagctcccaaagagaccactccacacaggagagcactgaggtggcagaagtgatatagcttctgggaccgggtccattttgggccagtatcttcgggcagagggcagagctgagacccagacctctgtgctctttccccaccagaggagaggcagcctccagggagagctctgtccatgggaccaggtatgaacaccatcttgtatcccaggtcccaaagagaccagtctgctcaggagagcacccaaagaaaccagtccacacagggagcatgtgcaggtgccagaagctatatagcttttgggacagggttcctatcaggtcttcatcttcagccaggaggcagagctgaactcaagaactctgctcacttgcctgcagagagtactctgataactgagactcaggagggtgttagactcccaggagtgctgacagaagctaacagaatcactggaggaacaaactcctgccagagacagctataacagctaaggccagagattaccagatggtgaaaggcaaacttaacaatcttactaacagaaaacaagaccccacagcatcatcagaacccagcactcccaccacaatgagtacgggacaccccaacacacctaaaaagcaagatttggatttaaaatcatatctcatgatgctagtacaggattttaaggaggacattaataactcacttaaagaaatacaggagaacactgctaa

SEQ ID NO: 2755 - DNA, 1200 bp, mus musculus
cagctctgccatgctcccaccttgaagataatggactgaaactatgatctgtgagtcagccccaattaaatgttgtttcttataagacttgccttggtcatggtgtctgttcacagcagtaaaaccctaagacatagttcattatgtttttctgatgttatcagatatcagaacatcagagaacaacctttggggtcctgtatatctaattcaggcaatcagcattgggggcaagtgcttttaccaatggaaaaaaatctctgcactggctggatttgcgtgtcaacttgacacaggatggagttatcacaaaaaaggagcttcccttgaggaaatgcctccatgtgatccaactgtaaggcattttctcaattagtgatcaagagtttcaggcccattgtgggtgggaccatctctgggctggtggtcttgagttctataagaaagcaagctgagcaagccaggggaagcaagccagtgaagaaacatccctccatggcctctgcatcagctcatgcttcttgactgacctgcttgagttccagtcctgacttcctttggtgatcaacagcaatgtggaaagtgtaagctgaataaaccttttcctctccaacttgcctcttggtcattgtgatggtttgtatatccttggaccaggaagtggcaccatctgaaggtgtggccttgttggaataggtgtgacctggttggaatgggtgtgtcactgtgggtgtgggtataagatcctcacccaagttgcctggaagtcagtcttccactagcagcctttggatgaagacatagaactctcagctctgcctgtgccatgcctgcctggatattgccatgctcccaccttgatgataatggactgaacctctgaacctgaaagccagccccaattaaatgttgttttttataagacttgacttggtcacggtgtctgttcacagcagtaaaaccctaactaagacagtcttgatgtttgtgcaggaatagaaactctaagacaatttccatcctagaatttatttcttcttaaggataaacaataaaccagtgtttatgcaagccacattctggttgtttatttatgctgatggacaaatgagattttacaaagcttttggctcatatgaatagtaatactataaacactggtgctcacatatctgttaagtccttcactttcctaaggtc

SEQ ID NO: 2756 - DNA, 1400 bp, mus musculus
ctagaatgaaataaatggcaagaaatatttgaactcagtgctgaaatcaataaagtaaaaacaaacacaaaaataagcaaacaaaataaaacaatacaaagaattaatgaagcaaagagaagagagcctcaccataatccaaccatactgataccttggactcagatttccagccttcagaacatttctcttaattatatgctatctagcatatggtattctgttatagtaaccttaattaagaacaaaataaacaaatatatcttggtttatccatatattaaaatattattaataaatagaaaaactgaattaatatatatgtaacagtgcagaaaaatcatactatacttattgatatgatgttttctatttgttaaaaaaattaaaaaatggacaggatccttctagtttccatctgcatgagaagctgatcctgtgccacagcacctgcagctcatcctatgccacagtgctccatacccagatactgttggaagagagctggtctcccaggaatgctggcacatacctgtaagcacaggtaagacagccagttctgttcaaattcctggcccaagagggacacacccagagccatcagggcacaggaatcaaggaaccatcagggacagaaccctttcggtttctgtctgcaccctggagctgaccctgtactattactctccatacccaaattcctccaggagagaactggtgtcccaggagtactgacatacagtattgtaggagggacaagtcacagtcagaggcagcaagaccagctaacaccagagagccagcacccttgcaagtgccaagggcaagaatataagcaacagaaaccaagactacttgatatcatcaaaatccacttcttccaccacaacaagtcctggataacccaacacacccaaaaagcaagactgattaaaaaccacatctcataatgatgagagaggacattaggaaggacataaataactcccttaaagaaatacaggagaacacaggtaagcaggtagaagcccttaaagtggaaactaaaaaatcccttaaatatgagctaatcagtacccctagagctccctgggactaaatcaccaataaaagaaaacacatgataggactcattgctataggtgcatatttagcagaggatggcctagttggtcatcaataggaggagaggccttggttctgtgaaggttctatactccagtatagggaaatgctagggtcaggaagtgggagtgggtggtttggggatcagggggatgagaagggtgtaggggattttcagaggggaaactaggaaaggggataacattggaaatgtaaataaagaaaatatctaataaaaaaaaagaaagaaaatgaaaaaaaaatcccttaaagaa

SEQ ID NO: 2757 - DNA, 1000 bp, mus musculus
tttcacatcatttgtacatttactgcatactttgtttttgttttttatttttgacatttgtttttcttttcttttcctttttttattagatattttcttcatttacatttcaaatgctatcccgaaagtcccctgtaccctccccacaccctgctccccaacctacccacacttgcttcctggccctggcattcccctgtactggggtatataatcttcacaagaccaagggcctctcattccattgatggctgactaggccatcctctgctacatatgcaactagagacataagctctgagaggtactggttagttcatattgttgttcctcctatagggctgcagaccccttcagctccttgggtactttctccaactctttcattggggagcttgtgttccatccaatagatgactgtgagcatccacttctgtatttgccagacacttgcataacctcacaagagagagccatatcagggtcctgccagcaaaatcttgctggcatatgcaatagtgtctgagtttggtggttgtttatgggatggatccccaggtgggtcagtctctggatggttcttccttccatctcagctctgaactttgtctctgtaactccatgggtatttttgttccccattctaagaaggaatgaagtatccacactcactgcatagttttaaaaaaatggttatttctcaaattatggcctattttatttcttaaagttttgatgttgaagttttatattgataagacttaacttactttgaataatataattcatatcaggtctgatacaaattgaaaagaaatcattcattgcatagaaattatggaaataaatatccttaatatagcctttcctattttctccctccaccacaaaattgtagtggttcctattttctctattttgtgctgactatatataagtcacataggcttggcacagaaaaatttatgaagcaagaaaggttaacagtgtctgtgctctg

SEQ ID NO: 2758 - DNA, 1000 bp, mus musculus
tagttattttatagaaagttacattgaaatataattaataatgtctagtttatcatttgttaatgaaaaactccctatcaaaatgtgtggtaagtgctttatttttattactcaatatcattttttcttaattgaatttcttttttaaattctttttttattagaaaatttctttatttacatttcaaatattatcccctttcctagtttctccttcaaaaactccctatcccttccccagctccgcctcctccccaacccacccacactggcttcctggccctggcattccctttcactgggacatataacattcacatttagggcctctcctcccattgatgaccaataggccattctctgctacgtatgcagctagagccatgagtcccaccacgtattttctttgatttgtggtttagtctcagggagctctagatattctggttagtacacattgttgttcctcctatggggctgctaaccccttagctctttgggtacattctctagttccttcattggggatcctgtgatctgttcaatggatgactgcgaatatccacttctgtatttgtcaggcactggaaaagcctctcaggagacagctctatcaggctcctgtcagcaagatcttgtttttatccacaatagtgtctgggtttggtggctgtttatgggatggatccccaggtggggcagtctctggatggcctttccttcagtctctgatccacacttagtctctgtaactccttccctgggtattttgttctcccttttaagaaggagcaaagtatccacactttggtctttcttcttgagtttcatgggtttttttttgttttgttttttgttttttttgttttgttttgtttttgtgaattgtatctttaactgaatttctaatacatagtaaaaaaatgtatttagaagagtaatatgtatacatcttccaaacatgaaaaaatttcaacagaactacaaaattttgtaatac

SEQ ID NO: 2759 - DNA, 1600 bp, mus musculus
attggatgtaagtcttgctccacaagacaaaacctatacctaacaccattattgatcaggaacttatggccaagccgggtgttggtggctcatgcctttaatcccagcactctggaggcagaggcaggcagatttctgagttcgaggacagtctggtctacagagtgagttccaggacagccagggctacacagagaaaccctgtctcaaaaaacaaaaacaaaaacaaaaacaacaacaacaacaacaacaaaaaaaaaccaaccaaccaacaaaacagaacttatggccagaaagacaataggacccaggaataacatgctactattatgctgataaatggaaacagtattaaatagactcccaataacacccatggacagcgcatctctcagtattttttggggggtggggtggggtggggtaaggatatgacctttattgagcttatccaccagagtggaaacaatgtctgtataatgtttgttatgtttgttactataacttctgcatcacaattaaaattcaaacagttaaaaaacaaaacaaaacaaaacagtcaactcaatcaaagcccactacatcagaatcaatagcttatttgaaatcatagtaacacttaaatatggttaagactcgaatgcagaaatttggttggttggaaggctaattaagcctccaacttgctcaaatagaattacaaaaaggcaaaattgtgtttttcacagagatacagtccactggaatcaccaacattggacagctgttaagaatttgtctgaggaaaaaaaaaaaaagaatttcgctgagagtctgcctggcttcgtctcttccttgcttgttggagtttcagcacagttcaagatggctggctgtaaggctggaaaggattccggaaagagcaagacaaaggcggttggtttcccacacacagccagcattcttgcagttcaatgtgggccactaggacaaccaaccatttttgtctgcgggtgtgactgctgctgtgtatacagcccagccatcctagagtacctcaacacagaggtacttgagttggcaggaaatgcatcaaaagacttaaaggtgatattttgacttcttcttttccaatttgtatccccttattatccttttgttgtcgaattgctctgcctaggatttcaagtacaatgttgaataggtagggagaaagtgggcagccttgtctagtccctgattttagtgggattgcttccatttactttgatgttggctactgatttgctgtagatttcttttatcatgtttcggtatgggccttgaattcctgatctttccaagacttttatcatgaatgagtgttggattttgtcaaatgcttgctccacatctaacgagatgatcatgtgtttttttttctttgagtttgtttatataatggattatgttgatggattttcatatattaaaccatccctgcatccctggaataaaacctacttggtcaggatggatgattgctttgatgtgttctttgattcagttagcgagaattttattgagtaattttgcatcgatattcataagggaaattggtctgaagttctctatctttgtt

SEQ ID NO: 2760 - DNA, 1600 bp, mus musculus
atggaccatgtagagactgccatatccagggatccaccccataatcagcatccaaacgctgaaaccattgcatatactagcaagattttatcgaaaggacccagatgtagctgtctcttgtgagactatgccggggcctagcaaacacagaagtggatgctcacagtcagctaatggatggatcacagggctcccaatggaggagctagagaaagtacccaaggagctaaagggatctgcaaccctataggtggaacaacattatgaactaaccagtaccccggagctcttgactctagttgcatatgtatcaaaagatggcctagtcggccatcactggaaagagaggcccattggacacgcaaactttatatgccccagtacaggggaacgccagggccaaaaagggggagtgggtgggtaggggagtgggggtgggtgggtatgggggacttttggtatagcattggaaatgtaaatgagctaaatacctaataaaaaatggaaaaaaaaacttcagggacaaaaattgagaagagactgagggaaaggaggtctagtgactggcacaactttgaatccatctcaaggggagactccaaggctgacactattactgaggctatggcatgcttacagataggagcctagcacagctgtcctctgagaagtccaacaagcaaactgagacagacacagatacttatacccaatcaatggactgtcgtttgggacccccatggttgaattagggaaagggtgcaagaaggtgaggaggtggtcaactccattggaagaccagaagtctcaactaacctggacccctgagatctctcagacactgagccaccaaccaagcagcaaacactagctggtccgaggcctctgacacatcagaggactgcctggtctgacctcagagggagaagaaaatatacctaagccgggcgtggtggcacacgcctttaatcccagcactcgggaggcagaggcaggcagatttctgagttcgaggcctgcctggtctacaaagtgagttccaggacagccagggctatacagagaaaccctgtctcgaaaaacaagaaacaaaaaacaaaaaacaaaaacaaaaacaaaaaaaagatatacctaatccttgagagacttgaggttccagggagtggggaggcctggcgcgggtatggggggaatatcctcttggagacagggcagaggagaaatggaataaggaactgtgggagggaggatcaggaggcaggtaacaactggattgtaaaaaaattaaaagtaatagaaaaagaaagaaaaaaatgactatgtactttgtaaaccaaagaatcctaaccctttgcaccacattctggagatccgtttgcataatagtttttaaaagttgttttttttcttccacacccttcttcctactctctttcaccttcttttaaaatctctttatttctgaatgctgaagacaaaacatatctattgcctttagcattctatatattatatatccatcccaaaggactgaattttaatgtaaacatttaattttagcaagcatgcttcacttcccaaataagtggcttttctattt

SEQ ID NO: 2761 - DNA, 1000 bp, mus musculus
ggatagaacttgagaatttcatcctgagtgaggtaatccagtcccaaagggacatgcatggtatgtactcacttatgagtggatattagccaaataccggtgccaagtcacattccacagattgaaagaagttaaacaagaaggaaggcccaagagaggatgcttgagtttaacatagaagggggaataaaatagtcataagaggcagatggatggagaaacctgggagaaaaggggaatggggaaggaattggagagctcaggaacaggtgtgaggaagaacaggagagatggttaaatggcaatggaaataaatggaaatctgcaaccgacacacatgggtatgaggaggtagggggcatctccaggagggacatgaacttggataaatgtagcacccaagaatcaatgggtttgaccttagttctgactcacttcattgggaatatggaacctgaggaggccactgcctatttctagacaggaacaccagtagtgcaaaagagacaacaattaacatgtaaaattttcaacccaaagtttatgctgtcctcaagaaatgtacacatggaaaatggagcagagacggaaggaatggccaaaaaataaccagcccaacttgagacccattctatgggcattcaaaaatccctaacactatcaataattttctgttatgcttgcagacaggagcatgttgttctctgatagaccccaaccagaagctgagttagacagatagagaaatgcatccaatcagtgaattgagttagggaatttttatggcagaataggaggaaggactgtgggcccccaaggggacaggaactccacaggaagaccaacagagtcaactaacctggatccttgggggctctcagaaactgaactaccaaccaaagagcttgcatgggctggacctagactttccctttcatatgtagcagatatgcaacttgagttgcctataggtcctaaacaacttgaacaggggctatac

SEQ ID NO: 2762 - DNA, 1200 bp, mus musculus
gtgtcatggagatcctgtaggtttggatctctaggaccagcaccttcacatcctcccacagttcttcaatggggtagatgttagggtgggccaacttaagcatctggatctggaactgaaagttatctgcactggtcagtctaccagttctctcctcacccaccacaccaaggtgagctctctagtctgctagcttatccactgctgcacaacagcaaaagaaggagccatcactcctgctttcatgccttttggagctggctcacctgcaacccctcttcccttgcaaccagagccagctccactttgctgcccaggtaaggtgtatggcacattctcccaagtattgcagcaagtgacggtaagggctacctcttccttttatgacactgggaccagatcttctgagggccactacacagcagagaagaggcaggggcaactctcctatgctcatgctctcagagctggctgacctgtaacccccacaagcagggccagttctactgtgctacccaggtgaaacacagggcctgctttgttaagtgctgcagcatgtgacaggcagaaacagctgaaccagctcacctgctttcctgatctggggccagctctcctgcaggctgtaggtggtaaggggtgagatgaagggcatctgcccctcacccattttatggcacccagacaagtggcagagccagctctccatgctcatacccttggggcctgttaactcacagttcccacagtgagggccagttgcacacccacagttcccacaatgagggccagttctgtgcttcctgggcaaagtgcccagcatgctctcctgagtaatacaagtgacaagaggtgagataagctgttgctgaacagtctctcctgcaatcccatgatagccagataaggtctggagctacgtctgtatagccctcagatatcaacatggcaccaggcagaagcccacaacagggcttctccaccacttaattgctcctcttagtggtacccaggatcatctcagaaatggtctcaggagtgctatctatgttctgtccatgaggtgtggcaccagacaggggccatctcagttatgctctgctcacatgggcctgtgcagcactagacttgtggtcttcttaggcttgctttttgcctgaactatgtggtggcccctgaagggggctgtctccaaatata

SEQ ID NO: 2763 - DNA, 1000 bp, mus musculus
caattgctctaatcaaatacttagctcttctgtatgatcactgttttagtgtgatcacccatttatcagtgtcaattaaaatttatgctaatcaaggttttccttaatgaaagctctttcactgttcatttgttctgtgatctgtctgtacattatcattctggtagtgcaaagatcaaatcctctgcttagcaatcaaatcaaactattatatcaccaaagaatacattgataatagcatagtcttgacccaagggtaaagagaatggagagaaagataaggaaaggctgaccaatacttcattcctccttagaatagggaacaaaatacccatggaaggagttacagagacaaaggttggagctgagacgaaaggatggactatccagagactaccacacctagagattcatcccataatcagccaccaaacccagacactatggcatatgcccgcatgattttgctgaaatatagctgactcttgtgaggctaggccagtgcctggcaaatacagaagtggatgctcaagtcatctattggatggaacacagggcccccaatggaggagctagagaaagtacccaaggaactgaaggggtctgcaaccctataggtggaacaacaatataaactacccagtacccccagagctgtgtctctagctgcatatgtagcagaagatggcctagtctgccatcattgggaagagaggccccttggtcttgcaaactttatatgtttcaatacaggggaacaccagggccaagaagtgggagtgggttggtaggggaacatggtgggggaagggtataggggacttttggtatagcatttgaaatgtaaatgaagaaaatatctaataaaatttgaaaaaagaggaaattaaaaaagacaaacataagagtaagaagttctgatacactgtttgtaccgtaggttcactatagatgtcatatttgcagcataatttttaaaagtaaaagaaaggatttgtaa

SEQ ID NO: 2764 - DNA, 1000 bp, mus musculus
ccccttctcccagtctccctcacacaaagcccctcccatatcccttccttgctttctcctcagagaagtgggaggcacccctaggtaccaacccaccatgaaacatcaagtcactgcaggactaggcacatcctctctgactgagaccagacaaggcagcccagtttggggaaggggatccaatggcaggcaagagagtctgagacagtccctgctacacctgttagggaacccacataaaggccaagctgcacatctgctacaaatattggaaggggcaggtccagcacatacatgatttctggttggtggttaagtctctgtgagccctcatgggcccaggagagttaactctgtaggtcttcttgtggtgtcattgaccccctctgatttctctaccataagacttcctagaatgtacataatgtttggttgtttggtctctgcttctgtttccatcatgctagacagacctctcaggagacagttaaactaggctcctgtctgcaagcagagccattaagagtgtcaggggttggctctctcccatggaatgggtcgcaaactggaccagtgattagttggccatttcctcagtctcttttccatctttgtccctgcaatcttgccatcaggacaaatttggacttgaaggattttgtgggtgggttggtgtcaccctcctttcactggaagtcttacctgataggaggtaaccatttcattctccatatctcgagctgccaggagtctcaactagagttaccccccatagattctcagaagcaccccccttcccaggtttcttgtttgccacagagataactcccctccacccatgtcaaattcagttctctctcccaaccttgtccccacctgctatccctccacaccacttcccttacgaagttctctccctccacccacctcctatgtctcttttatttccccttctggtgagatccaagcaccctgccttgggaattccttattacttata

SEQ ID NO: 2765 - DNA, 1400 bp, mus musculus
gaaataaaggccgtggacagttccacctcctttaataccttttaactttcttttcatatttagttacttagttgattagctggttagttattcaatcacttatatatctccacaacacatatgtggagactggaagacaacatcctctccttccaccatgtggggagccaggaaacaaattcaggtcacaggatttgtggcaagtgactttcctcacagatccatttctccaggtccccttttagctcgcccttcctttccttccttcctttcttccttccttcctcccttccctccctccctcccttccttccctccctccctccttcccttccttcctttcttttttgaatcaaagcttatttctttttaagatttgtttctacaccccaatatcaacccttcctctcctcccagtagccctttcacagacgtcctctccccattccatgcccccccagggtgtcacccccactaacactcccacagctccacccctgcacctgaggtcactgcaggaataggcacatcatttcccaataaagccagacaaggcagtccatttagggacgagatccgctggcaggcaggctacaggctcagggacagcccctgctacagtttttggggatccacatatgttcaggggccctaggtccagcccaagctcgctctttgattggtgattcagtctctgggagtacccaaatgtacaggtgagttgactgttggtcttcctgtggtgtccctgtcctcttcaggtccctcaatcctcctcccaacttccatacactacccaagctctatctaattaatatttgggcatgagcctctgcatctccttccatcagctcttgagtgaagcatctcaaaggacaattatgctaggttcctgtctgcaagaataacagagtatcattaatagtgtcaggaactggttcttgcccataggattggtctcaatttgggtcagtccctgagccactccctcagtctctgctgtatctttgtccctgcacatcttgtaggcagggcatattttgggttgaaggttttgtgggtgggttgctgatcttatccctccactaggagccctgcctggctacaggaggtggccacttcaggatccatatcccccactgctaggagtctcagctagagtcacccctaaagatcccagggcttccctccaccctgcttccaatctctcttctctctcccctactctcatatgtaaatatgactccccccactcttatccccatcccctcttccactcagttccttctttccatcaatctccagtacctaatttctttcccattctgaagaggattggcagtgttctttctgtttctattttgtggaatagtttaaagagtattagctcttctttgaaa

SEQ ID NO: 2766 - DNA, 1200 bp, mus musculus
aaagggttaaaatcggcaagtgtatggaaggctacagaaaaatgtcatcaataattagcctgttctttttttttttttcagagctgaggagtgaacctaggaccttatgcttgctaagtaaacactccgccactgagaaaaatcccaaatctcgcgagatcagcagctatcacgagagctcaaagttccctgagagtttttttttccgcgcccctccctgagagttttaagtcccaggaggttctggactgctcgcaagcggtggtgcgtcactatcacctcaggttggctggttagagacctccaacatgccttcggatcgaaggccaagtcagagaaggaatagatctaagagccgtgattatcgtggtgcacggtcaaaggtaacaagagctgatacgaggaacagagacgatactcttgccctcagtatgtatcaggggcctccgagtgccgaccaggggaacaacatggcggatgcccctcggtttggcttctggacttcagtaagccagtgtctgcaatacttgtgggccaggaggcacttgggcctgcttctacttttattctggacgctggtgatcctgttccgtcctgtgaacactggtgagtgttggttctaggctagagaaggggtgacagggacttgggaagtgtgaggtagggcctgggaggggattggagtaaaaggagggtgattggggtgctagtcagcaagggtaagggggccaaaggtggcagggcgagaccgagagcgagggaggttgatggggggtagtgaggcagggatagagggggatgaggcacaggagttgggctgatgcagcgggagcctataaggcagtgctggggattcagtggcaaattctggtcctctgaaacaaaattgctcttaactaccgagcatctcactagcacctataatcgtagttattatagtaattatagaagttagcaatattatacaaatattaatatttattaataattataattctaaacatattatacattattaaaatgtgctgttcttattatttctcactagcaatatcaataatatcaatacaattatgataattatagtatttatattttatattattttatattatgccaactataattaataatgacacaatattatagaataataaaaagtaataatgttattattatgtggggatatatgtttgtgtg

SEQ ID NO: 2767 - DNA, 1000 bp, mus musculus
gtagatagatagggaatcaagtggagggatggggttgccataccacagtcaaaatttttgacccagaattgttcctgtctaaaaatagacaaaaatggagaagagactgaaggaaaggcagtcaagtgactggcccaacttgggattcatcccatgtgtggcaccaaggcctgacactattactgatgctatggtgtggtaacagacaggagcctggcatggctgtcctctgagagtccctaccagcagctcactgaggaagactcagatatttacacccaaccattggactgaagtcagggacccctatgtttgaattagcggaaggatggaagaagccaaggaggaaggtggaaggtgaccccataggaagaacaacaatctcaactaatccggacccctgggagctcccagacactgatccacctaccagacagcatatactagctggtctgaggtccctagaacttatttagcagaggactaatccttgaaagacttgaggctccaaggagtagggaggcctggtgagggggagcatcctctcagagatgggtgaggaggaatggataaagaactgtgtgagggggtggtcaggatggggagtaatggctggattgtaaataaactactactactactactactactactactactactactactactgaaatttgttttctttaaaaaccaagttctgttatgtgactatgtttgtctttgaatcgcaagtatggggtacggggtgcttcagattctccacagccactaactatgttgccttgtgctctaggagtcttaagacttttgccagctgcagacagattatgcttgggactttggagagggtacaaattcgagagacctgagagggtgatgtggcagggcactgtcctccctggctctccctgttgctgcttttcctattgttggattgctattttactggattgctggttggagatatcctgatgacttagattagacttggccctaa

SEQ ID NO: 2768 - DNA, 1000 bp, mus musculus
gtgtccaaagaatataacaattattatatctttcgtaattaggaaaattcagtagataatagagtaagcctccacaaatattatcaggcacgttatgagtataacaaacttccctgtaaagtacacatattagttttcagttcacagctaaagaaatcaggattttgttcctttcctctttcagccactggtagctgtttgcattccttgacttgacaccatctgggatcctaatacttacctaggcttctagcttgcctttttatgggcctggaacatcagtgtgactccagcctaatcttcaagattcacagctgtctttgtgcctaaccctggatcctgatggcttaccattccattctgtcgtatataacctttggaaaacagggtaatcctatccccacccaataaaagtttgttttcatcctgcatttaggcatgaggatattgtcagaatttgccaatttattagatttgcttgggtgtaagtaaggggtttcagtgtctacaagctcagataaactcttcatatgtgatatatacatacataaacatctatttaaaaatatatgtctatacatatatgtatgtacaggttgaatatcctttatataaaatatttggcaccaatagtatttccaagtttggagtttagattttagaatatttacatatattttactgattcctaatctcaaaatctcaaatataaatgttccaaaatctaatgctttttggaatgtgatggatttatattttcagattagagagattagaaatgctcaatattcatgtgtatttgtgtttacatatagacagacacatttttaacttttctttaaaatgtttcctttacatattctaatccatatgacaactaagaagttctatttattcatttaatgtattgaacacttcttccatgccaggctctttgctgagtgctagggatacagtagtgaatctgctgcaaatggtgttctcaagagacacatactgt

SEQ ID NO: 2769 - DNA, 1200 bp, mus musculus
gcaaagcatagtaagttgtacttcagagcaaatgggtcaaaacattgtcatggatgggtgatatcaaagccatgggtttgtatatattttacaactagaatgaagtaagatgatagcagagtcattctgaattttactcagaagaggaaataaaatagagatctgaggttgatggagggaaggaactggatggagaggaaatggggaggggaacaggcttgaggatcatgcatagggaggcagggaggctggaaatcagaggcatgcaggcagggaacagtatttctaggatgtatccaagacttgggaaagagggaagccacattgagtctatgggggtgactctagctgacactttaagctcggaaaatcttgtggaagagttggggaaggattgagggacctcaaggagaggggatagagaccttacaggaacactaacaaattcaactaacttggacccttgaggcttctgaaacaccaactaaagggcaagcatgagttggacctaaattctccacatacatgtagtggctgtgtgtcttggtcttcatgcaggtcctcaacaaatggagtgggggctgtccctgagtttgttgcctgcctttagatcccatttccctaactggatcaccttgactgacctcagtgggagaggatgcacctagtccttcagtgacttgctgtgctagggtgagatgacaggaagggactctgccttctcagaggagaagtggagtgggcaggagctatgtgagggggaccttggaggaggactgctatccagatgtaaagtgaatacataaataaattaatatataaaaagataatcattttggcaaacagagtagaaaagaaaggaaattacattttgaagggcagtctagtataagccccactcagaggggaagtctagtaagtcccactcactctagaggctgcagcttcaggaatattgcatgtggaaatgtaagtaacaatagacttgatcacttcaacctaatacatataacaaagcagtagcctatagtacttcagcagatgatagcagaagtactaatgtactttcccttgtataaaatggcatgttttactgtgacccatagacaacttccctctgtgcagttaatatttacatgacctataatacagaatgaaatgagaataccatgcaaatagttattcttctgtactctttca

SEQ ID NO: 2770 - DNA, 1000 bp, mus musculus
tattagtacaaagagccataactcacaatgaagatgtatcacttataggtatttatgtactgaagaacatagcaaccacatttatgaagcaaaaacttcagataatgactctaatgaagagttccattccctctaccacagttcctcatcccattactccttccccttgcctccaagagggtagccccctgccattagggctccactttttctggggcctcaagtctctctaggagtaagcacatcttctctcactgaagcctgaccaggtagacctctgctataattgtgccagggacctcagatgagcccatgtaagctcttggttgatggctcagtctcttagtgctctctggggtctgggttagttgagactgttggtcttcctatggggtcaacctccccttcagcttcttcaatgcttcccttaactcaaccataggggtctcccacttcagtcctacgtttgagtgtaagtatctgcttctgtctcagtcagctactggtagggcctctcagaggacaatcatgctaggctcctgtctgtaaacacatcatagcatctgtaatagtgtcaggcctttgtggtgcctgaccccaccacacacatgcacacacacacatgcacacaggagatagaactcaagttgggccgatcactggacctcctttctttcagtctcttctccatttttgtccctgcaattcttttttttttaattttattttaattaggtattttcttcatttacatttccaatgctatcccaaaagtcccccataccccccccacacacacacactcccctacccttccacacccacttcttggccctgcaattcttttagacaggaacaggtatgggtcagaaattttgactgtaggttagtaactctttccctcaactagaggccctgtctatctactggagctggatgcttcaagtttactttccccaacgttgggcattttggctaaggtcacacccaataagtcctc

SEQ ID NO: 2771 - DNA, 1000 bp, mus musculus
gatatatctaatattaaaggaaacatttcttaaaaagaatgactagctagccaggaaaaacaatcaatttctcatggttcaaattttctttttttaattaattattttatttatttatatctcaaatgttgtgccatcctggtcccccctcacagagttcttcccgcctccctctccccttcacctctgagaggatgtccaccccagagtataccccctccttgagcctttaagtctctataggattaggtacatcctctcccactgaggccagacaaggatgtcctctgctacatatgtgtctgggacctcagaccagcctatgtatggtttttggttggtggctcagtctctaggagctccaaggggtccaagttagttgaccctgtttgtcttcctatgggattgccatcccctcagtttcttcaattcttcccctaattcttccatatggtcccctatgtcactacaatggttgactgtatgtatctgcatctgtctgagtcagctgttggtagagcctctcagaaaacagccatgctaggcttctgtctgcaagcacaacataacatcaggaatacggtcagggtttggtgcctgtgcatgggatggatcccaaggtggggctggttactggtcagccattccttcagtctctgttccatttttgtcccttcatttcctttagtcaagaacaattctgggttggtgtccccatccctccactgggggtcctgtctgactactggaggtggtctcttcaggttacatatccccactgttggtcatttctgttaaggtcacccacattgactcctgggagtgtcccccatgccaggtctcctggacttcttagagattcctcccatacccacacccatcccagctgcatatttccattcatgctcctgccctctggacctctctcctgtccccccatacctgatcttgtcccccttttccatttccctgtcctctcccacccaggcccctccctccc

SEQ ID NO: 2772 - DNA, 1000 bp, mus musculus
cctctgcaaagcccctgtcccatccccaccttacgcccacccacctcccgaatcccacctcaccgccctatcattcctctacactggggcatcaagccttcacaggaccaagggcctcccctcccattggtgccaaataaggcccctacagctccttcagtccttcccctaactcctctattttggtccctgtgttcagtccaatggttggctgtgagtatccacatctatttcaaagtttcggtctatctttttgatattctctactagatacttcagacatccttagccaattcccataatctcacgtgacacatgaattcaaatttagtaaaggtggctgaattgcttctgttccaagaaggattaaaatgaagaaaacaaaacaagttatttcttcaaagtgcttgatgtggtagacacgatgcagagcatagagattcacaatggcctgtataaaggaagaattaatgtacatgacatctaccattcatgtctcaaaaacaatcctgaatcattcttccctcattctaatgataccaaacaattttcataagagcacacagaggaggagagattgcaatttccgctcagggaccgtctaaggtggagccagccgggagcacacaggccacaggagcagtggaacagctggaacagggtcctttctgcctccatctgcacccaggagctggggctgtaccacagtcctttgtgtacggtcctgccaggaaaaagctggtatccagaaagttctctgactccctgactcagaggtgagaccactattttctcttaggtgactgtctaaggcaggagtgactgtctaaggcaggaccagtcaggagaacacaggctgcaggagtggtggagcagctggggcagggtctttcctgctcccatctgcactgaggagctggggatgttccacagccctctgtgcacaggttctgccaggggagagctgatctcccaggagtgtttacataggcttacagac

SEQ ID NO: 2773 - DNA, 1200 bp, mus musculus
tacggatgttctttatagaatcttctgcacctgagattctctcttccatctcttgtattctgttgctgatgctcgtatctatggttccagatttctttcctaggctttctatctccagtgttgcctcactttgggttttctttattgtgtctacttccctttttatgttggatcgttttattcaattccatcacctgtttggtcgtgttttcctgcaattctttaaggaatttttgtgtttcctctttaaggtcttctacctgtttagctgtgttcgcctgtatttctctaaatgagttattaaagtccttcttgatgttctctaccatcatcatgagatatgcttttaagtccgggtctagcttttcgggtgtgttggggtgcccaggactaggtggggtgggagtgctgcattctgatgatgatgaatggttttgatttctgttagtaggattcttactttgcctttcgccatctggtagtctctgaagctagttgttatagttgtctctggttagagcttgctcctcaggtgactctgttagcctctatcagcagacctgggagactagctctctcctcagcttcagtggtcagagtattctctgcaggcaagctctcttcttgcatggaaggtgcccatatatctggtgttcgaacctgcctcctggcagaggttgtattcgactcaccagaggtcttacgatcccgttgagggacctgtgagtaccttgggggtgtacggaatctccgtgcgcaaggaaccccagtgctggagtggactggaagggacttgtgcccctgatcaggtcaggttatctgtttccctagttaattcagtctcaggtcccgcatgattggattggagcagacactgtgttccactcaccagaggtcttaggatcccatgggtgatcctgtgtgggtccttgcgggtgtccggagactccacaggcaaggcaccctggtgcttgagtggaccggaagggacaaccagaaatatttcttttggagttgttggccaatgatgttccatagatcctcaaacattacaaaattactgtcaaagttattgggtattctccataacttgattattaagactctattgctaaagatatcacatacttaaaccataaaacatgtagaaatcaaggtgatactaacctgaaacctttataacctactggatagctcaac

SEQ ID NO: 2774 - DNA, 1000 bp, mus musculus
ccaggatccaacaggaggagagagaacctgtagagaccatatccagaggttaaacacagaccccagttgaggcatggggccactaaccaatataaaaaatattaacccagaattgctcgtgtctaaaggaaatgcagggacaaagagtggagcagagactgaaagaaaggccatccagagactgccccaccgggggatctgtcccacctgcagacacaaaacccagacactattgctgatgtcaagacatgcttgctgatattgaactggggttggaagaggcgagtccggtctcaaaatggagggccatgatccaaaggaaccagagcagctgaggaagctgtttattggtggtctgagctttgaaaccacagatgatagcttaagagaacattttgagaaatgggcacacttacagactgtgtggtaatgagagatccccaaacaaaacgttccagaggttttggttttgtgacgtactcttgtgttgacgaggtggatgctgcactgtgtgctcggccacacaaggttgatgggcgtgtgtggaaccaacgagagctgtttctagagaggattctgtaaagcctggtgcccatttaacggtgaagaaaatttttgttggtggtattaaagaggatacggaagaatataacctgagagactactttgaaaagtatggcaagattgaaaccatagaggttatggaagacaggcagagtgggaaaaagagaggatttgctttcgtaactttagatgatcatgacacagttgataaaattgttgttcagaaataccacactattaatgggcataattgtgaagtgaaaaaggccctttctaaacaagagatgcagtctgctggatcccagagaggtcgtggaggtggatctggcaactttatgggtcgtggaggaaactttggaggtggtggaggaaactttggtggaagaggtggctatggtggtggaggtggtggcagcagaggtagttatagaggtgg

SEQ ID NO: 2775 - DNA, 1000 bp, mus musculus
caaactgctgcattatttcacagtaaagtaagattggggggcggggggaggcacagtgcacaacagagaccagtcaagcaggtctcctgcctcctgcctgctgggttcagtgactgacctcattctgcatatcaagtactgctagctagcacgccttgacccaatccgccaagctcctccacatagggctagagaagtgacaggcagagtttaatattctgaagctttaaagggtggccaacaggagcatgttgctaggtcattctttaatagcactgattccatcagcctagaacataaacacctcctcctcctcctcctcctctatcccttttacctggtgttttcacaacctccacttgcttcctaagctgcactggctagggtaaagttcaaattgttccttctcctttttacttgccaggatggaagtccaagtggtagcatggctttactaaccctccctcagctagacagtgcactcactcttagactcagctgtgggccccagctggcacgccggggactgagtggcttctcagagactgcaggaattgccctctgcccatgttctgtgctcagcatgttgcaaacttgaagtgtggtgaagctaggtaaaaagtatcctcatggatatatggattccttctgctagtgcttagtgacacgtctttattgcgtactcctgggaataggggggtgggagtaggaaacaaagtcattcataaaacctatagcctgcaagagagtttgtctctaaatgcagacagtttcctctacaggtaagcaaagcaggcttcagtatggtgagggcgatcagcagacctatcatagctattacacatgagagtaaaagagaatgtcagaactaaaccataagtcacccagcaccttgctgcctggtagatgtcatagaatgtccctgtccagggccaaattccatttttatcagtgatttactgccagatctagaacaaggtcctgagcctcgctgagcctt

SEQ ID NO: 2776 - DNA, 1000 bp, mus musculus
ctattttgtgaccgagtagttagtccattttgtagaaggtaccatgaggtgttgagaagaaggtatattcttttgttttaggttaaaatgttctatagatattgtgggttaaaaatggtgtcccacatcctgcccaccacaaggctagggccactcatggaggcagacacgggaagggaggtttgactgctcaccccacacagccgcagggcaggcgtcaggctgtgagaagccacaggaccctgctcggggtggaggggcacagtctgaggtccctgcaatccttccagagtctagcttggactcttgggcaccacagatgcctctgggtgctacggaaaagctagctctggggtccctgggatgcatggatgctggggagagcagatcctagcttttggacacctcagaggccactgaatgttgcagaagacctgagaacagagtgcggaccagtgggtaggctctggcctggggccaaagggaaaagggcaggggaagtgagagctctagctgggtcctgtggggacaagaggaagacttcttccagtgctccaacaagggtgatactgataagaagagacagtccatggttttaaggtgtttattgtagaaaggcagagagagggagagagtagagaagtagaggccaaccatggccatgtggagaaggaaagagggaatggggagagaggggaagcaagaaagtaagaggcaagagtaagagagtaaaagcaagagagtaagagatgtgcctggcaaatacaaaagtggatgctcacagtcatctataggatggaatacatggcccccaatggaggagctggagaaagtacccaaggagctgaaggggtctgcaaccctataggtggaacaacagtatgaactaatcagtacccccagagctcgtgtctctagctgcatatgtagcaaaagatggcctagtcggccatcattgggaaaagaggccccttggtcttgcaaactttatatgccccag

SEQ ID NO: 2777 - DNA, 1000 bp, mus musculus
gtcaacagcatctgcaagagagagagagtaagggcgtaggggcaagaaacatgaagaatggagacaacacaggctatctgctcaagtctcatttattgaaaggcaactcgctggggagtgcagctggagacatcattaggtagtccgggggggggggcatgcagatggaggaggtctctgaaatggaggccattcaggatcatgatatttggcaacctcttcttccaggtcatacctgtctgactcagagaacgtatagtgatgagcaattgccacaaagaatatttaaatgcaggttatgaaaccctgcaggcctatggccacagcttctgcactttgtcattcccaggtacgcttttctgaaaaaaagaaaaaaaaagctcacttttaaccaacaatgcaataagtactgcttgccaaaaggaaacaaaaaccatgagtttcacacagagaaacttgccaacaggttttatagggctacacttttcctttaggactttgtaaaacagcaacaggcagtacatggcaaacaattgtgacaaactgcttaatataaccaggtatgtccaagcattggagaaactagtttccctcatcacttaatttgccccatttttgttactatgactcaccggtcccgaagcggcaggttctcctggatcgacccttcttccagtaacatccctcacggggtctctcattctcgctatccctgtttggcaccaggtgacccagtccgcgggtcagtcaatggcatctgcaagagagagagtggggactgaagggcaagagatgaagaatggagacaacacaggctatctgcctgtctcaagtctcaagtctcatttattgaaaggcaactatgggtatctatgcactcgctggggaatgcagctgaagacacttaaccacaggtccaggacgtgtacgagaaaaacaagatgttattagagtgtgttcaactgtggtaggcttcttgctaaaacatcatgctaggaaa

SEQ ID NO: 2778 - DNA, 1600 bp, mus musculus
agaaggaagcctcaaggaactgctacagatgtgtggggccacaagaactcagatgggggtgtcagcaaagtgaaggcaacttcaagtccatatggggtgtggaggagcctgccacagggttgtcttgggcagaggacaccagtgcctgggaacaagcacggctaggcagggagacagtacccaggagaggaggccgcaggatccagcctgtcttcaggatcatctacacagctctaggggagccccatgagggcagcacccttgagtcctttcgtgagtgaactccccccgcccctgtgaaacctgcaagcctcaggacccaaaggacccgggaggcaagtgccaacacaaggcagtttccttcttgacaccctgacaggacactagtgcctgagaaaagccccaggctggggcacatggcaccacagggttaatgccctcagctggcctgagagcctgggagtgtgcaggacaggttttgtgtgagcaaacaggagcagcagaaagaggactctgtgtgtggggcgggggcaggcagggggcgggggggggggggagagtttgttctgctctcttttgtccagggctgctggagaattccagagagcaagcagggacagccaggtgaatacaactctgccaggcagctgccaaggctggccccaaaccctgccgacctggagggtggcctggcagctttgccgaggtgccatcctccatctgccacccataaccaaacaggtggacatcacagaaaaggccatctcaagggttctgccaactgcctggctctcccaacacaaatgccccttcctcttccctttcccctctcccccttcccctgccactgctgtccagaggcaggctgccccctgctctggaaccccgcccccttatctgttaacctcatagtgacccagctgtccagtgagtcccttcccccatcacgtgcttacccaccatcagctgctcctgtataaagctgtgagtgagggcaactggaggccctgactacctacctggtcagccacttctacaccctggcacgtgttgtgagcttctgtgccagcctaggctatgctagctgctctcttacccacctggtgttgtgaactccttgtcagctttcctagtgtacatctaggccagctgcctgctgcttgttctcttgcagatgtgtgtgtgtgcgcgtgtgttctaacctgatcagatgctccccggagttcctgagctccgtctggaagccagcaggaaccatggatgttgacaagagactggctgatgctcatcttacgattgatttcagtctgggacaggaagacctgaactgggcatgggtagggcctggggactgggctgtgctgatcccctcctgttgttccttgtgactatcattccttgggttggtggggtattccttgctttgctttgtagtttcttgttactatcctgtgccagaatagggcaaggccaccctacagtggtaatcccttgtgagagttcctaaaagagtgaggaaattttaagaggtagctcttgggcctttgggaagggaaaaatagcagagggattccatggtggtgggcagacaaggcccatc

SEQ ID NO: 2779 - DNA, 1400 bp, mus musculus
ggctgctctctgaaccaccagcacatctggatcaccctgtgtatctctgcccccccccaccccccgtgtgagagcaataggcgttgtactcttcttgcaccctctcatcagactgtcccccgcctgtctgtcttactgcagggagggaagccattgttcccatctggagaaaatgtgaaaagacacagcacagagggaatgtgtgcaagttcttgatagaaggcttttggtcccagggccaaagtgtgtgttgagacagagatttcaggattccacctcccagacttctctgtgtgcccctggggaagttagtgtgcccttttcaccagaaaggcaactctcacagaaatttcggagaaccttttgaaagtagtgcgccggaggcggcgcctggaaacagtggaggcaggtggccatactgctaacgtctaaccaagatgtaggaaggataaggacttttatgtacccaggagcagtaggcatgcacagatggaatacacactggggagagcatggccctatatgagtgcagacacatttctttatgactgagttacagatgctacacggataccctggtttgtgggcttgaacacatacttggtattcccagttatgctttctaactgaaattagaattatgtggggctgagaatgaattatgtgggactgagaatgccccacgggagggaagcagaagcatgtacaagcctgagaagggtagaaggcatcatgtactctataagtgtgcctcgggcatccgtggtttccaagggtaccctctgaggggtgggtgggctctcacgtgctccgggcatggttcctggatggtggagaggcatggttggacttgatgggggttcatttagccttgctggaaagcatgcgcaaggaaggtccagcagaaggcagcctaaaagtaactgaagcgttcatgttttcctccatttcctcaggagatatccgtgtgacaagggccaggactccaagggggttggatcagaggaaaccagccccgggagatgacacagccacctaggatgaagagccactgtcgtctgtgatccctaagttgaactccatacctccacagtacacgtgtgctattgcgtcatccagaaggtatgccctgagacattcctagactgctttatgtagaaagccactttaggcagcgtgaactcggatttgaagtcagtaagacatgggtgggaatacaacagaagggacactgcacgtttgtggagtgaattgggagctagagtgtaccagcaggtgtttgtggatacagagggagggaagggaaggaccgaggggatcacgagaatatcatctgtcctccccgcccccatatttctgtatggttggaaattcctacagataaggtctggagtgccatg

SEQ ID NO: 2780 - DNA, 1400 bp, mus musculus; identical to SEQ ID NO: 2779

SEQ ID NO: 2781 - DNA, 1400 bp, mus musculus
tccaaccatacagaaatatgggggcggggaggacagatgatattctcgtgatcccctcggtccttcccttccctccctctgtatccacaaacacctgctggtacactctagctcccaattcactccacaaacgtgcagtgtcccttctgttgtattcccacccatgtcttactgacttcaaatccgagttcacgctgcctaaagtggctttctacataaagcagtctaggaatgtctcagggcataccttctggatgacgcaatagcacacgtgtactgtggaggtatggagttcaacttagggatcacagacgacagtggctcttcatcctaggtggctgtgtcatctcccggggctggtttcctctgatccaacccccttggagtcctggcccttgtcacacggatatctcctgaggaaatggaggaaaacatgaacgcttcagttacttttaggctgccttctgctggaccttccttgcgcatgctttccagcaaggctaaatgaacccccatcaagtccaaccatgcctctccaccatccaggaaccatgcccggagcacgtgagagcccacccacccctcagagggtacccttggaaaccacggatgcccgaggcacacttatagagtacatgatgccttctacccttctcaggcttgtacatgcttctgcttccctcccgtggggcattctcagtcccacataattcattctcagccccacataattctaatttcagttagaaagcataactgggaataccaagtatgtgttcaagcccacaaaccagggtatccgtgtagcatctgtaactcagtcataaagaaatgtgtctgcactcatatagggccatgctctccccagtgtgtattccatctgtgcatgcctactgctcctgggtacataaaagtccttatccttcctacatcttggttagacgttagcagtatggccacctgcctccactgtttccaggcgccgcctccggcgcactactttcaaaaggttctccgaaatttctgtgagagttgcctttctggtgaaaagggcacactaacttccccaggggcacacagagaagtctgggaggtggaatcctgaaatctctgtctcaacacacactttggccctgggaccaaaagccttctatcaagaacttgcacacattccctctgtgctgtgtcttttcacattttctccagatgggaacaatggcttccctccctgcagtaagacagacaggcgggggacagtctgatgagagggtgcaagaagagtacaacgcctattgctctcacacggggggtgggggggggcagagatacacagggtgatccagatgtgctggtggttcagagagcagcccctgccacacaccaggtaaaacccagctgat

SEQ ID NO: 2782 - DNA, 1400 bp, mus musculus; identical to SEQ ID NO: 2781

SEQ ID NO: 2783 - DNA, 1600 bp, mus musculus
cactcctattatccgtacgtttggtcttcttattgtgtcctggatttcctggatattttgagttaggatctttttgcattttccattttctttgattgttgtgccgatgttctctatggaatcttctgcacctgagattctctcttccatctcttgtattctgttgctgatgctcaaatctatggttccagatttctttcctagggtttctatctctagtgttgcctcgctttgagttttctttattgtgtctacttccctttttaggtctagtatggttttgttcatttccatcacctgtttgtatgttttttcctctttttctgtaaggacttctacctgtttgattgtgttttcctgtttttctttaaggacttgtaactctttagcagtgttctcctgtatttctttaagtgatttattaaagtccttcttgatgtcctctaccatcatcatgagatatgcttttaaatctaggtctaggttctcaggtgtgttggggttccctggactgggcgaagtgggtgtgctgggttctggtgatggtgagtggtcttggttcctgttagtaagattcctccatttacctttcgccatctggtaatctctggagttagtagttatagttgactctgtttagagattgttcttctggtgattctgttaccgtctctcagcagacctgggagacagattctctcctctgagtttcagtgctcagagcactctctgctggcaagctctcttacagggaaggtgcgcagatatcttgtatttggacctcctcctggccgaagaagaaggcccaaaacaggacctttctcagacagtgtgttgctttggcagttcccaggtggtacagactctcacctaagcagactaaattcctacgttccttggagtcccgggaccaagatggcgaccgctgctgctgtggcttaggctgcctccccagccgggtgggcacctgtcctccggtccggaaggtggccggctgtccccggcccacacagggtgctgcctcagcgcctctgtgcttccgcctgttccagaagctgtcaggttctctggcgcaccctctcacctgttcagactaatttcctaagttcggcgggtctcggaccaagatggcgaccgctgctgctgtggcttaggccgcctccccagccgggcgggcacctgtcctccggtccggacggtggctggctgtccccggcccacaaagggtgctgcctcagcgcctctgtgcttccgcctgttccagaagctgtcaggttctctggcgcaccctctcgcctgttcagactaatttcctaagttcggcgggtcccggaccaagatggcgaccgctgctgctgtggcttaggtcgcctccccagccgggcgggcacctgtcctccggtccggaaggtggccggctgtccccggcccacacagggtgctgcctcagcgcctctgtgcttccgcctgttccagaagctgtcaggttctctggcgcaccctctcacctgttcagactaatttcctaagttcggcgggtcccggaccaagatggcgaccgctgctgctgtggcttaggccgcctccccagccggcccca

SEQ ID NO: 2784 - DNA, 1400 bp, mus musculus
gtttcctcaggagatatccgtgtgacaaggcccaggactccaagggtgctggatctgatgaaaccaacaccaggagatgacacagcctcctaggatgaagagccactgtctctgtgatccctaagtttaactccatacctccacagtacacgtgtgctattgcatcatccagaaggtgtgccctgagacattcctagactgctttatgtagaaagccactttaggcagtgtgaactcggatttgaagtcagtaagacatgggtgggaatacaacagaagggacactgcacgtttgtggagtgaattgggagctagagtgtaccagcaggtgtttgtggatacagagggagggaagggaaggaccgaggggatcacgagaatatcatctgtcctccccgcccccatatttctgtatggttggaaattcccacagataaggtctggagtcccgtgatgagctccgttggcccatgctcacggaagggacaagggtaacaggagttcacaagaagagcagcgtccttaggaagctgtttcaggaggccagagtccaccagtgctctgcctcactgtgcttgctggggcccaggtcatgacctggatcgcttgcttcctggcataaacagtgagcagcggtggcatgtgagcccaccctgatccttcctctgtgttgtagtccatacttatcagcaagcacagtgggcctcttttgaggatcagacaggtgaggaaattgtttcacacaggcatgcatgacatacacactgctgataggaaccagactggttcaaggcagaggcagtcagtaacacagtagccaacctgcccttcacacccccatacaaaccagacacaacacacacacacacacacacacacacacacacacacaaaacacacatcacaaatacacaaacacacaaaacacagacatatacgcaaaacacaccacaccaaaaagacacacaaacatcaaaacacaaacatcacacgtatgcaaacacacaaaacacagacatatacgaaaaacacaccacaccaaacagacacagagagagaaagagagaaatgggccaaggagaagaacgtaatgagattcccctgagatggctgtggaggaggaactctgttgagaggcagagtatggggaaacatgaacagaagagctatgttacagatgagtgtggacactactggacttagggatgggcaaggtaccatccaggccattcattttctatgtgtttaagaccgtgtggattaagattaggccacagagctcgtgtgcaagagagctctgtggtctggggtctcttgttagaacagtgcccatcacaggcagatagggatgtgcagggtctcctgcagacttgaggttgcagcatgcgggtgcacaattc

SEQ ID NO: 2785 - DNA, 1000 bp, mus musculus
ggcttggctccactgctgggtccaggctccagccccatgtgcccctcctgccacatcaaaggccccttcctcacccgaacctcctgcctcacctacagctcctgccaatcctacagctcctatgatccctgcaactcccatgtcccctgcagctccctcctcatctgacattcctgcttcacctgcagctcctgcctcatcctcacctatagctcctgcttcacccacagaccctccaccgtccacagatccttcatcccctgcagacccctcgtcactcccagactcctcatcccctgcagacccctcttcacctgcctctaaaactcctccctctcctgcagctcccacctcacctgcagctcctacccaacccatagctcctagaacacctacaatccccatgtcacctccagccccttcctcttcagacattctcacaacccctgcctcaactacatcatcttccccatccagagccccctcgtctgacagccttgcttcatctataactcctgcctcatatataacttctgcctcgtctataagtccttcttcatcttctgctccctcctcatccgacaagcttgcctcagctgcagctcctccctccactgctcttcctgcctcacctgttcccccctccccctctgctccttcctcatctgacagtcttgcttgagctgctgcagctccggcctcctgtaggaaggacacaggagctgcagctcctcctctggccttacctgctccttcctcgccaggcattcttgcctcatctgtggctcctttctcagctggtcctcctgcctcgcccacaacccctgtctcatctatgtctccttcctcaactgcagcccctgacctgcccgagacccctgccccacctgaaaccccttccaaagcttgcccatgggcctgtgcagggaaattgaatgtatcctgtgactcgacttcagggaccggaggcaggaagatcacactccaggaccccctatta

SEQ ID NO: 2786 - DNA, 1200 bp, mus musculus
tttcggctcactcttgtaccagtgccacacatttcaattactgaagttttaaagtatgctttaatatctactgagtcttctttttttttttttactttctttttaaaaattaattaattaattatttttacactccatatttcattccccccatcccccctccaactcttccacttcccatacctcctccccactcccctgtctccatgtggatgcccccaccctccaccccacctgacctctaaactccctggagcctccagtttcttgagggttaggtgcatcatctctgaatgaatacagacctggcaattctctgctgtatgtgtgttggtggcctcatatcagctggtatatactgtctatttgatggtctagggtttgagagatcttgggggtctagattaattgagactgctggtccttctacaggatcgcccttctcctcagcttctttcagccttccctaattcaaccacaggggtcagtcagctgcttctgtccattggttgggtggaaatatctgcatctgacactcagttgcttgttgggtcttccagagcgtggtcatgctaggttcctttttgtgagcactccatagcctcagtagtagtgtcaggccttgggacctccccttgagctggatctcactctgggcttgtcactggaccttcttttcctaaggttcctctccatttctgtccctgtaaatctttcagacaggaacaattatgggtcagagttgtgactgtgggagggcaaccccatccctcacttgatgtcctgtcttcctgctggaggtgggctctgtaagttcctgctccctactgtcaggcattccatctaaggtcccccctttgagtcctgagagtctctcacctcccagggctctagtgcattctggagggtcccctcaatctcctacctcctgaggttgcctgtttccattctttctgctggccctcagggcttcagtccttttccctaccccaaatggagatatacttgaagcaatcccactgaaatcagggacaagacaaggatgcccactctccctgtatctattcaatatagtactcgaagtgctagctcgaacaataaaacaacaaaaagagatcaaggggatacaaattgtcaaagaagaaataaaagtaccactattttcagatgatatgatagtatacataagggactccaaaa

SEQ ID NO: 2787 - DNA, 1200 bp, mus musculus
ctctaacagaggaggaatgagacagcttccccttctacatagctaggattctgcaccctggacacccatgccctgaaatcacccagagcctcttacccagtcctggcaccagttctgcctacacaggctccccttcacatcctcttctcaagccaatgcctggcaaagttactcaggggagtcactgtccaaggctgagttgggttaagcaggggtccctgtctccttgcctctaaatcctatacagggtgctaagacacctgggctgtaggggtggtggtgagcagaagacgtctgactgcggatgggacaggcttctgagtatacctggtcagaggctccaggcagtgaactggaagatatatggccagggaggcaaaaggaaaagagatgggtgccccacactggtcaggagccaggcatatgacacccacaagtatgcctaccatcccaaatgggtcctttaaaaagaatgagctattttatgtgtataagtatctgcctgcatatgtctgtgcaccacatccatgcctggtgcctacagaagcctgaatggggcattggctctcctgggtctgggttgtgagccaccataatatggatgctgggtatcaatcaattctgggtcttgtggaagagaagcaagtgctctcaaacactgagccatctctctagccccacttattccattctggaaaagacccagccatacaggaaatacaggagtttttggaggctaccaggaagaagcaggccaggtgcatctttgtgacctcctcagctgactgcccagccaggccacatggcctagaatctgcagtggggtggaaatgtgcaaccacaaatgatgctatgccctggctctgttggccaacaggcaccagaagcctaggtcacagaagtcaaggtcacgtggctaaatgccctccatagcctgtcctcccacccagtgagaccaagaagggaaatgggtttgttaactccagctggaagcagggcccagagactgcaagttcaggccggactcagggcagggcaaagcaggggttgaggtgtatttctttgggctactttattaggtttttatatttaccacccttccagccccccagtactagatgggagagaaagagagttagaggggaaagagggcatagacatcttcagactacttcctgctgattatgagtgtcaggctcc

SEQ ID NO: 2788 - DNA, 1600 bp, mus musculus
cattttgcatgttctttgactgttgtgtcagtgttttctatggtgtcttctgcacctgagattctctcttctatttcttttattctgttggtgatatttgcgtctatgacttctgatttctttcctaggctttctgtctccctttataatttctttattgtttgtatttccatttttagatcctggatggttttgttaaattccttcaccttttcagttgtattttcctataattctttatgggttattttgtgtttctcctttaagggattctacctgtttacttgtgttctcctgtacttctttaagggaattatttatgtccttcttgaggtcctctatcatcatcatgagatgtgattttaaatcaaagtcttgtttttccaatttgatgggggtatccaagacttgctgtggtgagagaactgtgttctgatgatgccaagtagccttggtttctgttgcttatgttcttgcacttgcttcttcccatctggttatagctggtgttagctggtcttgctgtcttgaatgtggcttgtcactcctgtaagtctgtgtgtcagcactcctgggaaaccagcattctctgggaagaatttgggtatggagaggtgtggcacaggaggggcagatggaatccaaatagatcctgtcctgggctgttccttggttcctgagtcctgaaggctctgggtggattccttttgggccaggtatttgagcagaagtggtggtcttacttgtgctctcaagtatgtcagcactcctaggagaccagctctctcctggtagatttggtatagagagctttagcacagggtcagctctgcagtgcagacggaaaccctcttctatcagatttagtgtatctggttttatgttgagatcattgatctacttggagttgagttttgtggaaggtgatagatatgggtctatttgcattcttttacatgcagacagctaatgtagaccagcaccatttgttgaagatgctttcttttttccattgtataattttggcttctttatcaaaaatcaagtgtctgtaggtatgtgggttcatttcttggtcatcgattcaattctgttgatcaaactgtctgtttttatgccaatagcatgcagtttttattactattgctctgtattacagcttgaaatcatggatggtgatacttccagaagttcttttattgtacagtattattttggctaccttgggatttttgctttcctatataaagctgagaattattctttcaaggtctgtaaagaattgggatgagcttttgaggggaactgcattgaatctgtagattgcttttgtaagatggccatttttacaatgttaatcctactgacccatgagcatgggagatctttccatcatctgatatcttcttcaatttctttcttcaatgttcttgtcattcaagcctttcacttgttagatttgcagcaagatatgttttattatttgcagctattgtggagtgtattgtttctccgatttctttcttagtccatttatcatttgtacataggagggatattgatccttagttttatatcctgccacatcactgaaggtctt

SEQ ID NO: 2789 - DNA, 1200 bp, mus musculus
gaaaccacattggtggctttggcatctttctgaactcgggcccctctcctcttgaacctggtgttggtcacctttgagtgcacttggggttcccattctgggagcccacacagggcacacagcacatgggtcttcttttttcgactagctatgcggagtgacctgcgtagcctcaggactgggggcatgcaggctgcagatgcccgctttgagtctggcttcggggtccccaagccaggatggtccttgttctctgcgagggcggtctttctttgggctccagctgcccggatctctaagccagcacaccgaactcgttgtttgagggctttgggtgagatagagatgtgcctcggtggcccagaggcagcctgctgctcggttttagatcgggtacccttcctggaggctggggcactcaaagacctgagctttctcttccctgtgcctggctttctcttccctggattaccgccagcttttcccaagggtgtcttctttgagtaacttggccacactctggtgcctcttaacacatccccttccacttcagagcgcgggaggcctgcagcagtgtgggcctgggcttcccccacaggcactgcaggcacattctgcgagcccatcatcacaggacctggatccgggcggacccgcttcccaggactcctctgggagagcccttggcctttctggttgcgcccctggaggcacaggtgcatgtgcaggtgcagacgcaggcgcaggtgtaggtgcaggcgctggcacaggctcaggggcagaagctggcgcaggcgcaggcgcaggcgctggcctaggctggagctgctggagctggcctgctcttttggaacctttggagccaaggtgctggttcttcggctacctgctcttcctccttgaaagaagctgcttccctcacccagaccatccagggccaccttgagggctctcctggatgccctggtctgccctggcgagcccctgccccgtgactcctttcctgccaaggagttgatgcttatgatttcagacttggctaggggcctcaccttggagctcctcactctcctcttctcacccacaggcagtatttggacctccaggaagggcacccctctcctcttactatgggctggggtcctgggtctggacaacacccttgcaggacacagctggctcttccagccacagagtaca

SEQ ID NO: 2790 - DNA, 1800 bp, mus musculus
attaactccataggtccttactgactctgctagctcttttacttgtttatgcgatattggctcataatatcgctgttgagcatgatcctgaaaaacaggaaaagcctgacatattttttgcaaccctttaggagtgcaaaaagagtgaacattgccaattgctttcttatctgcataaggcggagtatgtgggggagcaatgaaactcctccctattggaacagatctttctgcttcatactccgcagcagcctccttcaaatcttcctcctctcctgttgataattcggaatcctctgagctagacaattctaacgactcagagtccttgagaggagggtaaattgacttaattttctgctttttattattttttatactattttttgtaagtttacattttgggagttgacaattaaagccatgatataagatcaaggcaagaaagatagcaaccccagcaacaattatcggatctatttcgtaggagagcatgcctctcacattaatttctttctacttaccggtaccaccgttcctcagctgaagagttctgaatccactccagatccttctcagcagtctgttttgcaggaaacttcattaccaccgttccccagctgaagagttctgaatccacgccggatccttctcagcagtctgttttgtgggaaactttattaactgctccttccccgagatgcagttctgaatcctccctgtagcagggggtcttcgctcgtgcctgaagatgtttcttgtcccgggttttcggcaccacttcttgcgcgcgctcaactggccaggaagaacaacactgcaacaggatccttctgcacacgtttattgggagagcttgattgtagaggcgaaaagaccccgagcccagaactggtactgctttgataggcctacgagaggcgtgtctcacacccggattggttatgcactacgcctcatttgcatgttcctcatctgattggctactctctctgtacctcacagagcctcattatcatacctcatttgcatgtctcacatctgattggctactctctctctctgtacctcacagagcctcattatcatacctcatttgcatgtctcacatctgattggttatactctcaaagcctcattatcatgcccggcccaggcagtgtctttgcaaaaaactttactgcatatgtacacattggttgtttgtccaaacttatgcgtggtgaccagcagtagtcagtgccactctgcaacggcacatgtggcttcccacataattacaaaatgtaagccagaccaacacacatatttcattagtgaagagtccctcatcatacatcatcctttcatgtgcttgtttagcagaacatcctttcacctgtgtctgcttcagtaaaatgttctttcatttgtttgccttagacaaacaccatgcaacacaactgactgtccaaagaacccataagtttccatttcagagaggtacacacatttccttcagggttagctctcagttttagcagaaaggaaaaacttgtttgaataaaaggtacctagaaggtgtcaggagctataggttttgtagggagtttaatcagaaagggcagcttccctttgcctgggcaaggaatggagccacctgtggcttcaggcagctgtgacagaacatgaacaggcaagttctctctatatcatggagacttcaggcacaatcagcagacgccctcccacccaggaaggcaaggacaattccagcagcaaaaggacagtgacaagactgctattcctggatccactaag

SEQ ID NO: 2791 - DNA, 1000 bp, mus musculus
agcaagtaggcacactctggccagctcggccctggagctttaacttgatgaccaactgccacccatgcctggcctgggggattggcccaccctgtggtttccagccactcacttcagctgtcaaatttggtgcccctgccccaggccaagtcacatttttgggggggagactcagggcacatccctgttggtcccaggactgtgtgtgcacttgagctttcttgacaggacctttctcctccctgtccatgccttttggccgtgttctggcattgcctgtttggcagaaggggacttagcagcctctagtggaggagggggccacataccacttcacccccacaccctggaaagtagaccaagagaggatgggtgacacatgtagggtggtggaagtgtgccaccagggccctgagcagagtcttgtgagccagagagcagggagactctgtctcaagcctgtagcctgtggaggtgggaggtgtgttcctctgcaacaacctgctggctgagatgtcagggtgtgtgcgttgggggggggggtgggtgggaggagaataacttttaaaatggcaatctgattttggggctatctagccccggtggggtggacattagttggaaatgtgtggaattcctgactccttggctgagtcatgaattaggctggttggctgatttagccataagattaattggcattttctccactttggactgggagagaagtagtaaagaggttaaaaggcatttcttgtgaatttttttcctggggtcctggagagtataggactgctgggggtagggagtggtataaaagaggcatggggaaccatgacctggcatggaggtttgtctagccttgtattggagtggtgcagagaatgctgttgtgccactggggactggggtgaggaatcagatggggctgaaggcccacttggcttctggtgagttgcattataggggatttatagagggcccatatttttccaatatg

SEQ ID NO: 2792 - DNA, 1000 bp, mus musculus
ctgagagaagtgggcctatttagatggacaatggaggtacctctgaacacagacccacatgttgctgtgctgtccatgtctgcatgtctaacctgactggctctgttttgtcatcttatacgagaagtacttttttctaaatcacctagctaggctggccaagaccagttcagagacaagagggcatctctcctgtgtaccctcacacccaggtcctccaagccattcagtgttcctctcccaaaccagcctgtcttccatgcctacaacccaacactactgtgttcctgcaagtaggccagccttccctctgcccctgctcccacctgatgcccaatggaaaaaactaggggacacagcatgtgagccacccgcaccccaacacctaccccacttctcctccatgtttctctaaactacatacactaacctttggacccaccttccactctcacctcattcccaaggtaaaagctagaagaaaccaacctctggaccacccgaacctcagcacctaacaccgtcctcccctccatgttccttcaactaggcccagctcagcctcggaccccactaacacctccatccccttcccatgaccacaaggaaaagccagagaagcaagcctatgggtttctcaaactaaagctttaataagaacacaagtgggagaagcaaggggtgatgctggccagctaggcagggcccatctgtgggaaaggttgggtgggaaggactcactgatgatgtgcaatgcatagatggggctggcagatgggccagtcagcaagccagagctgggcagtggtggtggaggcagcagcagtggctgcgggggcagcaggagcagcagcagcagcagcagcagcaagtagctagtagctagagatgaggatgatgatgaaaactaagaaggccactgtgagctgggccacctgggagatggtgatgaactggaacagacttacatttgcataagctttagagttgttggtttcct

SEQ ID NO: 2793 - DNA, 1400 bp, mus musculus
tgtttcctgctaaaggttggcactcatggaacaaggaactatcattctctcttaggatgtagaagagtagtaagcagccatgcctactgagggacaaggggcacaggcttgctcattctcttccccacccccacccccattttcctaaaaattagcaattgcagaggcacattccaattaccaagtaaaacttgagttgagctcagtgtcagaactcttgttgccaacttgtcattcctgatgatcagggttttttttctttttgtctgttgtctgttttgtcctgagaatgggctccacacagcacaggctggcctcagaatcagcatgtagccaagtaccactttgaactcctgatcttgctgcatctactgatagagtacatagacccataaaccccgcccaccaccacgtggtaccaccaccctggatcaatccactatcccacatttcacaacaccaagctctgtccacactggaccatctccaccatccttctgtgctctcctattgcccgagatgtactttacccagaagtgtctccttagtgccctccagaaacaccccctaagaccaacagacatacacagacacaatgacatgccataaacctagatctgctattgactggacagaacctgacacaaatgtaggcatctttctcctggacctttctggctgtgggtccagattatccatctcgtccttacatagtagcctgcactgtcctagcacatggatcttgcttgtcttccctcgcatgtcatcaactaccctgggcccagagcacactgagagtggccatagggacaaattcccttgtacctatcctgctgaatgtcctttctgatccagttctgactgtgtgtgctctttcaagctcacttgcgcatgtacatatacctgtgcgtgtatgtgtgcgtgttatggatttatgggaaacagttcgagcaaggcaacttggtcgaagtaccatcagggtcttgaacccagaccaggcctggtttcataggcagtctgaacattgctgtcacgctaagctttctgaagccttggggttgcatgacccagaccaggcctggtttcataggcagtctgaacattgctgtcacgctaagctttctgaagccttggggttgcatgacccttgtgagtgagccagtttacggagaatgggtggtgtggggtccatttcagcaatccagctgcagatcatcagaggttcctgaggtctatgggaagtaccagtttggccagagccaattctcacttggtcctgttttcacaagctctgttggcctcacctcttgtggtgcactgtggaaaacagagtgggatttggagcaggcacctcaggctttcctagaacctgcagggggcagtggagtcggtggtgactg

SEQ ID NO: 2794 - DNA, 1000 bp, mus musculus
aaccagaccagcattcctcgatcaatggtgctgggctcctggcagaaaccacgttggtagctttggcatctttttgaactcggggccctctcctcttgaatctggtgttggtcacctttgagtgcacttggggttcccattctgggagcccacacagggcacacagcacatgggtcttctttttcctactagctatgcagagtgacctgcatagcctcaggactggaggcacgcaggctgcagatgccccctttgagtctggcttcggggtccccgggccaggatggtccttgttctctgggagggcggtcttcctttgggctccagttgcccggatctctaagccagaacactgaactcgttgtttgagagctttaggtgagatagagatgtgcctcagtggcccagaggcagcctgctgttcatttttagcccgggtagcctccctggagcctggggcactcaaagacatgagctttctcttccctgtgcctggctttctcttccctaaattaccgccagcttttcccaagggtgtcttcttcgagtaacttggccacactctggtgcctcttaacacatccccttgcatttcagagcactggaggcctacagcagtgtgggcctgggctttccccaatcgcactgaaggcacattctctgagcctatcatcacaggacctgaatcccggcggacctgcttcccaggactcctctgggagagcccttggcctttctggttgcacccctggaggcacaggtgcaggtgcaggtgcaggtggaggtgcaggtgcaggcgtaggcgcaggcgcaggcccaggcgcaggtgtaggtgcaggcgctggcacaggctcaggggcagaagctggcgcaggcgcaggcgcaggcgctggcctaggctggagctgctggagctggcctgctgttttggaccgtttggagccatggtgctggttcttcggtcacctgctcttcctccttgaaatgagctgcttccctc

SEQ ID NO: 2795 - DNA, 1200 bp, mus musculus
aaccctgaaggaaatgtgtgtacctctctgaaatggaaacttatgggttctttggacagtcagttgtgttgcatggtgtttgtctaaggcaaacaaatgaaagaacattttactgaagcagacacaggtgaaaggatgttctgctaaacaagcacatgaaaggatgatgtatgatgagggactcttcactaatgaaatatgtgtgttggtctggcttacattttgtaattatgtgggaagccacatgtgccgttgcagagtggcactgactactgctggtcaccacgcataagtttggacaaacaaccaatgtgtacatatgcagtaaagttttttgcaaagacactgcctgggccgggcatgataatgaggctttgagagtataaccaatcagatgtgagacatgcaaatgaggtatgataatgaggctctgtgaggtacagagagagagagtagccaatcagatgtgagacatgcaaatgaggtatgataatgaggctctgtgaggtacagagagagtagccaatcagatgaggaacatgcaaatgaggcgtagtgcataaccaatccgggtgtgagacacgcctctcgtaggcctatcaaagcagtaccagttctgggctcggggtcttttcgcctctacaatcaagctctcccaataaacgtgtgcagaaggatcctgttgcagtgttgttcttcctggccagttgagcgcgcgcaagaagtggtgccgaaaacccgggacaagaaacatcttcaggcacgagcgaagaccccctgctacagggaggattcagaactgcatctcggggaaggagcagttaataaagtttcccacaaaacagactgctgagaaggatccggcgtggattcagaactcttcagctggggaacggtggtaatgaagtttcctgcaaaacagactgctgagaaggatctggagtggattcagaactcttcagctgaggaacggtggtaccggtaagtagaaagaaattaatgtgagaggcatgctctcctacgaaatagatccgataattgttgctggggttgctatctttcttgccttgatcttatatcatggctttaattgtcaactcccaaaatgtaaacttacaaaaaatagtataaaaaataataaaaagcagaaaattaagtcaatttaccctcctctcaaggactctgagtcgttagaattgt

SEQ ID NO: 2796 - DNA, 1400 bp, mus musculus
agattctggagggagagcagcgccacaggcaggagagcagagccagagaggaccggcgggcagtcacaacagtgcccagaacaaccaaaggagtcaccctgtcctgatcagcacagccccagagttcagtcaccatggactcgtcagaatatgtactctgtggctggaagagccagctgtgtcctgcaagggtgttgtccagacccaggaccccagcccatagtaaaaggagaggggtgcccttcctggaggtccaaatactgcctgtgggtgagaagaggagagtgaggagctccaaggtgaggcccctagccaagtctgaaatcataagcatcaactccttggcaggaaaggagtcacggggcaggggctcgccagggcagaccagggcatccaggagagccctcaaggtggccctggatggtctgggtgagggaagcagcttctttcaaggaggaagagcaggtagccgaagaaccagcaccttggctccaaaggttccaaaagagcaggccagctccagcagctccagcctaggtcagcgcctgtgcctgcgcctgcgccagcttctgcccctgagcctgtgccagcgactgcacctacacctgcgcctgcgtctgcacctgcacatgcacctgtgcctccaggggcgcaaccagaaaggccaagggctctcccagaggagtcctgggaagcgggtccgcccggatccaggtcctgtgatgatgggctcgcagaatgtgcctgcagtgcctgtggggaaagcccaggcccacactgctgtaggcctcccgcgctctgaaatggaaggggatgtgttaagaggcaccagagtgtggccaagttactcaaagaagacacccttgggaaaagctggcggtaatccagggaagagaaagccaggcacagggaagagaaagctcaggtctttgagtgccccagcctccagaaagggtacccgatttaaaaccgagcagcaggctgcctctgggccaccgaggcacatctctatctcacccaaagccctcaaacaacgagttcggtgtgctggcttagagatccgggcagctggagcccaaagaaagaccgccctcgcagagaacaaggaccatcctggcttggggaccccgaagccagactcaaagcgggcatctgcagcctgcatgcccccagtcctgaggctacgcaggtcactccgcatagctagtcgaaaaaagaagacccatgtgctgtgtgccctgtgtgggctcccagaatgggaaccccaagtgcactcaaaggtgaccaacaccaggttcaagaggagaggggcccgagttcagaaagatgccaaagccaccaatgtggtttctgcccaggagcccagcaccattgagcaaggaacgctggtttggttcaaa

SEQ ID NO: 2797 - DNA, 1000 bp, mus musculus
ttttctctctcttgctttctttttctctctctttctttcttgttcttgttctgtttctcgctctctcgctctcttgctctcttgttcttgttctttttcttgttctttttctctctcttgcactcttgctcctgaagatgtaagcaataaagcttttgccgcagaagattccgctttgctgcgttcttcctggccggtagcgagaacgcgtgtaagacacttccataagcagtatctgagcaggatagttattctgaagtggaagggggaaaccctgggcactttgcacaaacacatgggcaacgacagggcccaagctgggaatgggtacctgattggcaggcctcacacctttgggagtacctgtaggcagcctcaggcatgtctgcacagtagtgtttccactaatcagagacctactccagaatgtggggcctctatctgaggggcgggggaaggagcctctcagaggaatgtattgaagtgtggtcacctgggtgagtgacagggaattagcagagtcagtcttgagcctctgatggtgagaaagctcagtcagcctggtgtatcgggccttttggggagcaaagtggggttttgaggcagaagagaccaggtttagctgtgatgagatgtttggaagactttgcacctggtagtgaaatagaccagtgagaccaatggatgaaaagggttccaggagggttgcaggtttaaagagtgttggctgggacagtgacgtggagaaaaataagtagtgactctcccctgtcctctgtgggtcctcagtggacacatctgggtcctgcttctttgcagccatgggacttgcctccctcaacacaaatgcctgtgtttttgtatgtttttctcagtgtcaagatttggtcaagatctagaatattggtgggccataggaggtactcctaaaatctgtgttgaatgttgaaggggatgggccaggactggtccccttcaccaaaggactgcatctccatcc

SEQ ID NO: 2798 - DNA, 1000 bp, mus musculus
tctagattgtatgtcatttatataatgcacatgtacaaatgtgtgtgagagagagagacagacagacagacagacagacagagagaagtgggcctatttagatggacaatggaggtacctctgaacacagacccacatgttgctgtgctgtccatgtctgcatgtctaacctgactggctctgttttgtcatcttatacgagaagtacttctttctgaaccacctagctaggctggccaagaccagttcagagacaagagggcatctctcctgtgtaccctcacacccaggtcctccaagccattcagtgttcctctcccaaaccagcctgtcttccaagcctacaacccaacactactgtgttcctgcaagtaggccagccttccctctgcccctgctcccacctgatgcccaatggaaaaaaactaggggacacagcatgtgagccacccgcaccccagcacctaccccacttcccctccatgtttctctaactacatccactaacctttggacccaccttccactctcacctcattcccaaggtaaaagctagaagaaaccaacctctggaccacccgaacctcagcacctaacaccgtcctcccctccatgttccttcaactaggcccagctcagcctcggaccccactaacaccaccatccccttcccatgaccacaaggaaaagccagagaagcaagcctatgggtttctcaaactaaagctttaataagaacacaagtgggagaagcaaggggtgatgctggccagctaggcagggcccatctgtgggaaaggttgggtgggaaggactcactgatgatgtgcaatgcatagatggggctggcagatgggccagtcagcaagccagagctgggcagtggtggtggaggcagcagcagcggcagcagcagcaagtagctagtagctagagatgaggatgatgatgaaaactaagaaggccactgtgagctgggccacctgggagatggtgatga

SEQ ID NO: 2799 - DNA, 1000 bp, mus musculus
atattaatttaaattaagggagtagtgaccttggggcaagatcccaacctgcaaagtttagatcaaggcatggtagtacaagcctttaatctcaggaggcaaagaaaagcagatctctgagctcaaggccagcctagaaccgagcaagttctaggtgaagaaaagcttaagtccaggcttggtggaccatacctttaaacaacccagtgtttaggagataggcatgcagatctctgagttcaacgtcagtttacagagcaagtttcagaacagccaagcttaggaagtaaaggagttggaaaactgaaagctggtgatactgtaataaaacaagagggggaggggtggcatgttccagctcctgcaagcagcagaacttggcagcttcagccatgtggctctggctttagagtcaagaatagaagggactactgggacaattgatgctggttagctggagctaagtaattagtagtgattaagaagagatcagcatcactgaggtgacatcttctaggaagtgttttctaagagcacaaagaagcaatgttccagaggtagccaaggttgtaccttatgttgcagctgtacttggtaatgtttaagagccacccaggtggtactggttttgaaggtatgaaggggtcctggagagtagcatgacccctgtgagaggccatggaaggccattggtgaaggtgcagcctcagttgtagttgacaccccaggactgaaggggcaatgcaaagaagttgaggcttggcaccatgaaagagcctatgagaggctattggtgaaacctagttgtagtggaagaccccagtgtattggagatgcaccaagaacagcagaagcagtgaagtggatcaacctgagcttcgaggacagagcttgagaagttatgccagccctttggaggagcccagaagatcatatgtggatcccagacattgtaacaagaagctgcaatattgaagttgccttggagacccaaaggtat

SEQ ID NO: 2800 - DNA, 1600 bp, mus musculus
gggtggagaggagtagcctgttgtgaatggccagacctgtcacctggggtcgtggtgaagtcccatcccaagctgctggtgagggccatgtctgagtctgtggctgtgcaatggcagtggtcagtgtctgtggctcatattactactagagaacataggggactccctggttagggcagctgctggggaccacatggatgtccaggactgtgcatagctggccatgtcccctcactggatgtagtgctctggagacctggccccatatttcatcactgtcagcactcgggagagtgggccctgcacctcacctggacagcacagcagaggtgaccctgatggttgagacttaggtgaaccagctctgagggtgaaagtgtgggagaactggctcctgctgttaggtggcatgggtgtgggggtgatgccctccccacctcatcccttataggctgctgccatcaggagaactgaccctgaggtcatgggtaagctggccctatccctcccatactgcagcacttaatggcagataagggagagtcagtatgctaatcagctggtgtgctgcccttcataggccttgcatctcatctaggcagcacactagagcatgccctagtgaagggggtacaggtgagctgaccccgaggtttagaacataggacagctggctctgtcatttatctggaatgaggtgaagttagtgaggggatggtgcccttcccctccccaccttgccaccagagagctggccctggggtcttgagagtgggagagatagccctgcccccccttattagctgtagcactcaggagaatgggccttacacctggcctgggcaacacagtggagctagccctgatggcaaaggcatgggtgagccagcctagagggtgtgagagctggcccagccctttatgggctgcagcacttgggaatagttggcccctgagccaaggctcaaggcagctggctctagaggtttgagtacagtgagccagctctgaaggcttggtactgggagagttgaccctgcctcctgcagagggtggtagtgggtggcagagcagtgctggagaactcatcctggtggtgcagataagggaaagcaggtgtcctaaccagctaagctgccacccaggctcagatccagggttctaaattggcccaccccaaaatctatattgtctgccagtggttggggtgagtaaaagagctggccagtcctactgagccagtgctgcaggatctccatgacaaagggcagcaatggtatgacccagagaagtcccgatgaagatcaatattgatggtgtcacagaaaccagaggctctcaggccagactgatgactcatttcaaagtgaagatgtgttgatagaggaatatattgtgggacacactgtgacatacactgtgacatattacagcttccacgatgagatgttttttatgcctttttgtttatttatgtatattttattttggggaggaagttgcaagggcaaaggtggatatgaagggatggggagataagtgggactagggtgcatgatgtgaaactcataaggagtcaaaaaaattcctggtaaatgaa

SEQ ID NO: 2801 - DNA, 1400 bp, mus musculus
atttaacaggaagagggtcacggacaggttttctttatgtttgaattttgtagagtttttctataaaggctaaagtgctgatagcaatgtgactcagccgttgaggacagggaggaagatccacagtattcatgtagcatagcaagtcaggcatcttgtttatacctgtaaccccagctgcacatgaggcacagatgaagattactggggcttgccggtttccagcctagctgtgaaaaatgcaaaaatgcaagtcccccctccccgggtttaaggagagaccctgtctcaaagggatcagtggaaaatgatagaggaggactcctgacgcccctcccccctcccctctctctctgtctctctctctgtttctgtctctctctgtctctgtctgtctctctgtctctctgtctctgtctctgtctctgtctctctctctctctctctctctctctctctctctctctctcacacacacacacacacacactatagcttggtttccatggtggggcctgtggctctgggtgggacacagtgggcagctttgcctcctggggcacgtgttccttaaactcggcctgttcctaggctcctctgcctacccctctgttctccctgcctctggtcctccctcttgacccttgggctgcctcaaggccttttggctgacccccagaccccttagcctgccattcatcctgcccctaggctcctcggcctggctctctgcccctcagcctacctctaggctttaggttagtttggcctgccttggttaccaattttcctgcctcttgtccccattgcctacctctttgcctctaggcctcccccttggcttacccttaggcactccttttggctcattgacctgcctctcaatccctctggctgtctctctgcctctaggcctctcggtcagccctagggctcccaccctggctctctgcccctctgcctgcctctaggcccaggcccctttccatgcctcagccagcccctcagtctgcccttaggcctgactcttggccccttggtctgctcctctgtccctaggtccctcagcccctagcctccttgccctgcttctatgcccctccacccctgggcctgcctttctgtctgtctctaggcccatcagcctgcctctctgccctttggcccctagcccagaccttcctggtctacaaagcaagttctaggacagtgagagctgcaaagaaaaaaatctgacttgaaaaaccaaagagggaaaggtagctgtccttgaatcccatcattgtgagttcaagtccagcctggttagacttgatttaatcaaagtatttgcatatttgctcataataaagtatttgctttatttgttcataatatacttacatagtgcatattcaaca

SEQ ID NO: 2802 - DNA, 1000 bp, mus musculus
tggtgtttgaatctgcctcctggaagaagttgtgttctcctcaccagaggtcctaagatcctgtggagtgtactctggggacctttgggggtgtccgcagactccatgccctaggtgccccagtgctggtgctggcgccgaccggaagggacttgtgaccctggtcaggctgggttttctgcttccctaattaatgctgtctcaggtcctgcatgattggattggagcagaaattgtgttccactcaccagaggtcctaagatcccatggagagtcctgtggggaccttgtgtgtgtccgcagactccgtgcccaaggtgtgtcagtgctggcgctgaccagaagggctgtaccccatttttaataaggttatttgactctctggagtttaacttctttaattctttgtaaatttttgttattagcactctatagtatgtaaggttggtgaagatcttttgccaacctgttggttcccgttttgtcattttaacagtgtcctttgcctttcagaagcttttcaattttataaagttccattttcaattgttgatcttagagcctgagccattagtgttctgttccggaaattttctcctgtgcagatgtgttggagatgtgtcttaatttctcttctattagattcagtgtatctggttttatgtggaggtccttgatcgacttggacttgatctgtgatcctgcatcttttgtttttagatagacaggatctgtctgtataccacaggctgccccttattttccttttgtcttttctgccctgtagtgtcagaatttgttactgtaagtcaccaaaccaggaagttggtgctttgtgttaccttttcctgctatgaaatgtgttgtgtgctgttcctggagcacaaataatatacagtatttttgacaggctacatggatacatttgagaaaaacgttttctgtaaaaaaactatttcaatttcataccaatttaattactgtagtactcaaatactca

SEQ ID NO: 2803 - DNA, 1000 bp, mus musculus
acaacccaaaaccaacaaggcatgtcataaataagtgcccagaggcaatacattcccattgtcatatctgtagcatgtccccctgtgcatatgctacatacccctcatccctcccttttagtaaatctcctgtatgagacttggcagaacctgccacctagatccttcagagagtttgtgaacaaatgtctaattatatatcagcactgcttttccttccatttcctgtgaaactgacagggatttgttactagaaacttaatagaaaatacaaatacttgcctctgtcttttctaagaagaccaaatgttaaaaactgtgtagttaagaaaagtgactcaaaaattctgatatttccatagctaccaaactgaatgggatattatgagcaaagaaccagtatcaagacataaagggccagagtatttaatgtccctttggtttatgaaatatccctcccattctggtcccgccagcaccggtgtagctaggtcactgagttagctgacaccctcaaagctacgcacaagacctgccacgggatcttaagacctctggtgagtggaacacagctgctgctccaatccaatcgcgcaggacctgagactgcattaattagggaagcagaaaacccggcatgatcaggggcacaagtcccttcctgtccacgccagcacaggggtaccttgggcatggagtctgcggacacctgtaaggtatacacaggaccatccacaggattttaagacctctgtgagtggatcacaacttctgacaagaggcaggtttgaaaaccagttatctggacactttccctgcaagaggagagcctacctgcagagagtactctgagcactgaaaatcaggagagagctagtctcccaggtctgctgatagaggttaacataaacacctgaggaacaagatctaaccagagacaactacaacaactaactccagaaattaccagatggcgaaaggcaattgtaagaatcttact

SEQ ID NO: 2804 - DNA, 1000 bp, mus musculus
aattacataaggaaaatactacagctgataaacattttcagaaaataatggggtacacaattaactaacaaaagtcagtatcccttgttgtatgccagcccgcggcctacattaactgggtacacctgggaggcaggctggggctgaaagagacttagacggtgagagaagataatggagaccaagacacatttctgttcaagccccgcaagtttactaagagaccttgcttataagggggaaggccccccccccccctccagtccactcttggtcactggagccattctgtcagcattcggtcgccaggctggttgctattcaggaatgtctcaggaagacaggttcaacctctcggcaggtagcagaagaacagagcagttgtcacttcgaaaaggagccagccaagtcagaaagctgcaccatgcaggtggccccacttcagtggcgacaaggtttgtaccagcctgcttcaggctggggggggggtacaatccctcctatattatacaaatgacaaatagtctgagaaacaaatccaggaaacaatacctttcacaatagcaaaaataatgtaaaatatcttggggggtatctctagccaagcaagttaaccaagaaagacttaataagttccagtggttatggacctgctaatggttgatatgaatgaaaaacagaccagattggagggatttgaaaaggaccaagactgagacaaatttaactcaaccagtcagaattttgtacacttatcagatatagaatacaatgccagcatacaatggcatttgcaagttttatagtgtatatgaggttagtgcctaagtctaattgtctagccagtcttttctaagccttcctaattttgaaaggacacaaagatacaaacatgtcctgaaacagataatgcctctgtttctcaggaactgaaaagcatacagtgtcccaggagccataaactctagcctgaagaacttatgacatatgcctctcaagg

SEQ ID NO: 2805 - DNA, 1200 bp, mus musculus
ataaagtccacagaactcaaaaagctcaacaagctgaagtgcccaagtgaggacacctcagtcccacttggaagagtaaagaaagcaatcaccagcagatagtgaagaagggacctgggagggaaagtggatgagttggggcagggaactgggggaggggggagaaaaacctgatctggtattgggtgagggaaaaggattgaagctccgagggccagcagacaggaagtaaagaggcaacttcaggaaataggaggttgggacaaccatccagaatgcaccatagacctgggaagtgagagactcacatgactctaatagagagtccttaggggaaaagctggacagtagggagagggaacttatagagcccacctccagaaggaagacaggacatcaagtgagggatggggtagccattacaccgtcacaattctgacgcatatttcttactgtctgaaagaattacaaggatggaaatgaagaggagcctgaggaaaagaaggtccagctacaggcccaaagtgggatccagctcaaggggaggctcaaaggcctgacactattactgaggttatggagtgctcacaaaaaaggatatatcacgactgccctccaaattactcaacaagcagctgaaagagtcaggtgcagatatttgcacccaaccaatggacagaagcagctaacccctgttgatgaattaggaaaggctgaaagaagctgaggataagggcgatcctgtaggaggaccagcagtctcaattgatctggacctccggtatctcttaaacactggaccaccaaacagacagcatacaccaggtcatatgaggccaccaacacacatacagtagaggacatccgggtctgtgttcattcagagatgattcaacaatccctgaaaagactggagtccccaaggggtttagaggtcaggtagggtaggggctgggggcatccacatggagactggagaagaggtgtgggatacggagcagactgaggctggatgggggcagggtatggcatatggagtgtaaaaataaatttaaaataaaataatattttcaaaaagaaatgatacacaattcaaacagaaataaaataaaacaaaaatcaaataaatgtataattagtagacaacaagggaagaagtttcaaattttttgagtatttgatgttaaggaagtattgttg

SEQ ID NO: 2806 - DNA, 3000 bp, mus musculus
tgcagatagaaactggaaggatactgtcccaggctattccttggttcatgtgtcccatggctttgggtggttccctcttgggaattagaggagaagtgctggtcttccctgtgttcacaggtgtgtcagcactcctgggagaccagttctttccaggtggcatttcagtatggagagctgtggcacaggatcagctccctgtgcagatggaaaccagaccaggaggatcctgtcccaggctgcttctcaattccagtgtcctgagtgctccaggaagatccctttaagcagaagtgggacaggatctttccagtttctatctgtgctcacagttgtgtctccacttctgggaggccagctctatcccaacagaatttgggtatggagctttgtgacataggatcaactcagggcacagaaggaaactggaagcatcctgtcccagttcctccttatcagcacctaaatgagcatcctcactgtatctgactggagtctatcctttctgtgatcctggttgtgtcagaacttctcagagtctctgtgatactatgatttctggatcctgttatcctgagatcctggttctgtcagagttcctcagagtcaagctgcctctgggaccctgatatcctagtgtgaacaagcccctgggatcctgttatcctgccatcctgccatcctgccatcctggccttgttagagggcctgggagtggagcttcctctgggtgttttgagactggctacagagattgcatccaaggtaaaccagcaccgaactggagccacttgttgggtgggttcctgagtccctggatcccgctggtcccagttactccccttggttttggaacagatgttgtgccctcctcacctctgatcctatgatcctgggcatattagagcacctgggaatggggcctcctttgggtgttgtggaactggctgcagagtttgtgtctctgaaaatggtttgtaaacaataaaagtggagtacatggagaagaaaggcttggatgagatgtctcctattacaaaaatttggaaaacgaaacctctacttaaaagattaaaagaaaaagcaaggaaatatgtggaaaaccttgacaggtattttgacaaaagcattgtggatattcattacaacaatgtgtaccacagtttgggaaattgcagtggtggagagctgtaattatcacatgggaaataggcctgctttaattttcatgaattcagataaagataaaggatgatgtaagtcatctatgatttctaacactacatctactctgtgccttgattacttaccctcagcagcagaaaaaaaatccagaactcataaaactaattgggaaatattttatttaatgaaaatccataagccaattgaactactgaagctaccacaaggcaggaaataataggatggccacttgtcatcattgggcatggttttgaatctggaaattttaagtatgtatctgaagaaggcctgcgataactcctggtaattttagattttcaagtctttaagttgcaaatttacttttaaatagtatagcgcactcgggaacgtgggggaagagtgaaagaaaggggaattattccacccactagaaataagaaacaggatagagttgccattgccagtgcagtgccaattttttgatgatctgggaaggagggtgtgtggaaagacggggggaaggcaatcccatccttgcgaatgatcgataagtaattgtacaagatggaaagaaagacaaagctgctagcaatgatgttcagaattcctggaagacggaatggattgaaggtagctttcttccggagtctccctgagttcaatttccaaagagcaatgatgacagagattgtggcaataatgccaagaaagcttgcgatgagtagcagatgttgggcaactcgaatatccagagggatgaagtcatcctggtaggtgtatttgtaacacatccggttaaaggtggaattgctttcctggtggtaaatgcaggttttccacatgcctactaaggtcatgccatgcttggaatccatgggatcttgaaagaaccatactcgccattgagggaggcccatagagacaatacaaaggaaccatgctatggcgcctgcagcaaaacctcctatctgccatttggcatgctttctggccattatcacggtgacagtaatctcttggaaactgcaaagaaacacaggatgaatgagaaacataagattggactctttaggcctaggagaatgtcctctatgggttcaataccacaagataaggggtatgttgaggaagtgggcctctgaccaggaaatctcttgcagggactgtgttttgatcaaacccagagaaggaccaactctgtggcatcatttacttgcatattgataatccacagatgatataagattttatttttccactctttacagaatcccaataaactttggcactggatatttagtcaccaaaatattcatcagagcatgaaatttcatactgaaaatagtaagccacttcaagcacaacaactgggtaatttatgcaatacataccatggagttatatgccaaccttcaagagaggaataccatatattaacactgtggtattttgagcatggcacatttcacttggatgctttttttaaatgttgtatggctctacactcctgactgaaccagaactatgccctcatccccatttggctttcatctagaggccatcctgctgcctctgtttcccaaatgctgctttcctggtagtaaacgaaggctctccacatgcctactaaggtcatgccaggcttgaacagcataaaattatcaacaccatgtcttcaaagtctattaatgctatagcaagcctaaagtgtttctcctcttttatattgactagttttgcaaagtgttgatgaactgtgctttctctgcttcatgatcaagttttgatatctggattaatacccacctttac

SEQ ID NO: 2807 - DNA, 1600 bp, mus musculus
agggatccatcccataatcagcttccaaatgctgacagcattgcatacactagcaagattttgctgaaaggacccagatatagctctctcttgtgagactatgccggggcctagcaaacacagaagtggatgatcacagtcagctgttggatgggtcacagggcccccaatggaggagctagagaaattactcaaggagctaaagggaactgcaaccctataggtagaacaacaatatgaactaaccagtacccgggagctcttgtctttagctgcatatgtatcaaaagatggcctagtcggccatcactgcaaagagaggcccattggacttgcaaactttatatgccccagtacaggggaatgccagggccaaaaagggggagtgggtgggtaggggattgggggggcgggtatgggggacctttgggatagcattgaaaatgtaaatgaggaaaatacctaattaaaaaaaaaaagaaaaaaaaagaaaatcagaccggcacactgtagaacatagcgtgaaatgcacattgtaaaacatagtatatgagtgagttgcaccgaaacatatagaaaatttgaaattcccagtatagaacacagtatatgagtgagtttcactgaacaacctagaaaataaggcctgcacactgtagaaaatagtgtgaaatgcccattgtaaaacacagtatgttaatgagttgcactgaaaaacagaaaatggaaaatgcagagtgtagaagccaatatatgagtgagttgcaatgaaacaccttgaaaatgagaccgccacactgtagaacatagtgtgaaatgcacattgtaaaacacagtatgttaatgagttgcactgaaaaacagaaaatgggaaatgcacagtgtagaacccaatatatgagtgagttgcactgaaacacctagaaaatcagaccggcacattgtagaacatagtgtgaaatgcacattgtaaaacacaggatgttaatgagttgcactgaaaaacatagaaaatgggaaatgcacagtgtagaacattgtatatgagtgctttgcactgaacaacctagaaaaaaaagaaatgtaaataaagaaaataaataaagcaaatatccaataaaataaagaacaaaagactcattcaaataccggaccaagaatctgaacagagagttttcaaatgaagaaaaatagtggtcacataatatctcaaaaactgttcactattcctagcaactggggaaatgcaaatcaaaacagctttgatactcacctttattacagtgaaaatgccaaagatcaacaaaactgacaaccactgctgaatgtgaggtgaatgtatggggaatatgagaaaaagaaagtcctcattcatacttgctaagattgtatatctgtgaagcaactatcaaaattaattaggagaactctcataaaactaaatctaccatgtgacccagctatacctctccttgatatgtgctcaaaggacaagataccttactccacagattccattgattctagcaaagagaaagcctacagaatgggcaaaaatatttaccaattatacatgagattgtgagttattatctagaat

SEQ ID NO: 2808 - DNA, 1000 bp, mus musculus
accattcatatctcaaactgaggaagaggggtttttgtttttgttttggttttggtttggttttaaattaatttattttttacactttatattccattccctgcgcccccccccatccacactccaactgctccatattccatacctcctccccaccccctgtctccacatggatgcccccatttaccaccccacctgacctctaaatgccctggggccttcagtctcctgagggttaggtgcatcatctctgaatgaacacaggacctcatatcagctggtgtatactgtctttttggtggtccagtatttgagagatctctggggtccagattgagactgttggtcctcctacaggatcgcccttctcctcagcatctttcatccttccctaattcaacaactggggtcagctgcttctgtccattggttgggtgcaaatatctgcatctgactcagtcagctgcttgttgggtcttttggagggcagtcatgataggtctgttttttgtgaatggtccatagcctcagtaatagtgtcagaccttggggcctccccttgagctggatcccactttgggtccgtcgctggatcttcttttcctcagactactctccatttccatccctgtaattctttcagacatgaacaattatgggtgagagatgtgactgtgtggtagaaaccccatccctcacttgatgtcctgtcatcctgctggagttggcctctgtaagttccatttccctactgtcaagcatttcatctaaggtctctccctttgattcctgagaggctcttacctcccaggtctctggtgcattctgcagggtccccacaacctcctatttcctgaggttgcctgtttccattctttctgttggccttcagggcttcagtccatttccctcacccagtaccagatcaggttccccccaccaagtcccctccccaagtccactttccctcccaggtccctccatcccttcccacttgtga

SEQ ID NO: 2809 - DNA, 1200 bp, mus musculus
gttcagaatcagaatttttccagagctgcaaatctgtcacatgcaattggtgcaatgctgctagtaaattggagtcatgatcttcacaaagatgcaggaattacaagcatcaattgttgctgtgaacaacacccatgtggagattgcaacagcaaagcaatggctggagatcatccagggaactgtgggattcttaaaaaaattgggtagggatggccttttgagcactcctactgattgttgtgtgtggagtaatgctttggtggatagcacgtatgcgaaggcggtacagggctgataaatgagccttggggcaggctatggctgccttggaatcaggaacatccccccaatgttggctcaacatgctggatcagtaatcaatgataggtaagaccctcacgcgcacataccaacctaagacaggatggcaaaagtgaattcgtcattcccatgacaggtaaggatgtggcacagatgggggcaacctaagacagatgctgatcccagagctactaataaagctaaaagggggagatgcgggaagcaggtgtggcggcaagggccaagttgtttactgccttgcccgagcatgcacagtgaggctgcatgcatgggctgcctgccaggctggactgttcctcatgatccacacctgtcagcctatctgtgaacgacctgagctcatgcctggagtgtgtgtgaattctgattggatgaggtggggtggagctagaaggaggtcagccggtgtaaagttttgttgtatctgttgggggagtagaagcaaaaaatatccctactgcccatgaaaagcacacaccagttggccaatagtactctctctgtgtctttttttttccattttttattaggtatttaactcatttacatttccaatgctataccaaaagtcccccatatccacccacccccactcccctgcccacccactccccctttttggccctggaattcccctgtactggggcatataaagtttgcgagtcctatgggcctctctttccagtgatggccgactaggccatcttttgatatatatgcagctagagtcaagagctccggggtactggttagctcataatgttgttccacctatagggttgcagatccctttagctccttggctactttctctagctcctccattgggagccctatgatccatccattagctga

SEQ ID NO: 2810 - DNA, 1000 bp, mus musculus
aatacatgatcacatgatacattaagaacatggaaagtgtcttagttagggttttactgctgtgaatagataccatgaccaaggcaagtcatataaaaaccagaatttaattggggctggcttacaggttcagaggttcagttcagtgtcatcaaggtgggaacacagaccattcaggcagacatggtgcaggagatgctgaactttctatatcttcatctgaaggatgctagcataatactcacttccaggcagctaggatgaggatcttaagcttacatccacagtaacacacctacccctacaagatcacacttactccaacagggctacaccctctagtagtgccacgctctgtgcaagcataaacaaaaccatcacagaattaaaagaggaaaaaagttgagggaaaatgccaatgaattaatgcataatcttatgaagttgggagatacagatatggagatgtaaacatcataaatgtttttattaaagtgcttgagagatagtaaatgaattgtaaatggaatatttatacacttatttttgattgaaattattatttttaattaggtatttatttcatttacatgtccaatgctatcccaaaaggccccatccgctcccccacccactcactcccacttcttggccctggcgttcccctgtactgagaaagataaagtttccacgaccagtgggcctctttccactgatggccaactaggccaacttctgatacgtatgcagctagagacatgagttctggggggtactgggtagttcatattgttgttccacctatagggttgcagatccctttagctccttgggtactttctctagatcctccattgggggccctgtgatccatccaatagttgactgtgagcatccacttctgtgtttgctaggcctcagcatagtctcacaagagacagttatatcagggtcctttcagcaaaaccttgctagtgtatgcaatgctgtcagcatttgg

SEQ ID NO: 2811 - DNA, 1000 bp, mus musculus
aggatcaggtcagtgagctgatgatggcctttgtaaggactagtttaccccaaactaaacaaattggagcaagttgactttaccaagaccaagctagaatgaggcaaatcatcaactgtttctgtatttaagattgcttctcacccttcctgtcagcatcagcactgggtcaccttgggcgctgagtaggtggacacccccaaggtccctagaggactctccacgtgatcttaggaccactggtgagtggaacacaacttctcttccattctaatcgtgcgggaactgagaaagcattagggaatcagaaaacccagcctgaccagggtcacaactctcttttggtttacacaagcaccaggtcaccgtgggcgtggagtaagtggacacccccaaggtcacaagaggactctccatgcgatcttaggacctctcatgagtggaacacaacttctattccaatccaatcatgcagtacctgagacagcagtggggaagcagaaaaccaagcctgaccagggtcacaagtcccttctggttggtgccagtgtctggtcaccttgtgcgcagagttgacagacacccccacggtacctagaggactcttcatgggatcttaggaccactgactagacagctccacgctcctcaaaggagacaccactcccaggcactgtaacacgcccaggatctttgacaacaggatcccaggataaaaggagcttggtcacaccagtatttcagtgtctcagaggaaattgactcccacgaactctgacacacccagaatctcaggtttacagaagcgcagaagcaaaggatcacagagaaagctggactctgaggagttcggaatcaactgggattataggaaggacaggctccaataagatatattgaggacagcaaatacttgagataataagatggcaggaggcaagcataaaaacagaagcaacagaaaacaaggttacttggcatcatcagaaccaaactctcc

SEQ ID NO: 2812 - DNA, 1000 bp, mus musculus
ctaagcactggtgctaaaatgatgtcatcatcaggcgccaaccatcatttccagtggagctgagcacaagcagagcagggctacccagagaggcctgagtcctctgctttcagctccattgcaacacttcctctcttccgagggtctcctctgggacagccgggcattggcctctgagtcagctctgcacctctgagaaggtacaggtactgctgagactgtggttgtgttcaagatgccaccatggccgaagcaccttcacaagtgcaacagaactatgacccctgctgtgaggacgccaccaacacccatatccagctgctgctccatgcttcctatgtgtatctggctatggccttctactttgaacctgaccgtggggaatttcaagagattcttcctgagcaagtcatacaactgcaaggccagtgtggagatgtttctgttcctgcagaatacatggtcgccatgttctactgactcgcattgtgagaccagaccgcaagagttggcagggggtcctcagggccatggaatgtgccttccacatggagatgaccatcaaccagagcctgtcaacctgcacgagctggccaaggggaagggtgatgctcacctctgcaacttcctggagcagcactgtctgggcaagcaggccaatgtcctcaagaagatgggcggctacctgaccaacctgcgccagatgggggcaccagagtacggcttggccgagtacctctttgacaagctcagcctgtcctgaagcttcaagtggactgaactgggatgtccccactgccatggggtcttcctctggtcattagacctggagtcagttcatgtacatttgaagcaagttcactcgttttctggctctgtttgcaataaatttgtttgtttcaaagcaaaaccaaagtttagtgactcttcttgcaaaactcattttcagaaatcaaggtccatctattctcaagtttgtgaaatggagggaagtagggct

SEQ ID NO: 2813 - DNA, 1000 bp, mus musculus
agaaaataagtaataggtgtgggtccagcccttaaaaacagcttctacagctaacaagatattgtgtaagaaggaattaggcagaatgtatggcgcagcactgtgaataccattctctggacttgataacaatcattgtaatcaggaacccacaaaactctaggtacctgacccaggcaggctctcagatcagtgttataaacaatcactgaaggaaaagggaaggaggatcatgtgtccttactccttccctctgactgattggctactgagagattctaggaaaggtgaaccactatttttagttgaacccactaaactccagcccttagctccaaatccatgatcacacagatgcccttgttaatctcagtgggtcacaaaacaaaatgaaatgatacaaacataagacagagattcacaggcaggatgtgagttaaaagtgaggaagtgggaagttagagtggtcagtatgcattgtgtacatgtacaaatttgtctaaagataaatttacataataaaaaagtaatttagaaaaacaacttatggagcacctaggagaggcatcttggttcccggatccctcagagactagtctgctcaggtaaaagtgtggtctgcagaggctgacagattctgggacaggttgaggccacacagcttctggggcagaccccgtttcaggctccagacatctggtcaccctctctgccagaggagaggtgtctgccctgccaggaagggctttgcaggagcacctggggggagccatctctggcccgggatctctcagagactagactgtgtaggtgagagtgctaactactgaagctgcgcagcttctgggaaaggcagaagcagcacatcttctgggacaggccctgtttagggccttcatcttctgccagaaggcaaatccgaacaacagatatctgtgcaccatctctgcaagaggagagcttgcctgcagagagtgctctaaccactgaaactcaggag

SEQ ID NO: 2814 - DNA, 1000 bp, mus musculus; identical to SEQ ID NO: 2813

SEQ ID NO: 2815 - DNA, 1400 bp, mus musculus
cttttgtgtcttattgagattttgtttgtttgttttttttttttgatattagatttcttttgaaatatatagagaggacagagaaaggaagaatataaaattagatgggtagggggttgaagggcctgggaggatttgcggggaaagtaaataagctaaaagatattgtatatcttatatgaaaaattataaggaagactatcaaataggctgcctggagactatctcagctctctctgttacctctggctcaatcctacaatcttttccctagtgatgcaatagaagagctctacccacacttccattttgtccacatcacttgtgtatcccacagactgtaccctcatattctctcttcctgaattccttactatgtgccagactccaacaataataggtattccatgtgaacataccagctgagcagaccagtaaaatgggcaacacacagccatcacacgcttcaaaactacaggaagaaaattaaagccagggaacaaagcatccatttacaaaataaaatgagaaataagcaaatctacctataatcatctcaaacccagatgcataaatgcaagtataagaaaacaatagcaagagacatgtgggcaccttccctgctggaggaggggtgtccgccctgcctgggaggactttgcctgagcacctgggggagccatcttggttcctggacacctcagagactagtctgcgcaggtgagagtgtgaattactaatgctaaaaacttctggaacaggcagaagtcatacagcttctggtgcagaccccgtttcgggctccagacacctggacacattccctgctggatgagaggtgtctgccaagcctgggaggactttgacggaacacctggggggaccatcttggttcccggatcgctcagagactagtctctataggtgagagtgccaactacagaagctacatagcttctaggacaggcagaagtgacatagctctgggacaggccctgtttcaggccttcatcttccaccagaaggcagaaacaccagatacctgtacaccttccctgtaagaggagagcttgcctgcaaacagtattctgaccaatgaacctcaggagagagctagtctcacaggtctgataatagaggctgacagaatcacagaaggaacaagctctaaccagagacaacaataaaaactaactccagagattacaagatggctaaaggcaaacgtaagactcttactaacaaaaaccaagaacactcaccatcatcagaacccagcactcccatctcagacagtcctggatatcccaacacaccctaaaagatagacccggatttaaaatcatatctcatgatgatgttagaggacatcaagaaggattttaaaaactcacttaaag

SEQ ID NO: 2816 - DNA, 1200 bp, mus musculus
accctttcatcactaaacattagtcttaagtggtccttggcaatttacataccagtaaatgccagaaggtgtaacctccccagcctgaaacaggctgatccagactttgaccttgctgccactagggaaattacctagtgtggagccttcctacctagatagttctattgttctaccacctgccactgctcctccaagacactgctacctgatgagaagccactgaaatattccggaggaacatcctatactgcacattgcctgcaggctgattccagacacccagaatggactggcaggggatgggccttcccccttataagcacactctcttagtaaactagcaggctttgaacagaattgtgtcttggtctccattaatttctctcagtctagtctctttcagccccagcatgcctcccaggtatacccggttcaagtaggccgtgggctggtatacaacggattggcgccatgaacagggacattgaggacggtaggaaaacactgagggaatcgctgtcttgtatggagctccaagggaaggaaagaatcagaggactgtatcgggcacaatgagcaacaggtatttatgctagcactggctttaaacttcatttaaaaaaaaaagtgttgctggaggagtgaaaggatacaggctaaattggaacagtgctaatctagcgctgggtccacttaaggtttggcagcgaaggactagaaactgaatcaggtggttgtccacagcttttaaaagttgcttcaggaaagaggaatagggtttaaaagaaatgaaacaggtggttgtccacagtcgagaactgcataaaactagagaaacagggcttaaaatgatggagtaaaatatatagaggaaaatggattttgaaactcttccagagacagagagaaatcggggacgccctgctctactctcgctggctctacagcagaagttctctgccctctttgtgttgtctaatctctggtgcaccattccgttcacgtgtcaatacatgtgtttgtgtttagttgtctgaatgactgaatgttctgtgttttatgttggaaaataaagatgactaaaactttaactgctggttcagcagggctgagagtggccacacgctttagccaaggatcagacacagcaggggagccactgctggaaaagctgctctcaaagaaagggagtctgca

SEQ ID NO: 2817 - DNA, 1200 bp, mus musculus
cagacggagaagatcctcctcccaccaagacataaacagctgtctccaattttccacccttgctgctaatgcagagtccccttggtctcctcaggctttggagacaatggggacaagaaagggtgacctccagctcctactatagcttaagagccacaaattgtggtgttataattggcataattcttagtgagtctgaggttgacaattctcctacaggagctgaacagaactcagaactgtgtatgctggttggtgataatatgaatccggtatgggcccagcatgggtgcaagctaagtgttgcaggggaaggtcccaattgaccatttctgagttccctgagagacaaaccaagtttggatggaggttggtatctagtttctgttgcaactaaagaatttttctaaggctctgcctcccctccccaaaagataccaagagccacaagtgtgggtctgtgacagcacccacgggaggaatcaagtcaatgtccccccagccatggtaatgcccgctcatctaaggatgagaagattatttgatcacctcagttaagtgtgaccttattaaatttaattcagaaaggggagatgtcagagaccatcccgtcagaaagtgagcccttcacaatctccctgacaggccaaatggcctcatgctaggagctggttatcatcccctcctccctattcccttcctggcacctgaggctgtaaaagctgaattatagtcccctcttccctatctcttcctgaactcccatgccatccaaggacatgagttacgcctgagcccagcctgacaccccaaggctgtcaaggagaatctatgttcaggagataagatgcagagtgctcgttgcctggcgcctgactttggcccccatgtcagcagatgcccgcttctttgttctttgtaaaattccccctcgaccccccctccccattccccacgatgtatgctttaaaatgaaggcacctcagcataacaaatgagaccttgacaaattttttggtctcatgctttctttcccttcctcccatttccttccagttttgcagtccccctcaaacccacgaataactgaatcctgtgggacaggatagttaaggtgaaaagccttataacttttgcaacatggcacagcttcttactacagatatgccataacttatgattttgttactaaaatattcc

SEQ ID NO: 2818 - DNA, 1400 bp, mus musculus
tagccataagggtgaatggattcatgcttttttttttggaatatggatggaactggaggacataatgtcaataaacaataaaccaaatactgaaaaagaagtgccacacattctcacgcatattgaagcatacatttaaacacaaaataatgaaaatggctaatttgtattatggattataagaaatatacaacggcattgaaaattattgattgaagcataatagtactgagattttgtaactaaaacagtgagcctatgtgttagtgatataaacagaaaagattactattttaaagtaagttcttaatttaagatttgagagataggacatctcatttgctttcaaaagtaattttgatgggggagccatcttggttcccatatccctcagagactagtatgcaaggtgagaatgtggagtacagaagctacacagcttctgggatagaccctttttcaggctccagacatctggtcaccttccctgccagaggagaggtgtctgcccggcctgggagggctttgccggagcacatgggggagacatctctggtcctggatctctcagagactagtcagcacaggtgagagtgtggactacagaagctacactacttctgggacaggcagaattgacacagcttctgggacaggtcctgttgcaggtcttcatcttctgccaggaggcaggtccaaatgtcagatatctgtgcaccttccctgcaagacaagagcttgcctgcagagagtactctgaccactgaaattcaggagagatctagtctcccagatctgctgatagaggttaacagaatcacaggaggaacaagctccaaccagagacaactataacaactagctccagagattaccagatggtaaaaagtaaacgtaagaatcttgctaacagaaaccaataccactcacctacatcagaacccagcacacccacctcaaccagtcctggataccccaacatacccgaaaagctagacccagattaaaaagcatatctcatgatgatggtagaggacataaaaaggcattttaataactcaattaaagaaatacaggagatcactgctaaagaggtagaagtccttaaaggaaaacaggaaaacacaaccaaacaggtgatggaattgaacaaaacaatacaagacctaaaaagggaagtagacacaataaagaaaacccaaagtgagacaacactggagatagaaaacctaggaaagaaatctggaatcacagatgtgagcatcagcaacagaatacaagagatggaagagagaatctcaggtgcagaagattctatagagaacatgggcaaaacaatcaaagaaaatgcaaaattcaaaaagatcctaactcaaaacatccagaaaatccaggacaca

SEQ ID NO: 2819 - DNA, 1200 bp, mus musculus
tctcctctgagtttcagtggttagagctctctctgcaggcaagctctcctcttacagggaaggtgcacagatatctggtgttaggacctccctcctggctgaagacaaaggcccaaaacaggacctgtccggtggctgagttgccttggcctgtcccaaaagctgttagcttctgtactctacactctcaactgtgcagagaactctcggaggggtcccagaaccaagatgtctggcgcagatgctcaggcaaagtgctcccgggccgggcggacacagatcctctggcctggaaagtggccagatgtctggggccccgaaaagggggctgccttagctctgtggctcccgcctatcccagaagctgttagcttctgtattctgcacactcacctgtgcagaatacttttggtggggtcctagaaccaagatgtctgctgctgatgctcaggccagtttgtggtccaaatccccaaaaatgttcagcaatagctgtgaatggaagtccaaagatctagcagttgctcagtcccacaaggcaagcatttgaagaactttcctgtattctttaagggattcattctttggctcttcaaaggcctctattatcttgctgtagcagagtagctgtcatctgaagattccatatagccctggtttttgttgattgtgttcttccaagggccttcagccatctggatggctttagtccatggatattccagttgtaataggtattggagggggcctaacctcaatgatcctagtgtaacaggcctctagtgggtattcttgcactgtaaggttccagatcagcaggtttgatgaaagtgggaggagaggtggtgggataatggaggtcttctggggatagcaggctgctccctgctcccggcagctgtgggtcctccagaggactcagaaaccaaggaagataggtgcaggaagggaatctaatctgtatggttccaggttagcaggtctcatgaaggtgggcagagaggtattggcataatgcagacctgacaggaatagcagtcataaagtagtttttaattttcaatgttcataagttttatctaaacaagtatcagctttcatctttctgtttatggttatacaaatttagttaaaatgtcaaatacagcatttatgcacactcatgaaaaaatggcatacactgtgttgtcagaaatttcc

SEQ ID NO: 2820 - DNA, 1000 bp, mus musculus
gatcacaccacaaggaaacacatacctactattcaaactctggttaagaatttgtggctgagccagatgtggtggcgcacgcctttaatcccagcactcgagaggcagaggcaggtggatttctgagttcgaggccagcctggtctccaaagtgagttccagaacagtcatggctatacttagaaaccctgtctcgaaaacaacaacaacaacaaaaccaacaacaacaaaaaaaccaacaacaacgaaaaagattttgtggctgggaagttcactgatactctactagtactctgctaaatggacccactacctgctaaatgtttattttggtattcataggttagtggtgttctatgacatgaccaaatacatttatttgtagagaaaacagtggttagttaaaaaatctacaactggtcaaaatgcagacagtcactagagttctcagacagaaatgggattgtatattacacctatctccaaagctcagggaccactatcacagacgggtggaacaagtgttaaaagctaaaggtaagggcagatcagaggaaaacagtgacagtacaggaccactgaactcataaattgaaagctgctgtggctgctagcaaagccatgcataagatcaacccaacattctaacatagattcagaaggtgttcttgaggtctcctcatccataactaataagctatgggctgctaatgggctctggagtgaagtgaactagttttcactaagagtgtgcttaaatgagaattttattatttattgaaaccatttctctgaaaacaataaaaattgatatgaaacttacaaacagcttattttctattattgaagactaattaaagttctgaaattaacaaaatacaccaagtatatcattaaatatctggaaaaagaaactcagaattttaaaattaaaatgtcttatcagtctacatcttctggtttatctacaacacaaaaataaattacttcatcaaaatgc

SEQ ID NO: 2821 - DNA, 1800 bp, mus musculus
ctcaagaaggaagataacttttgatgagtactctattgtacagcagaatatagctgtggaaaagttgaggatgattattgtatttgttgatactaatattcacacttgttttttcattttgaatatttctcaaggcccaattttatgactccacagttattatgtctatgtcttaccgataaatattatgtctactttttaccacaaagaaaattatatttaataacatatttagttatattttatatagatttactgcttgtacattctaagttcacaataagtatttaaaaataataataaagataccaatttaatcaattctaaaaaaagttttcaaaaagtgaggtctttaaaattctaccttaatctctaaacatgactcatgtaaccactaaataggttctttcttcttctttttttaaattagatattttcttcttaacattttaaatgctatccccaaagtccctataccctctcccagccctgctccctaacccacccactctctcttcctggccctggcattcccctgtactggggcatatgatctttgcaagaccaagggcctctcttcccattgatggactattaggcaatcctctcctacatatgcaactaaagacacaagcttggggggtgagggtatgcgatagtttgtatatccttggaccagggagtggcaccatctgaagttgtggccttgttggaataggtgcgacctggttggaatgggtgtgtcactgtggatgtgggtataagatcctcactctagttgcctggaagtcagtcttccactagcagcctttggatgaagacatagaactctcagttcctcctgcaccatgcctgcctggatactgccatgctcccaccttgatgataatggactgaacctctgaacctgtaagccagccccaattaaatgttgttttttataagacttgccttggttatggtgtttgttcacagcagtaaaaccctaactaagacagggtactagttagttcatattgttgctcctcctaaagggttgcagacccctttagctccttgggtactttctctagctccttcattaggggccctgtgttccatccaatagatgactgtgagcatccacttctgtatttgccaggcactggcaaagcctcatatcaggttcttacctatgcaaaatccgtaccctctgagttaccaatttaagaagtagggcaaagccaggtggtgggggcacacgcctttaatcccagcacttgggaagcagaggcaggcagatttctgagttcaaggccagcctagtctacaaagtaaattctaggacagccagggctatacagagaaaccctgtctcataatcctccccccccctcaaaaaaagaagagaggcaagtagaatttgcaattacaatagcattctgaattttaatacatttgtttccttgataagacatatgcacatatattggattaatggcccaatttcattaaccatgctgcaactttctaaatgttaagtaatttttatcatagtcaacataccctgacaggcttgtatttgctgataaagagcaaataaatctgaatggcttagctttaatgccaaaatcattcttccatacctgaaatgctcacatcataaaatgtcaaaacaagaatgaccaatgataatgtcaatgcttctgggaaataatgcaatcatcacaagtgccatagagctaaatatttaaaccttctttttcaccaagtgaatagtccattaagttatataaatgtcatttttaagcacatgtatct

SEQ ID NO: 2822 - DNA, 1600 bp, mus musculus
tacaactttgaaatattaaaaagctaagatttaaaaactaagtttattatttctgacaatttcatatatgtatgtagtatattctgattattctcttttatttttctcacacccctacaagccctgtctttctgataagtccttatccccacactgcacatcgttttgttttgttttgtaacctgctgtctttaaccagagccttcaggataaccataagttatggacttctcaatgaactgatagattcactagtgggtagacaactaaaaatgacttcttatctcactagaatctgtcaggagcctgtatttcggagggtcacagtcacatccgtgactgattgttaaagattctatacagacacagttcatgtagccacagttatcatgagttcatgatcatgatggctatgtcagtcaggcctagaagatgacaatttgcggccctttcctctctcttccagttgtaagataggaacatgtagttcctatcttataataaataaaataagggtatgaaaagatttgaggaaatatattttaagcaaagattctattaaaggaattctattatgacacaatactgatagcttattttaatactttgtagagtcacctcttgttttattatgtgtttgtttataagaatctcttcaatataatatatcaattaaagacttttttttttttttggttttttgagacagagtttctctttatagctctgactgtcctggagctcactttgtagaccaggctgacctcgaactcagaaatccacctgcctctgccttccgagtgctgggactaaaggcatgagccaccacgcccagctaattaaagacatttcaaggggctggagagatggctcagtggtcaagagcactgactgttcttccagaggacctgagttaaattaccagaaaccacatggtggctcataaccacctgtaatgggatccgatgccctcttctggtgtgcctgaagacagctacagtgtactcatgcatataataaataaatctttttttaaagacatttcaaggcataaataactcctccttttcttgtttataatgctcattttaaaagtccctgaaactatctacgagttcaaatgaaaataacttctatataaagtgtctacctacttcatggctgttttttatatcttttgaaggaacagtttaatggaaaaaaagctttctggatttatttggtttcgtgccactacaatgagaaattagcttttgcctgtcagtaggttgcatatatttatatgcataatatatttaattacctctgctgagaattcttttaggattgacattaataatttaaagacacaaataacatctttaggagctatgactttcaaataattttcagcttaggttcattagtcattgtaaatctggttgcatagtcagagttacatatcatataaaaattgtggaatttaatacaatattatttaatcttttgaagtaacccacactctttagattatttcatatgtatgtcatctatatatttttagaagttctgtttttatccctacatattcctctgcctaaataataagtaatagcccata

SEQ ID NO: 2823 - DNA, 1600 bp, mus musculus
gctccggggtactggttagttcataatgttgttgcacctactgggttgcagatctctttagctccttggttactttctctagctcctccattgggggccctgtgatccatccaatagctgactgtgagcatccacttctgtgtttgctaggccccggcctagtctcacaagagacagctatatcagggtcctttcagcaaattcttgctagtgtatgcaatggtgtcatcgtttggaggctaattatgggttggatcttatttaatttttttaacattccagattttattccgctccagtctaccctctgactgtactatacctcctccctgccccactgtctccaagaggatgtcccgatcccccacccccactccccaatacctctaaactccttgagccctccagtctcttaagggttcagtgcatcatctccgactgaacccagacccggcagtcctctgctatatgtgtgttgggggcttcatatcagctggtatatgctgcctggttggtggtacagtgtctgagagatctcgggtgtccaggttaattgagactgttggtccttctacagggtagctctctgcctcagcttctttcagcttttctctaattcaaccacacgagtcagcagcttctgtccattaattgggtgcaaatatctgcatctgactctttcagctgtttgttgggtcttccgaagtgtggtcatgctaggtccctttttgtgagcactccatagcctgagtaatagtgtcaggctttgggacctcctcttaagctggatcccacgttgggcctatccctggaccttcttttcctcaggctcctctccctttccatccctgcagttctttcagacaggaacaattttgggtcagagttttgactgtgggatggcaaccccatccctcacttgatgtcttcctgctggaggtgggctctgtaagttccctctccccactgtaggagatttcatctaaggtccctccctttgattcctgagagtctctcacctcccaggtctctggtatattctggagagtcaccccacctcctacctcccaaggttgcctgtttccattctttctgctggcccacggggcttcagtccatttcccctacccaataccaaatcatgttctcatcttccctaccccctatcacatttcccacccaggtccctccctctccccttgtgattgctttctttcctctcccaagtggaattgaggcattctcacttggactcttcaagttattgatctttttgtgttctgtggactcagctattaagaacaaggacatcctgagtttgcaggcaaatggatggaactagaaaatatcatcctgagtgaggtaactcagacccaaaaggacatgcatggtatgtactcactaataagtggatattagccaaaaaatagtacagagtacccaagatttcattgactcttaatctttatttataaccaagtctaaaataagcctccatgttatgcaattaacaccaatttaagaggattattttgcatattttcttctctattttgagttatcagccttatgaatagagttgaagaacactaatgacaat

SEQ ID NO: 2824 - DNA, 1600 bp, mus musculus
ttttttaggtctagtatggttttgttcatttccatcacctgtttggatgtgttttcctgtttttctataaggacttccacctgtttggttgtgttttcctgtttttctttaaggacttgtaactctttagcagtgttctcctgtatttctttaagtgagttattaaactccttcttgatgtcctctaccatcatcatgaaatatgcttttaaatccaggtctagcttttcggttgtgttggagtgcccaggactaggtggggtgggagtgctgcgttctgatgatggtgagcggtcttgatttctgttagtaggattcttatgtttgccttttgccatctggtattctctggagctagttgttatagttgtctctggttagagcttgttcctcaggtgattatgttagtctctatcagcagacctgggagactagctctatccttagttttaatggtcagagtactctctgcatgcaagctctcctcttgaaaggatggtgcccagatatctgttgtttgaacctgcctcctggtagaagttgtgttccactcaccagaggacttaggatcccgtggcagatcctgtgtgggtccttgtgggtgtctggagactccccaggggccagggaccatggtgctgcagtgggccggccagaagggacttgagccctgtatcaggcagggttacctgcttccttaattactgcagtgtcaggtcctgctcgattggattggagcaggcgctgtattccactcaccagaggtcttaggatcccgtggcagatcctgtgtggggccttgcgggtgtccacagactcccccaggccagggaccatggtgctgcagtgggctggccagaagggacttgagccccgtcacatgtgaaatttctagtaaaactatgttaacatttaaataactagaaaattattgccccaagtagcctttccattttatatttgacaattagtgaagaaattatccagagttgtataagtgagattaaaatgaattatttattgggtacaaatagtgtctataaaactgagccttgatataaaacagtttaaaatagtctaaagcaaatactagtgtatataaagatgttattttggtatccatttatacaaaattaaaaatacctaatcagtagtgactaagtcatttgtagaatatatttaaatccctaatggaaatgattttaaaataattattatgtaattgaaaagcatctgataaaatagaagactcaattgaagcctgctagtgcttcctttgcaatgttgtcgcttcaccaacttttattcagccaaaccaatattgtacttttttgtgtgtataaaaagagttgaaatggtcttagatttgaatttaaggtggacatatttgtgcatagtgccaaacctagcctgaattgttttagatattaaacacataaaggttataggaatatatttaaagcacaaaaatggtaaaatatctgttaaattctggaagaattggaaaattgaataatttttaaatttcaaatcgcattgttttagtttgtttgtttgtttggttgattggttcttttgttttttaagatttgatctttaa

SEQ ID NO: 2825 - DNA, 1400 bp, mus musculus
tcaaaagaactgcacttggaaaatgtcttcctggttttttttttttttttgacttatatttttcaaacacaatccagatattatttatattttagagctcatatcctattagaatagctttcatctttaataattgaaagaataaatgttttataaatacaatttgttgtcattttattttcagttttgaaaataatttcaattttgagtattttccttaaaagatagttccttaaaattaattgatccaatctttgctccctaaatagcaaacaatttaaaatattgaaaataaatctggagttacattttctactccaattttatatgctcagacaggttttttattataattctttaacagagttgccattacaactgatactgagatcaccagcttgtctgttcctctgaagattccacattctgaatgcctccctggagttcagctgcaatcagggtaataggtaagggaccctcccagaaaactgcagcagattggaacccaatgagcccagtaaacttgggacccatcactcttaagcctccccaactcacaaattccactccctctctggtctgcatcttctgccagggcagatcgttagtttggatgctcctctaaaaaccccatagtctgaaactctccaacaagttctgcttcatgcagggcaatagaccaaacagtctgaaggcttcccaaaagtttccctgcatccagaacaacagatcatatgtgtacatgccactctgaagacccagattctgaaagcctcccaggatgtctgctacagacagggtcacaggcctcccaggagacctgcagcaacacagtgacacaggagttaggcttgagacagaaacacccagaacagctaacaccagatataaccagatgtaaccagaatcatcagattccagttcttccaccatagcaagccctggatacacgaacatacctgaaaatcaggaacctgaccaaaaatcctatcttatgaagaaaatagagtcctttaaggaggatataaacagttcactaaaataaatacaggatagcactggtaaacaggtagaagcccttaaagaggaaacagatacaccccttaaaaaaatacaggaaaacataaccaaacaggtgagggaattgaacaaaatagccgaagacagaaaagtgtaagtagaaacaataaagaaagcacaaatggaggtaacccttaaaatgtaaaactgaggaaagaagtcaggaattacagatgtaagcataatcaacagaatacaggagatagaagagagaatcccaggtgtagaagataacttttgtaattgatacaactgccaaagaaatttcaaaacaacaacaacaacaaaatcctagcccaaaatatccagtaaatctagga

SEQ ID NO: 2826 - DNA, 1200 bp, mus musculus
ttttgttgttgatgctcacatctatggttccagatttctttcctagggtttctatctccagtgttgcctcactttgggttttctttattgtgcctacttccctttttatgtcttgggtggttttattcaattccatcacctgtttggtcatgttttcctgcaattctttaagtaatttttgtgtttcctctttaaggtcttctacctgtttagctgtgttctcctgtatttctttaagtgagttattaaagtctttcttgatgtcctttaccatcatcatgatatatgcttttaaattcgtgtctagcttttcaggtgtgttgggttgtccaggactaggtggggtggggagtgctgcgttctgatgatggtgagtggtcttgatttctgttagtaggattcttacatttgcctttcgccatctggttatctctggagctagttgttatatctgtctctggttagagcttgttcctcaggtgattatgttagtctctatcagcagacctgggagactagttctctccttagtttcagtggtcacagtactctgcaggcaagctcttctcttgcagggaaggtgcccagatatctcgtgttcgaacctgcctgctgcagaagttgtgttccactcaccagaggtcttaagatcccgtggagggtcctgtgaggatcttgggggtgtccggaaactcagcgcccaaagaaccccggtgctggagtggaccagaagggacttgtgcccctgatcaggccgagatatctgcttccctacttaatgcagtctcaggtcccgcatgattggattggagcagatgctgtgttccactcaccagatgtcttaagatcccgggggggatcctgtgtgggtccttgtgggtgtccggagaatcctcgggcaaggaaccccagtgctggagtggatcagaaggacaataatgtttttcatttactcttagaattggtttggtagtattttttgagtatttttgaatcaatgttcataagaaaaattgatctgaagatccctccctccctccctccctccctccctctttctttctttctttctttctttctttctttctttctttctttctttctttcttatttttttgaagttctgtttctttgttcaatcctcctctggtttaggtatcagggtgactgtgactcatagaaagagtttggcagtggaca

SEQ ID NO: 2827 - DNA, 1200 bp, mus musculus
gggtttttgtgtttcttctttaatgacttctacctgtttggcagtgttctcatgtatttctttaagtgagttattaatgtctttcttaaaatcctctaccagcatcatgagatatgatttcaaatccaaatcttgctttttgggtgtgttggggtatccaggactcactgttgtgggagtattggcttctgatgatactgagtggtcttggtttctgttagtaagattcttatgtttgcctttcaccatctggtaatctttggtggtagatgttcttgctgtctctggatggaactttttcctcctgtgagtctgttaaactctgttgacactcctgggagaccagctctctcctgagtcctgagggtcagagcattccctagatgcctactctcttctggtggtgatggtgtacagaggtctgaggatcaaccatgcttcctggctgaggatgaaggtccgaagtgaccctgtttaagaagctctgttgcttatattaccagcatgctctcctgtgcagaccagcctcagagagatcctggatagaaattggcaatcttacctgagtcctggtgtcaaagcactccctgtaggcaagctctcctcaggtgttgaaggtgcacagatttctgaggatcacctctacttcttggctgaggatgaaggccaaaaaggaccttgtccaagaacccttgttgcttctgtggctcatgctctctccttgtacactgagttctaaagctaggtagaccagcactgaccagaagaaacctcagccactggtctgtgggattctagtgtccgtgctccagctgtccccaggtacccctggttctgatggaatagatgttgtattcttctcgccagtgatcttaagatcctgggcatgctagggctcctgtggggtgtagagtcctttggagaccctgggactgcccaccgagttcgggcccaagaagcccggttctggtgccgacctacttccttttttaagcttattttctttctttctttctttctttctttctttctttctttctttctttctttctcctttctttctttctttttcctttctttctttctttctttctttttcctttctttctttctttctttctcctttctttctttctttttcctttctttctttctttctttctttctttctttttcctttctttctttctttctttcttt

SEQ ID NO: 2828 - DNA, 1200 bp, mus musculus
ttgttgtgtctacttccctttttaggtcttgtatggttttattcaattccatcacctgtttggtcatgttttcctgcaattctttaatggatttttgtgcttcctctttaaggtctctacctgtttagcagtgttcttctgtatttctttgagtgagttattaaagtctttcttgatgtcctctaccatcatcataagatatgcttttaaatgcgggtctagcttttcgggtgtgttggggtgccctggactgggcgaggtgggagggctgtgttctgatgatggtgagtggtcttggtttctgttagtaagatacttatgtttatctttcgccatatggtaatctctggagttagttgatttagttgtctctggttagagattgttcccctcatgattctgttagactctatcagcagacctgggagactagctctctcctctgagtttcagtggccagagcactctctgcaggcaagctctccttttacagggaaggtgcacagatatctggcatttggacctccctcctgggcaaagaggaaggcctaaaataggacctgtcccagaagctgtgttgctttggcctgttacagaagctgttagcctctgtagtccacactctcacctgtgcagaatactgtggcaaagtcctggatctaagatgtctgctgccgatattcaggcaaagtgctccttggccaggcagacacctatcctctggccgggaagatgtccggatgtctggagcccaaaaagcttgctgcctcagaatctctgtggctcctgcctgtcccagaagctattagtttctgtagtcaacactctcatctgtgcagagtacttttggtggagtcccagaaccaagatgtcttcagcagatgctgaggcaaagtgctcttcatttacatttcaaatgctatcctgaaagtcccctatacccacccctgccctgctccccgacgcactcactcccaattcttggccctggtgttctcctgtactgggacatataaagtttgcaaggccgaggggcatctcttcccaatgatagcctactaggccatcttctgctacatatgcagcttgatataggagcttgggggtggtactgattagtccatattgttgttccacctatagggttgcagaaccttcagctccttgggtactttctctagctcctccattgggggccct

SEQ ID NO: 2829 - DNA, 1000 bp, mus musculus
ttttattttttatttgttttttttttatttatttgcatttcaaatgttatcctgcctcactcccctaacattctgctatgccagggcatcaagccatcacaggaccaatggcctcccctcttattgatgccacataaggccattctctactacatatgcagttggatccctgggtctcaccatatgtttgttgttgttgttgtttgtttgtttgtttgtttttgtttttgtttttgtttttgttttgcttggtggttagtctctcaaagctcttggtgccatgttggttgattgttgttcttccctatggggttgcaaaccccttcagtgccttcagtccttcccctaacttctctattggggtccctatactcagttagatgattggctacaagcatctgcatctgtatcagtaatgctctgccagagcctctcaggaggcagctacatcaggctcctgtcagcaaatacttcttggcatcagcattttgtgactggttttgctggctgcatatgggatgaatccccaggtgagacagtctttgtatggcctttccttcagtctctgctctactctttgtccctgtatttcctttagacaggagcaactctggattaaaacttttaatatgggtgggtggccccatcactcaactgaggccatgtctcacctcttcatatcatctcttcaggttttctctcccttttgggggatatttcagttaatttcattcccattgagtcctgggagcctcttgctttcctgtcctctgggactttctgttggctaccctcagttccccatcctccattgtcacacacctctgttccatttcctaaccctctctatatcttcctgtcttttctcatacctcatccctgacctcaatcactactacagagcagtagtgataagaaccgtgtggtattggttcattatcttcttaagctttacaaagaagagaatggggaaggtgttattttttaacagatgagaaat

SEQ ID NO: 2830 - DNA, 1200 bp, mus musculus
atcaatgcactgattagcatgcatcaaagaatcttcttatacccattggtaattaacacagaggatcattccacaacatctccactaggatctgcatgacaagttccacagactgaggtgtttgatctccaaagggggaggcctcctgaaaccagttgtggaactcttcaccagagaaaaaatactgagctgtagttctcatggcaatctatcagttttgttttcacttattccttttcttatttacatgtttctgctagcctaggacaagatctttttttaaatatatatttattaggtattttcctcatttacatttctaatactatcccaaaagtcccccataccttccccctccacttccctacccacccactcccactttttggccctgacgttcccctgtactggggcatataaagtttgcacgaacaatgagcctctctttccactgatggccgactaggccattttctgattcatatgcagctagagacactagctctggggggttgctggttagttaataatgttgttccacctatagggttgcagatccattcagctccttgggtactttctctagctcctgcattgggggccctgtgatccatccaatagctgactgtgagcatccacttatgtgtttgctaggccccggcatagtctcacaagatcttaagtgagaataatgggtaagaaaccacccctagtcgggtgtggtggcacacacctttaatcccagcacttgggaagcagaggcaggcggatttctgagttcaaggccagcctggtctacaaagtgagttccaggagagccagggctatacagagaaaccctttctcaaaaaaccaaaaaaagaaaaagaaaaaaaaaaaagagagatggggccactaacatgaccttataaccaggaaaaccaatgctttactctctaaatcatttacaaaactattacgatagataaaaattttcccaacaataaaatttcatatggctacatgtgtgtcatcagaggtggattttggtatatggtaaagaaagccttaattaaaaataattaaagcattttaaatttatacattgaagagttataaaaaaaatcaggcagtagatgttaaataataattgaccatggagttggaaagttagctaggcagtcaggagcactgaccattaaagatttataacctgctcct

SEQ ID NO: 2831 - DNA, 1400 bp, mus musculus
tattgtatcacatataaagcacatgtttgtgcattttgaagcagaatacttttgtttccatttttatgacaaagatatatggctgtaaatagtgaagttttttcctaaaacaagtaactgaatttaattaaaaactattaagtcatgtgttactaattgtattaaagttaagattcttactatataatagatggaagatattattatcctattgttgacctcttttacacctactattcctaaaataaattctcagtaatattgaagaaccaaaaccagaagtgaaaaacacatttagtagtaaaaagagagttaacaatatttgaatattattgtcatcatttagaccagtggttcacagccttcctaactgtgactctttaatgcatttcctcatgttgtagtgacaaccaaccataaattctcttcttatttttaattaatcattccattcgtttacatatcaaatgatatcctaatttctagttacccttccacaaatccccatcccacatttgccctctctcctctcccctttgcctctaagggagtgttcccccacccacacatcctctcctgacccaccactccagtatctccctacactgggacatcagatctccacagaatccagggcctctcctcccattgatatcagacacctcggcccaccttggccagcaaggaagacacaacacagtaggattcttctcaacagcctttattgcaggaacacctcgatgctgctgctacagggatcccgggcaccaagggaggtctgcttatatgcaccccagcacagggaaaggcttcgtgtcctcctgggataggttgaaccgttgtcacctaactagcatgtacttgctcaggaggggttggcgccagactcaggcttacgcctgcacagtggtgttgtttatgacaatggcacactggaaaccggcgccatcttagagttggcttcctacatccttgtgctggagtttttcttctaattccttttgtagggctaaatttatggatagatgttgttaagatttgactttaatcatagaatatcttgttttcaccacctatggtgatggaaaattttgctggctgtagaagtttgggctagcttatgtggtctcttagaatctacagcacatatatccaagatctttagagtctctactgaaaagtaaggtgtaattttaataagtctacctttaaatgttacttgcttttttttcccttgcacctcttaaaattcttactttgttctgcatgtttagtgttttgattatgtttagcggcaaggggacattcttttctagtccagtgtatttggtattctgtatgctttttggaccttttatagatgtgtccttctttaaactaagagaatttttttctatgat

SEQ ID NO: 2832 - DNA, 1000 bp, mus musculus
aggttaacaagctgaagggcccaagtgaggatgcttcaatcccacttgggaggaagaagaaaacagtcatgtgagacaaagggaaagaggaaagaggaaggagggacataggtggtagaggacatgaggaggggaagtggtgaatatgatcaggtattgggagtgtggaacagaagagaagccatgaaagccagcagaatgaatagatatatgcaacctccggtggtgggggggtgggaggttggaggaccctctagaatgcagcagagacctgggaggttagagattttcaggactcaaagggagggaccttaaatgaaatatagaacagtgaggagaggcaaattttagcatccgtctccaatagaaagacaggacatcaagtggagggatgcagttgctaccccataaataatcaaaaactctgatccagaattgtttctgtctaaaaaaacaaaaaaaaaacaaaacaaaaaaaacaaacaaacaaacaaaaaaaaaccttcagggacaaaaatggagaagagattgacagaaaggaagtacagtgacagcccaacttatgctacatctcaaggggaggctccaggtctgacactattactgttgctatggtgtgcttacagacaggagcctagtatggttgtccttcaacaggcccaacaagcagctgactcagacagttgcagatacttacacctatctcctctggttgaattagggaaaggctagaagaatctgaggagggtgaccacataggaagaacagcagtctcaattaacccagacccctgagatttctcagacactaagtcaccaaggaggcatcataaactaaatgatatggggcccaatacatattcagcagagtactgccttgtctggtttcaatgagagaaaaagaacctaagcctgaagagatttgaggccccagggagtggggaggcctggcaggggttgggtgagggttgggcacatcctcttggagaaacagtggagga

SEQ ID NO: 2833 - DNA, 1000 bp, mus musculus
ccccatccgccatggctcttttctttcagttccaagatgcatcccaggctcaaacctagacatgagaaccgcaggctggccccaacaaattggcatcccatgcggtgcctaggaatggcagaggacatctggaaggaacactgctggtttggagctccatggaagaaaataattaaagaaaattcgtacgggaacacgagaagcaacaggcataaggttgccaggtgtggtacagtctaagctggaacagcgctgaacccacaccctggattcacttaggttcagcagtgagattatcagaatcttccagaagctgcttcctaggtgagagagacaaaagggtttggatttaataattaagcggattggccacagtcagaatctgcatcaggctggaggtaaatgtcccagaagcagagaaattttaggggcgcttggattcatactctctgggccctacagcagaagttctctgccctctttatgtttttgtctaaagtcttgtctaatgtctggtgcaccggtcagttcacgtgttcaattcatgtctgtttgtgcctagtctgaatgaatgaatgttctgtgttttcatgttggcgggggtggggggtggggtggggtggggtggggggtggggtggggtggggtggggatatccccccagtgccagggccgcgaatttactgcactgtcattggtggcagcgggtgctcctgcttagcatacaaacacctttctttgagggaggtgggggccaaaatttggctccggtggggccaaaaaagacaaggacaaatgggccccccaggtaccctgtgggtgtgggcctgagaccacagagctatgacgaggcaggtgggcacggccgaggtagcactcacctcaaagcacagtttcaaacatctattaaaactactgtggtgctaataaagtattttaagatatatttgtgtattttggaaaacttataacaaaaattgtgtcttaggaacctgacaaa

SEQ ID NO: 2834 - DNA, 1200 bp, mus musculus
cagtatagctaagataaaacaatgaacagcttctgatgtggtgaggatgtgcagcaaggggaaccctcctgtattgctggtaggagtgcatacttgtacaatcactttgaaaccaatttggcagtatttctaagaaattaactacatcatatacattcatgagtgaattcaattatatttttaagaaaaatgaacattaatgctataacatatctactcatatttaacagaatatattgagtagcattagtgtttatttttctttaaaacatttttttctaatgagtatatacacaaatgttaaaatatttgctaatttaatgaaaaatacttaaaaaactatatactgcaattgaaccaaatttattacagatatataagcatgtttaaatatatgcaaataaagcactataatgtaccccatgaatagactgctaaagaaataattaaccatctcaataaatacagaaaaggcctttgataaagttcaaaatactttcctgatgacactttttaaaaagttacttatatggagtggatccccaggtggggcagtcttttgacaaatacagaggtgggagcttgcagccagccttcggacagagtgaagggttctccaatggaggagttggaaaagggactgaaggaacttagggggtttgcagccccatggagggagacacattatcaacaggccagaacaatctggagctcctggggactggaccaccaaccaaagaatacacatggagtgatccatggtgctggccatattggacatcagtggaaggagaggcctttggacataagggtgttcaatgacccagtgtaggggaatgccagggcagaaagatggaagtgggtgggaggagcacccgcactgaggcagggagaggaaaaatgggataaggggtttccaaagggaagacttagaaaggggaaatatttgaaatgtaaataaagaaaatatccgatttaaaaaaaaagctatgaatagaaggatcatattgccaaataaagaatgatacacatcccattggtgttctgttcaggaatctttccccagtacccatatctttgaggctcttccccactttctcctttataagtttctctataagtgtctctggttttatgtggagttctttgatccacttaaacttgagcattgtacaaggagataagattggatcaattcgc

SEQ ID NO: 2835 - DNA, 1200 bp, mus musculus
tgtgttgtctatatatatttcctgaatttgtggtgttgtggatagccctggggctagttatatttgatgttaatttcgttctcctgtgagtgtttgtgaacaaggaatgaatcagcacttaggtgatttcctgtaaacctgctgcccaccttactttgtaaaataaaagagatctgatgattgggcagataaaaggtaaggtagagcagaaggtgggggagaagaaagagtaaatggaagagggagaggatgcagaggaggataaagaaggagaaaagcggagcagaagcacatggcctggagaagccgcaagttctaggggtctcataagcaatggaagatggtagtgtagtggtagatctgcccaatctaggcacacagcatgtaatcatattaactgtgttgtgttttcattgcaggggggcagcatatttgggaggagatttactgcaacatagtgggtctgtcagcactagacttaccaggggctacatttcattcatagaaaacaaacaaacaaacagacagacagacaaaaaaacaactctatcattatgagtacctatcaaattgccaatggcatgttggttagagaaaaacagtttttaatgtttattttaaaataatgtaaaaatgcaggtatgggagaaaatccagcagcagtaagggccaattctgccttatcccctccacactccattccccaggccatggctatgcttgtatcactgaagccctgttgacacacaagtaaaacaggcgagatacgcatgccccaatcctttgctcagtgggtctcctggcaatcccagtagccatgagatcttccctattacccctgtgctccatcttctacttactcgagctctgcagccatcaaggaacatcatcagctcttccagcctttctggaggactgctgcctctcagggcagcaaaaaagcccgaagccatcaggaactaacagctctgcctgaatccctggaagccttctgccaactatgacaaccagctctaccaagaattccagaggcctgctgccatcaaagcctatcaggtctgccaataccagggacaaccagaaggataaatgctatcgtaagattacaatcaacaaaagtcaggtcaatacaataccaccacaaccaaactttcccactataacaagtcaggaataccctaaaatactggacgcatgaga

SEQ ID NO: 2836 - DNA, 1400 bp, mus musculus
caggacatgaactaaatctggaatgacaagaatggaaagaaaataaaaggcaaacagaaatgaaaataaacatctaaaccaacaaacaaattctggacttaggcataagtaatattataattcatgtgaagcattgaatcagagttgatagtttcaacctgaatatccctaaaaaacaattacagtcttaagcaagtttaaacgtatcaaatggaagtactaggaaccactataatatgaaattattaagcatcatatatactcatatatatgtatgtatttctcgtgttctgcatacgctatactatttaaatagaaactttttaatggctgggccgacatttatttatttatttatttatttaattatttattcattcatttatttatttatgtttaagatagtgcctcagtgtgtagctttggctgtactggaacttattctgcagtccaggctgtcgttgaactcaagagatttgcctgcctctacctctggagtggtggacaaaaagcctgtgccacctcaccaggttttgactgactttttagtccagggtttccagaaccacctgaaggatgagagggactacttctcagagaaaaatgataaagtgttcttcactacacagtgttccactcagtcaggagaacaaaatatataggaaggttttgttttgttttgttttgttttgttttgttttgttttgtttttgtgaaactctgactcctgctctctatctctctctatctgccgcagcattgaagctaatggcactgaggctgtgaactggctttagcacgggaaagactccaagtgcagagtctatgcaacatcccctccatatagtctttattcatgaggatgctcctctgtgaaaaggagggaacaactcggggcttcagtgagtgtgtgctccagaccttattcctggctgctctgtgtgtatgctgaggacagcagcacctaccttggcactcactgtgaccaggagctggagaactcatcctccaaatcaacttaaatagaatttaatgttattatgtcctatggattttgttatgtcatcacattgtctagtgttttatttctgaaaatggaaactctgtaagtagagatgttcatgtaaacacgtttgcttttatgttatgtctggcttctctggaacatggtactctgttcattttattagatattctaactctcataactgtcctatcacattgttatttctcttctacactataatagaaacaggaatgtccaatttgattgctgtgagctctttgtgtcccatcatagatatgaaagcagacccacatattttgtagatgataatattacatctaattaaacattaagcttatcacttgcttttctgataaatttactaaatttcact

SEQ ID NO: 2837 - DNA, 1000 bp, mus musculus
aattcagcgtaggtgaagacaagactttcttagaaataggtaagacaggctttttaaatggctcagcagataagagcactacctgcccttccagaggacctgtgttcaattcccagaaaccacatggcagctcactcctgtctgtaattttaatttcaacagatccaatatccccccccccccacacacacacacaaaatgcaggaaaaacataaatgcacatgtgtgggaactaaaaagggagcccaggggaagagggggaagggaaaggcccacaccctgccagagttttacctatcatctggtcagtcaggcatgggagggctgctaactaccttccactcttccctgggtgggcattcctctatcccactcttcagagagaggccaggagcagccctacgtgaggaccacggagcttctttgctaaagtcaaagggtcataggagagagggatgggggaaaaggttcccaacacctacctgcaagagtgcacacagccttgatgagcagataatctctatggtttaagagctttattatagaaaggcagggtgaaagagagaaagaagagggagagggagagggagagagagagagagagagagagagagagagagagagagagagaggagagagaggagagagaggagaggagaagacaaagagaggggagagaaggtaagagagtgaggggtaagagggaaaaaagtaagaaagtaagcagtaaaagagccctttatatggtcttcactgttgctaggtaactgaggaggactttagccggaaggtcagaagcttgggccattgcctacatgactactgaccatgcttctcttgtgggggctgtgggaggtgataccttaggcaggggccagagttccaggagcatgagggaacgcccaccgtgtcatgaaggtgagttatgaccattagggttcagacctcagcttgactggagaccagcctgcaattccccacacacatgaagtaaaaataa

SEQ ID NO: 2838 - DNA, 1200 bp, mus musculus
tttttatagtaaatttctttttttcaattttttattagatattttcttcctttacatttcaaatgctatcccgaaagttccctataccctcccccaaccctgcttccctatccaccctctcccacttcttggccctgtgttcccctgtactggggcatataatcttcacaagaccaagggcctctcctcccattgatggcctactaggccatcttcttctatacatgcagacacgagctctgggggtactggttagttcatgttgttgttccacctatagggttgcagaccccttcatctccttgggtaatttctctagcgcctccattggggaccctgtgttccatccattagatgactgtgagcatccacttctgtatttgccaggcactggcatagcctcacaagagacagctatttcagggtcctttcagcaaaatcttgctggcatatgcaatagtgtctgcatttggtggctgactatgggatggatccccagatgggatagtctctggatggtccatcatttcgtctcagctctaaactttgtctctgtaactcattccacgagtattttgttccccattctaataaagagacttttttaaatgacgtttttatatagtcccattttctctactagccaaaaaaaataattgggctccttttggaaagggattgaaacaaacaaaaataactgaaatagagaaaggatcatctatttggactcatttgttcagccagaataatcactcttgaagtaggctatacatgtgtgatgttagctcggttgtaaactgagtgcactatagaattatgtgggaaatgggcctatgggcatgccgtgggatatctcgattatgttaacagtggtggaaagacctgctctctgtgggtggtaccattccctaggctaggatcttgggctatacagacaaagcaagctacattaagcgttcctcactctctgcttcctgattgtgcgtgtgatgtgactgtctgtttcaagctcttgctgccttagcttccttgctgtgatgggctataccctagaactctgagccaaaggaaataatttcttttttattattattttatttatttatttttattacatattttcctcaattacatttccaatgctatcccaaaagtcccccataccctccccccacttccctactcactcattcccatttt

SEQ ID NO: 2839 - DNA, 1000 bp, mus musculus
tccccaacaagggatccatcccataaacaagcaccatacccagacactattgcagatgccaagaagagcttgctgacaggagactgatattgctgtctcctgagaggctctgcacatacagaagtggaggctcacagtcatctattggatggagcccaggtttcccaatgaagtagctagagaaatccccaaggaacagaaggggtttgcagccccctaggaggaacaaaagtatgaactaaccagtaacccccaagctccctgggactaaaccaccaaccaaagaaaacacatggtggaactcatggctctagttgcatatgtagctgaggatggcctagtaggtcatcaatgggaagagaggcccttggtcctgtgaaagttctatgccccattataggcgaattctagggccaggaagcaggagtgggtaagttggggtgtaggggcagggaggagaggataggagattttcagaggggaacctaaaaaggggataacatttgaaatataaataagggaaatatctaataaaaattaattaattaattaattaattaattaattaaaaataaattagaatggatccagatcaaggaaagtttttcttttcttgcatgcttttagtttgtttttttttaattttttattaggtatttagctcatttacatttccaatgctataacaaaagtcccccatacccacccacccccactcccctacccacccactacccctttttggccctggcgttcccctgtactggggcatataaagtttgcgtgtccaatgggcctctctttccagtgatggccaactaggccatcttttgatacatatgcagctagagtcaagagctccggggtactggttagttcataatgttgttccacctatagggttgcagatccctttagctccttgggtactttctctagctcctccattgggagtcctgtgatccatccattagctgactgtgagcatccacttctgtgt

SEQ ID NO: 2840 - DNA, 1000 bp, mus musculus
tatcaaaacaaataccaaaaagtcagaagatggcctagtcagccatcagtggaaagcgaggcccattagtcgtgcaaacttatgcctcagtacaggggaatgccagggccaagaagtgagagtgggagggtgggggagtgggtggggaagcgtgtgggggacttttgggatagcattggaaagtaaatgaaataaatacctaatttaaaaaaaagaaaatgaaaagcgatatattttatgaccttcctttaggtaacagtgtgttctctcgttttttttttaattcattttatatcctgaatgctgcacatgttcccagtcatcacctcccacaattcctacccacagctcccttcccctggtatttcccctatcctggcacatcgtctcttcagagctagccacatcctctccctctgaagccagacaaggcagcctagctagaagaacatatcacacagataggcagccactttgggatagctcgtgctccagttgtttggggaccatataaaggtcaagctgcacttctggcacatgtgttcaagggaggtccagcacctctttagttggttgttcagtatttgagagtcccaagtgtccaggcgtgttgactttttggtcttcctgtggagattcgataggcttctaggctcccattccttcctgcaactcttccatcagagtccgcaagctccatccactgtttagttgtggatatctgtatttctctgagtcagctgatggatgtaacctctcagggaacagacatgctagactcctgtctgcaagcataacaaagtatctttaataatgtcagggactgatgatctcccatgggatgggtttctagttggggcagttattgcttggttattcctttagtctctgccccatcccctgttgctgcattttttgtagacaggataagttttgggtcaaaggttttgtggatgagttgttgtccctgtcaatcaactatgatttcagcctgtttaca

SEQ ID NO: 2841 - DNA, 1000 bp, mus musculus
caaaatgatcatgggagctagagtgagggaggagcctgggagagagagaggaggacgagggaaaaagttgggcaggatcaggtgtgggaggaaacagctggggaaaagtacagagggtcaggaaattgaatggaggtatgtagcagtgggagatggggaactgggggtagccactagaaagtcccagatgccaggaaagtaagaggctccgaggacccaactgtgatgacattagccaaaatacccaacaaaggggagatagaatctgtagagaccatatctagtagataggcatggcctctggttgagggatgggggaacatacccatctcaaatattttaaccagagctgttcttgtctaaaggaaatgcagggacaaagagtggaacagaggctgaaggaaaaaccatccagagacctcctgacccggagatccatcccatccacagacaccaaacccagacactactgctgaaaccaataagagcttgttgacaggagcctggtgtagctgtcccctgagaggctctaccaatgcttgaccaatacatatgtggatgctcacagccaaccgtcaatatgagcatgggcaccctaatggaggagttaggggaaggaatgtaggaactaaaggggattgcaatcccataggaaaaacaatatcaactaaccggaccccacagagctcccagggactaaaccaccaactaaagagttcacatggagggactcatggctccagctgcatatgtatcaaaggactgccttatctggcatcaatggcagatgagacccttagtcctttggaggcttgatactccaaggtaaggggatgctagcaggagtgggagagtgagtaggatggggggggtgggtggagggaaaccaggaagggggataacatttgaaatgtaaataaataaaataaccaatttttaaaaagatatatacagagacaaaggtacctgtacttggaattgtaaaaatgacaataggaaa

SEQ ID NO: 2842 - DNA, 1400 bp, mus musculus
gaaaagaaaaaaataagtaagccccatcaaagtaataataaaagaacatttatccagggaagttaactatctagaaagggaaaacatttgaaagaattaaagacaacatgagcaaatggaaagaacaatactttacacctgttgatcaatgcatttactattattaaaatgtccatactgttcaaagtgttctgtagatttaacaaaattactccagtatatgaattaatgacttttttgttgtaagggtaaagatgcaaaatgcacatggaaccttctcatacccaaatcatccaaagatccttaaagaaaaatagagaaggaaaaaaaaggaaattggaaatgtcacactgtttccagatagtatgacaaatatctagtctaacaatcagaactatagttccttcgggtagggaacaggaatacaggtcaatggaacttaggagagatccaatagagaatgttatgcctatagggcaactcctttctgaaaagagcacaaataatacagagtaaaaaatgtctctccagttgacccagtcccttgccagatgcagcactctgaagattaggacttgaacagtagagttgtccctgctggtgtgggtgttggtgagccagccctgaggggctgaaagcaggagagctggctctgccacttctggctgcattactgggtaagctagactggagcagtgttggagaacttcccctagtgtgagtataggagagctggtgggctggcctgcttagtgaccacacaggcccaaattcagggctttgagttggttcaccctaacatcttccccatctatgaactgctgcagatgatgaaggggtgtataaattcaaaggtgcagaatctccatgacatagcccaacaataggatatttgagaagcatcctagtaaggatccagtattgatagtgtagcaagagccaaaaaccttgaacttgaccaatgactcattgcagtgaatatttgcaagaaaagaagtatggccagaagaatatattttgggatacactgtcacacattatagcttccacaacaagattttttttcttttagggagtagattagggcagaggacaggtataaagggacagggaaattagtgtgatagaggcgcttgaaatgaaattcacaaagaagcaataaaaaataaattaaaaagaactgtctatccaataaatgatgttgtgaaaaatgcatattcacaaggaaaataattacattgaattttattcttacagacacataaaattaactaatgaattaaatatttaaatgtaagagctaaatgataaacctaatcaaagcccatgtagacaatatttgaagagtccacaaggaaccaaaccagtgatctctgaatgggaagcaagcaaatacttta

SEQ ID NO: 2843 - DNA, 1200 bp, mus musculus
gcaactttatacttgtatcttctttctacttagattatttcatgtgaccattctcaccaattttcttctatcatgaatttctctccattattttagtgtttgcctataaaagattttttatgactttttagttcactttgcatcctgatcgctgtctccacttcagccctacccccaccaccgtccctctccaaatcatccttccccttctcctctgaaacagtggagatccccctggtattcctctcaccatggcacatcaagtttcttcagggctaggcacttctcccactgaaaccaaacaagacagtcaagttaggggaacagattccacagataggcaacagctttagggatagtccctgctccagttgttagggacccacatggattaagctgcacatctgctacatatgtacacatgaccagcacatgtatgctctttgattggtggtttagtctctgagagccccaagggttcaggttagttgactctgttgatcctatacccttcagggcactcaatccttctctgaactcttccaagagaccacaaggaccatccaatgtttagctgtgggtctcttcatctgtctgagtcagctgcagtgtagagcctctcagaggacagagtagctattctagattcctgtctgcaaccataacagagtctcattaatagtgtcaggaattggtgtttgtccatgggatgggtctcaagttgggccagttattgcttggcctttccctcagtctctgctccatctctcctccctgcatttctggtaggcaggataaattttgggttgaaagtcttgtgggtgggttggtgtctctatagctccacttggatttctgcctggctacaggaggtggccacttcaagttccatatccccaatgctgtgagtttcagctaaggttgcccccattaattcttggtagcttcccctactccaggtctctgacacatacttgaggtgcctccaataccccaccccatgccaacttcagattccattcattctcatggccatttggggattctcccctgtctcttcccacaccggatcctaaaacccctccatttctctccccatctcctccccacccagttccctccctccatctgcctcctatgactatttcattccatattctacatgaaattcaagcatcctcatttgtgtctttcttcttg

SEQ ID NO: 2844 - DNA, 1200 bp, mus musculus
acctactagataatttgctcttaatttgagcttatttcagtatgtagtcaaggcaggtatttttttttattattattatcttgtcttcacattctaagtgttaggataataggaatgcttccgtagacccattacatagatattttgtttctatttcatgtagaggagtacaaaatgttcatgttaatgaacccctaaagatttcaatggattgtaaaaattattttatgtatttacatcccaaatgttgccctctccttgtcccccctcccagctttattcactcttttccccctaccctttgcctctgagaaggtgctccttctcccagggcatccccctatcctgtggtatcaagtctctccaggattaggcacatcctttccccactgaggccagacaaggcagtcctctgctacatgtgtactagagccatatgtactctgcaacatacatactcagaccagaccagtatgccttttggttggagacttagtctctgggagctcccagggctccagattagttgacaatgttggtctccctgtggagttgccatcaccttcagatccttcaatccttcctctagctcttccataggcatcccagacctcagttcaatgcttgtctgtaagcatctgcatttgtctcagtcagctgctggcagagcctctcagaggagagacatattaagttcgtgtctgcaaacaaaacatagcatcagtaatagtgttagagtttggtgcccacccatgggatggatcccaagttgggatagtcacagggtggccattccttcaggctctgctccatttttgtctctgcatttttaaaagacatgaagaattctgagttaaaaattttaaaggtggattgttgttcacatccctccactgagggctcagtctaactactggaggtggtttctctaggttccaaatccctactgatgggtatttggctaaggtcacccacactgagtcctgggaacttctcacatctcaggtgtctgggactttctagaggttctttccatacccatcacccacagctgcatatttccattcattcttctggccctttgggcttctctgtctcccctatacctgaccctgtcctcattttgccctccccattccctctaccacccagatacctttctcttttccccgctccctccttccctccctccctcccacc

SEQ ID NO: 2845 - DNA, 1000 bp, mus musculus
tgaaaaaaaaatcaagaaatactaaccaggcatgatggcacatatgtacatatggaagttatgagatatacatagcagaaacaggagttcaaggtcagctaatctctcaattttgtttgtttgtttgtttttgtgtgtttgtttgttttttgagacagggtttctctgtgtagccctggctgtcctggaactcactttgtagatcaggctgtcttcaaattcagaaatctgcctgcctctgcatcccaagtgctgggattaaaggcgtgcaccaccaccgcccagctcaaaatttttcattagatatttactttatttacatttcaaatattgtctcctttcttggtttcccctctgaaaacttcctatcccatcccccctccccctgctcaccaacccacccacatcctcttcttggctctgtcatttctttacactgaggcatagaaccataagaccaaaggcctctcctcccattgatggctgactaagccatcatctgctacatatgcacctagagccatgagtcccaacatgtgtactctttgtttggtggtttagtccaaaaattaaaaagaaaaaatattggaactcttttaagtcttaattttaactgaatgaatgttaaagtctatggttttgcacatttagcatatcacaaatcactgagacttgcaagagacaatataaaaattctagtagaataatttgtgtgcatgtggaagagttcacgggggcatgaatgcaagtgtggttaaatgtgcattgtgtagcacaggtcaaattttatatgagaagacttcaggtattattcttcaggtcccagccatcaataattagtggtggtgaggaagactgggtttctacttaccctggagcaatgacatatgatacacacacacacacacacacacacacacacacacacacttttgaaccattaagacagttaagctcattgtgggtaatttgtataaggtagaaataataactttatcca

SEQ ID NO: 2846 - DNA, 1000 bp, mus musculus
tctattggtcaaaatagtaaaacattcttttttatatttggaaattaatagagggtgattataaagatttttaccactgggcgtggtggcacacacctttaaatctagcattcaggaggcagaggcaggcggatttctgagttcaagaccagcctagtctacaaagtgagttccaggacagccagggctacacagaaaaaccctgtcttgaaaaacaaacaaacaaaaagtttcttaccatagaaataaatgataagtataaaatgtaatgtctatgctatgtcttgattgaataattctgctagtttcacagacttcaggataccatgtagtgtgcaataaatttatactttttaatttgcttgttatggtaaataaaactcagcatggttctatagatcaccaaatatagatttttgatgccaagcctgataacctgaattcagtccccacggcaaacaagttgataaaaagaaaagacttccatatatatatatatatatgcaggtgatttccacacacatgcaatagcactcatgtgcacatatgtacaagaacacacataaagaaataaatgtaaaaatatagtttttaaagtttttattaacaacttataaacaattagtgatatatgcatcaagattgactacctctgaatacttattttaacaagaacaataaaaaagagcatctgtagccttcttaaaagtgtttcagattgattctaacactgtttattcataccatgataaataatgtgaactggttgatttttgtacctctcaaatttatctctccataattttatcccattatatttttgcatacttcttgaaaaaaatctaggttagtcaatataagaaaaatgctacagagtttagaacattccctaaataactatttttagggaatatttttagggaaaaactattttttaacaagttctgtagatgtttaactctggatgcattataaaacatgtgtttaagagtaccacttt

SEQ ID NO: 2847 - DNA, 1000 bp, mus musculus
tcctggccctggcattcccctgtactggggcatgggatcttcgcaatagcaagggcctctcctcccattgatggcctactaggccatcctctgctacatatgcaactagagacacagctctgggggtactggttagtttatattgttgttcctcctatagggttgcagacccctttagctcattgggtactttctctagctccttcattgggggccttgtgttccatccaatagatgactgtgagcatccacttctgtattttccagacacttacatagcctcataagagatatttcacattgtttctagaactaaaaactgacctgctttgtcattgcagtaagatggtacttcttagttaaaatgagaaataggagcccactgtgtatatttgattggtgaatagaagccagtaaaattaggacacactgagatagaattcatcaaaagactctcactacaggaagtaaatgagtactagcctaatctatgttctcaccttttagacatctgtaaaatttgtgctacctgaatataactaaggaggtctagactattatctttttttctttagttttcccaagcctatgttcatacttgttaagcttcacatatttgagagaaaatgttcaatataagaagatttggatttggtcatagtggaactcacatgtaaccttagctttcaggaggcaagagcaggagactaaattgaaaatcagcctgatttacacagcaattctccatcccaacacacacacacacacacacacacacacacacacacacacacatacactcacacacatgcacacacacaccgtcataatcgtcatcatcattttcctcaccatcattagcactaccaccaccaccatcaccaccacatttatcaatatcacaacgatagatcaaacaattgttgatatttctttataaaaataacaatgaatttttattgaaagtttcctgtcatactggttttcagctagattttaa

SEQ ID NO: 2848 - DNA, 1000 bp, mus musculus
atgaaggtattcaatgttttaaaatatataactcttgttttgttcatttctctctttttttattcactttacaacctgatcacagcttccctcaagcctatcttaccagtcccacctttacaaatctctctttccagtaactcctctccttctcctcattaaagatgatccccctttgatattactacaccctggggcatattagtcacagcatgactaggcacaccttcttccactgaagcctaagcaggtagtccagttcttgggaagggggaccaatagtagcaaacagagaccaagatagacccactccaattattaggggacccacatgaggactgaggttgacattttctacaaatgggtagggggtcttatgcccagctcctgcatgttctctggtttgtggaccaggctctgcaaacccccatgatcacaggttagttgactctcttggtcctcttgacttgcttatttctattccctacttttccacaagactccatgagctccatctgatgtttggttgtggatatctgcatctgccttcatccactgctgcatgaagcctcatgagagacaattttattaatttcctgtctgcatgcacaatagaagtatcattaatagtgtcaagggttggctctctcacataagatgggtctcaatttggggcagtcattggttggctattacctcactctctgctccaaatttatccctgcacatccaattgatttaaatcagtaggacaaggaattctgttacatttaaaacaatctatttaaatgggcaatattgcagttctataatcctaaatatttggaaggctgaggcaggactgtcataagatcaaggcctgactgggaaaaagcaagattccagccagcttgtgcaatttaatgaaacctctctcaaaataagattgtaaatggaatttgaatatacctgggtggtaaagtattgtcctagctaatatgcatgattccctagattggat

SEQ ID NO: 2849 - DNA, 1000 bp, mus musculus
tgtatgtcagaaagtatctgccaccccaaatcctttaatgtatttgtctaccaacatttattttcctgtcagatgcactcttggaaaaatttcttgatatggggactttctatgctggttcacatccattataattggtttcttgagtttacccgtggttatgttagatcatttctttctttttgctatgtgcatcttaggatacatttttggtataatgaacagggcagagtttaagtttgtgttttgaagtacatcagtacttaggacaaaattgatgttaatgtatttgaattgactatgccctctgtaatcttaaccccaagtgctcttaatagtatcccacaaacactatctaaattcctaccattatacattccccgtgagcatgcttttgtggtttgcatgttctcttcttttctattgactatcctcagttgaaggttttgccacttgcttccatttccatctagttggccgttttccttggtgatccctttaaatgttattatcacttaggacttaattgccattgtctgtatccttttatgactatcagattgtctacttggtcagtgttcagagtatactaatcatcaaatatctttagatttgtattatgatcacaatacacaatagaaaacttactgtgttaaattgtttaaatatcagcaatgtatcatagaatctaataaacaaaatctaggccagtgaccattgctgtgttagatgtctatattcagtttcagtcaaaattttctagctaacccaccattacatagatgtctgaaactgtcttttttaaactttacaatatcaaccaaccagaccccacagagctcccaggaattaaacaccaaccaaagagtgcacatgataggacccatgcctccagctgcaaataaagcagaggatgaccttgtagaacatcaatgagaggagaggcccttggtcctgggaaggtgggatgccccattgtagaggaatgaatgctagggtg

SEQ ID NO: 2850 - DNA, 1000 bp, mus musculus
tagaaactacagggttgcccccactaactattactctttttttattagatatttttgtatacatttcaaatgctatccggaaagtttcctatactctcctcccgccctgctcccctacccacccactcccgcttcttggccctggcattcccctgtactggggcatagaaagtttgcaataccaaggggcctctcttcccagtgatggtcgactaggccatcttctgctacatatgcagctagagacacgagctctagggttactggttggttcatactgtttatgtttgcctttgaattgttgcatgtgacaacagtaacttatgccagtaacttatgtagataggacattattactccaagttaaaatagccaaaatgatacatctcagggttgtgacaataccctaaaactatatacaaccaattcttttcctctattctcagccactttcagaatgtggctttctgtccagtgtcctaaagacagatattctgctcgaagatagcatggctgtgctttaaaatggaagagggagataatgggccaactaagaatgtcttcaaaattagctttgctctttgactaaggaaagcaaaagcttctggaagcctcacacagaagtctacctactccacactgtccataactgccagaaatcctaggaggattgcatatcttattagcgtctctttctaaaatcataactcaaaatgagaaaatcaatgacctactcttaaaacctagctgttctgtgtgttattctttttgtttttgttttgcttaatgaataaataatggatattgggtagccaactgccaataccttcccagattatttgaaataatggatatttcttttccttttgacttcatattaatttagctaaatgttctgattcagtctgtcatcttcattttctcattacaaaaaatacatgcaagtataagtgtaaaggtatcatactgctattaatgtgtaaggttatatattggttat

SEQ ID NO: 2851 - DNA, 1200 bp, mus musculus
tatatgtttgagaaatttaagtattagtactccagttacaataagctgagcataaccctttgcttctcctctttatatttttatccaataagtatttttatatctaattagagaatcatcacttccatgtgttgtagaattacatagtagtgaacccttgtaatagcattaggtttgtgacctagtaaatttaagctttgtaattccatgtactttttaaatataaacttcatgattctttgtttttcttttctttcttttacattagatattttatttatttacatttcaaatgttgtcccctttcttggtttcccctctgcaaaccccctattccatccccccttaccctgcttctatgagggtgctcccgcacctacctaaccactcctgcctcactaccctaacattcctcttcaatggggtatcaagccttcacaggactaagggcctgccctcctattgatgccagataaggcctcttcagttccttcattccttcccctaactccttcattggggtctttgtgctcagtctgatggttggctgtgagcatctgcatctttattggtcaggatctggcatagcctctcaggaaataattgtatcatactcctgtcagcaaacacttcttggtatctgaaatagtgtctaagtttggtgtctgcatgtgggatggatccccaggtggggcagtctctggatgtcctttccttctggatgtctctgctccactcttggtccctgtatttcctttagacagtagtaattctgagataaaattttggagataagtgggtggctccatccttcaactgtgaggccatgcctaacttctggatatggtctcaacaggttgtccctcccctttgtgggtatttcagctaatgttatccctgtagggtcctgggaggctcttgctttcctggcatctagtactttctgattgctatccccagattcccatcccccattgctacatacctctgttcaatttcttgaccctctgtacatctcctctatctcctcccataactgattttaatatgttatgtatgctagaatagatgtggtagttaaggaaatgtaaagaatttcatacccaagtaaaccaatgattcacaatgcataaggcagagagagaggggtgtgctaacaaaaggagattccagattcataaaattgttacatgtatgtta

SEQ ID NO: 2852 - DNA, 1000 bp, mus musculus
taagattccattccttggagtacttaatcaaattcggatagagaaaacagattcacagatatctagggctttgatgaaggaatataagtacagaatcatatactgtttatgttagagttgattaaaaccttgtggaaatggatgatagggatgtttcacttgatggtgtgcctaatgctactgaattgtacagtttatgatttaaatgataaatttcatgtaggatactgctatgtggatgtgctggcacatgtctgcattcacaacaatccagaggctggagcaagagaattgtgagttcaaaatcagctctgagttacatagcaggacaatgtctttaagaaaaaaaagaaagaaacttgggctcaagctcagctgacagtcccactgtccccagaggactctcctagtcacaggtgcccaaccctgcccaggatcttaggattactgaggagagtcaggctccagagagggctctgaccatgggactcaggtgagagcaccatcttgtatcccaggtctttcagagaccagtccacacaggaaagcacttggggcacagaagcaacagagatttttggacagggtcctttcgggcttttactgtcaggcaagaggttgacctgagcttcagacatctgtgcaccttccctgcaagaggagagcttgcctgcacagagtgacctgaccactgggacccaggagagagttggactcccaggagtgctgacagaggctaacagaatcacaagaagaacatgctcaagccagagcaagctagaacgtctaacaccagagattaccagatgacaaaaggcaaatgaaagactcttaataacagaaaccaagaccattcagcatcatcagaacccagtacgcccaccacagcaagttctggatgcccaaacacacccgaaaagcaagattcagatttaaaatcatatctcatgatgctagtagaggatttaagaagggcattaacaactcacttaaagaaata

SEQ ID NO: 2853 - DNA, 1000 bp, mus musculus
taagtattgatatataaagactggggacaaaagaataaactaattcattaagattatatcaataatccttctgcccagtgcttgctgttggggcagacccatagttggtctgctcctgtgaagactccatatccaatccatcctagaggacctgctgcatgcagagcagttggtaagaatcccccaccctccaccctgagtcctggagctgctgctgcgaacctggtggacttgggacccatcttcccccaaaaccccgccctcttgaataccactccccttccttccattcctcccaaccctttcacctggttcttgctgccgggacagacacaaagttggtctcctcccatgaagactccatatcccaacccatcctagagaacctgctgcactcagagagcagttgacctctacgtggtctgcttccatgaagactccatattctaatacatcctagaggatctgctgcactcagagcagttggacatactgcactcagagcagtcgagaagttgagggccctctgcactcagaacagagcagttgaggatcagctgcactcagcacaattggacaacagcttgaacactccacagaagacccaactctgaaggcctcccatgagccctactgtagccagtgcaacagatcagcagcttctctgcccctgtgaagagcccccagttagaaggacccacaggtggtctgacacagccaaggcctcaagcctaacaggagacctgaagcaacccagggacaaaagaggcagactccatacagtcacccagaccaacaaacaccacggatatccagatggcaaaaggcaagcacaagaccataagcaacagaaggccaaaatacgtgggcatcatgagaacccagttctcccaccacagcaagccctgaatagacaaaaactcctgaaaatcaggaatctgccctaaaatcctatctcatgatagataatagagtcctttaggagcataacaatacctca

SEQ ID NO: 2854 - DNA, 1200 bp, mus musculus
agccccattactaaatagcatcacattggacactgtggcttcaatgcatgcaattacacttactaaattactccctttgaaatctgtaacattatatactgctagtggacaattctgggctttgttaacaataatagtaaggcaaatgcaacaaatctgactacaattttctttctttttttttttaattcttagtggtactaatgagccagttcagatataggaggagatagaggagaagtacagagggacaggaatttaaaagtaggtgtgtagcagtggatggggaacaggggccggtagtgactagaaatcccagatgccagggacccaagaccttcccagcacccagcagggaagactttagccgaaatacccaagggaagatagaacctgtatagaccatatccagtggataggcatggcccccaattgaaggatagggccacccacccatctcaaaaatattaatccagaattcttccggtcaaaaggaaatgcagtgacaaagagtggagcagaaactgaaggaaagaccatccagagactgtcccacctagggatccatctcatctgctgacaccaaacccagacactattgctgatgccaagaattgcttactgacaagagcccagtatagctgccccttgggcagttctgccagagccggaccaatacagatgtggatgtatacagtcaaacattggactgagcatggggaccccaaaggggaagttagggcaaggactgaaggagctgaaggggtttacaatctcataggaagaacaacaatatcaatcaaccagacccccaaaactctcagggactaaaccaccatccaaagagtacacagggggtatccatgaccccaactggatatgtagtgaaggaatgccttatctgcatcactgggcagggagccccttggtcctgtggaggcttgatgacccaggataggggaatgctaggcctctgaggcaggagtgggtgggcaggttggggagcaccctcacggaggcaggggaatggagaaggggatagggagattgtggaggggaaactggaaagggaaataacattcgatatgtaaataaatacaataaccaataaaaaaaacccaaatccttgtgtacagtaagcaccaagaccaagagcatggctttctaaaaactaaatatgcccttattgttaaaatacgt

SEQ ID NO: 2855 - DNA, 1400 bp, mus musculus
ggagatacttggaagatgatatagatatagatatagatcccacttttctctcaaattttccctgaaattagcattcattagtgatacatcaatcaatcctatgatggacgaaagtgttcccagctctaacattagcctgtatgtttaccatttggattctcctgtgagtatatgtgtgtgtatttagcttttcatcatctgtgtgaatttcaggtgcttcatttctataggcctataattcatttgtgtccctcctcccatctttcccttctaatcagagagactagagccccattccctggcatccccccactctggcacatcaagtctctgcaagtctaggcagttcttctccaactgaagccaaacaagacagccagagttagtggaatggattcacagacaggcaacggcttttgagatagctccccattctagttgttcaggacctacatgaagaccaagctacacatctgctacatacatgcatgggaggcctaggtccagcccgtgtatgctctttggttggtgtttcagtctcagccccaagggtccaggctagttgactcttggctttcctagggagatcctttccccttcagagccctcagtctatcccctaactcttccataagagtacccaagctccatccactgtttggttgtgagtctttgtataagcctgagtgagctcctctgtggagcctctcacaggacagccatgctagatttatgtctgcaagcataacagagtattgttaatagtgtcagggattggtgcttgaccatgagatgggtctctagttggaccattccctcagtctctgctccatctcccctctttccatttcttgtaggctgaataaattttggatcgaaagttgtgggtaggttggtgtctctgtagctccactggggttcctgcatggctacaagaggtggcctctttaggttccatatctccacttggtctcagctaatgtcaccctcattgattcttaggagccttccatatcccaggattctttgcatgtccttgagacgcttcccaccccccaccccctccaggctgtagatttccattcattctcatggccatctggccatctcccctgtctctccccacatctgatcctgaaacctccccatcccctctcccacccacttttctccctccatctgcctcctatgactattttgttcccccttctcagtgagattcaaactattttgtcctaatggcaatgtcctttgcctggtcctcggtgttctgttcaggaatttgtctcctgtattaaagaattcaaagctattctcactttctgttctattagatttagtgtatcggattttattttgaggtctttagtccacttggacttgagttttgcgcagggtga

SEQ ID NO: 2856 - DNA, 1000 bp, mus musculus
ctactggaatgacattcattggaattgtgcatcttataatgaaccggtggctggggaccaaggcaaagagacaagttctgttgctgctctttcatattcctctgtggatgaaacacaagttcaaagtctttatgtgagctgcaaatcctctgggaagtttatttcatcagtgcatgcaagggcgagtcagcacagcagaagccagagcagaacagtgctgcaggcaaacagcaaccctgtatttgaaagtccaactttagctgcagttggtatatgcagagatgtgatcagggagacctacttggttccaccttcttgtaaaagtatttgcaaaaattacaacgacttacatattgcagggggacaggtgatggccattaactcagtaatggcaaatttcccctctgagagcagctttgaagatggtcctttgctaaagtcatctgagatttctttgtccatggaggattccacttccactcagctcactgaacttcccctcaaacctatccagcggtactcatcctactggaggataaccagcatcaaagagaaaagcagcctgcaaatgcagaagcctatttcaaatgcagtgctcaatgagtacctggagcagaaggtggtggaattgtataagcaatatattatggacactgtgtttcatgacagttctcctacccagattctggcatcagaattcatcatgacgaatgtagatcaaattagtcttcaagtgtctaaagagaagaacctggacacttcaaaagtcaaggacatagttattagccacctgttgcagttggtatcatctgagatcagcacccctagtcttcatatttctcagtatagcaatataactccatagagaaggctcctgtcaattccccttattcctatgaatcccaaggcactattgtattaatttgatcagaggatgtgatggagggaattctggaagggaattaacaactagtaaaggacactttgagaaatcacatat

SEQ ID NO: 2857 - DNA, 2000 bp, mus musculus
ctaaggtatcaaaccagtgtagaagcccatccacagatagatggataaaaatcatagttcttaaaaagaaaggagtagccagtcctaaagcaattgaaatcatgtagttttaaagaaaatgcattcttctgtaaatgattaatgaggcgacatagattcagaaactcaaatatcacacttgccaatatatctgagattatactttgtgtgtatgtgtgtgtgtgtgtgtgtgtgtgtgtgtgtgtgtgtgtgtgtgtgtgtgtgtgtgtctgtgtatgggtatggaaataggtcaggaaactgaaaaggggaacaggtgagaggaaaatgaggtcttaaatgagaggaaagaagaagctaatagaatggaacagacaggagggcttggtggtagggctaaaataggagaggaggagcaaccaaagcactctgtggaagataatggaacctattatctagagtgcttaaaaaatttttttgtggttgtttttgatttttcaattttatttagtctttttttttaacaatacagatattatccccttcccagtcctccctctgactgttccaatacttccatccaatacctcatccccacctcatcttcacgaggatgtctccaccccaccccccaccctaccaggcctctccacttcctggggcctccagtctcttgagagttaggtgcatcttctctgactaaacctatacccagaagtcctctgttgtgtatgtgttgggggcctcatatcagctggtgtatgctgtctgtttggtggtccagtgtttgagagatctagggggtccaggttaattgagactgctggtcctcctacagggtcgcccttctcctcagcttcatccagccttccctaatccaaccacaggggtcagctgcttctgtccattggttggacataaatatctgcatctgactctttcagctgcttgttgggtatttggagggcagtcatgataggtccctttttgtgagtgctccatagcctcagtaatagtgttaagccctgggacctccccttgagctggatcacacttaggaactattactggatcttcttttcctcaggctcctctccatttttgtccctgaagttctttcagacaaggacaattaagggtcagagttttgactgtggaatggtaaccccatccctcacttgatgtcctgtttctgttggaggtgggctctataaattccttctccctactgttgggcattttatctaaggtccctccctttgagacctgagagtctctcacctcccaggtctctggtatattgtggagggtccccccaacttcccacctcccgaggttgcctgtttgcattcattctgctggccctcgaggcttcagtcctatttccccacccaacaataccttatcatgtaccccctttctcctccctgtcctctctcccactcaggttcctccctccctctccacttgtgattgctttctccctcccaagtgggactgaggcatccttacttgtgcccttcagcttgttaacctttttgatttctgtggactgtatcatgggtattctgtactttttttccctttggctaatatccacttgttagtgagtacatattatgcatgtccttttggatctgagttgtctcactcaggatgatattttctagtgcgacccatttgcaaaactcaggatgtctttgttcttaacagctgagtagtactcaattgtgtaaattaactacattttctgtatccattcttctgtcccaggacatcattcttttttatttaaaaaatttaattaccttttttgatattaaagcataattgcatccaacatccagacttaatgtggcataatttaaatgttaaaattatatttagtatgtacaacataatggtttggtatacatatacatttgaaatgattagcacaatcaaaataattaatacctatcatcccactgtgtcacttgtgtgtgtatgtatatctgtgt

SEQ ID NO: 2858 - DNA, 1200 bp, mus musculus
tatgattaagtggccaaagagtgggtgcttcgatccttcttaaaagggggaacaaaatgctcacaggagcaagtatggagacaaagtgtggagcagagactgaaggaaaggccatccagagactgccttacctggggatccatcccatgtatagtcaccaaaaccagacactattgtggatgctgagaagtgcatgctgacaggagcctgatatagctatctcctgagaggctttgccagtgcctggcatatacagtggcaaatgctcacagccaatcattggactgaacatggggtccccaatggaggagtaagagaagggactgaaggagctgaaggagtttgcaaccccataggaggaacaacaatgtcaaccaaccagatcccccagagctccaagggactaaaccaccaaccaaagaatacacatagagggacccatggctccagctgcatatgaagaagaggctgtccttgttaggcaacaatgggaagagaggcccttggccctgtgaaggcttaatgccccagtgtaggggaatgccagggcagggaggtaggtgggggttggtgggtcgcagagaaccttcatagaaacaaggggagggggtatgggatagggagggttttttggggggggaccagtaaagggtataacatttgaaatgtaaataaagaaaatatccaatacaaaaagaaaatagaaaacttgatcttccttccagtccttatctccacctgcacatttggcagattggctccctatccaccgacctatcccacagccctgcctgtctcctaggaggtctcctgtaaccagagacacaggtgagattccctccccaaaccccagacatgggatctgccctgccctgttggagcccaatctcccttatgctctacacctccatctgcactctcagtggatcagcaaaccagacccctcaaccacacagccctgcctgtctcccaggaggccttctctaacccaagaaacagctctgtctacctcccaggaggcctgcactaacataggacagagatctacctgcctccagggagccatgctccaatcccagacatctaggctggccaaccccagagacaaccagatggcaaaaggcaagtgtaagagcataatcaacagaagccaatgcaatataacatcatcagcacctagctctcctactacagcaagcc

SEQ ID NO: 2859 - DNA, 1200 bp, mus musculus
agcatggtagttttaagtgaatattatccaaaagtacagaatactcatcatacaatccacagaccataagaagtttaacaagaaggaaggcccaagtgaggatgattgaataccacttagaagggggaaccaaataatcactggaggcagagggagggaggatacttggtggaagggggtagggaaaagggggcaggattaggtatgggggatacaggagaaaagtcaagagagccaagagaatgaatggaaatatgcagttacttgtggtaaggttgaggtgggagaatttctaagaagtcccagagacctgctatcattgagggttaccttagctgaaatgtccatcagtggggttatggaacctcaaatgaccacatctaatagacaggacccacagtggagggatggggatactaacccacctacaaaattttcaaccccaaattgcccctgtctaaatgaaatgtgtggacaagaatggaacagaggctgaaggaatggcccactggtgacctgttgaacttgagacccatcccatgggcaggcagcaattcctggcactattattactgatgatgactaagacagatgcagatacagccaagcttggaatagagttcggggatccctatggaagagttaggctgaggattgaaggaactgaaagagatggcaaaccccatagcaagaccaagactgtcaactaacactctggatatcccagaacctgagccaccaaacaaagagcatacgcaggcttctcagaggttcctagcacatgtgtagcagaggtctgtattatatggcctcagtggaggaggatatgtctaatcctgtagacacttgattccctagggtatttggggggtgggtacccacaaggtaggacgccctctcagaagtgaagggggaatggaaggaacaactctgcaagtgggaaaccaagaggggcaggatttaggatgtaaattaacaaaataattaattaatttggaaggaaaaagaacaaaaaagaaaagaaaggattaagattagaggatacaataggtttgcatactaaaagtatcaattagggaaaactttaaaagtttccttaactttgaaattttaagggtgtttccttaactttcagggtgtaagggtccttttgcgaatccatttaaataaatgatatttttttatagagttgggggtaaa

SEQ ID NO: 2860 - DNA, 1400 bp, mus musculus
aaaataaaaatggtaagcaaaatgaaaaagaaaaccaatggaatgggagaaaaaattataaactttataagggttaacatataaaacatccaagaataaattttttcttttccttttgtttattggatattattttctttacatttcaaatgtcatcacctttactggtttccccccaacatcgaaaaccctctatcccatcccaccttggcctgattttatgagggtgttcccctacccacccacccacttctgcatccccatcttggcattccccagaactggggcaccaagccttcgtaggaccaatgtcctctcctcccattgatctccaacaaggccatcctctgctacatatgtggctggagccatgggtccctccatgtgtactctttggttggtggtttagtccctgacggctctgggggcgtctggtaggttgatattgttgttctttctgtggggctgcaaaccccttcaactccttcagtcctttctttaactcctccattggaaacttcgtgttcagtccaatggttggctgctagtatccatctctgtatttgtcaggctctggcagaacctctcaggagacaactatatcagactcctgtcagcaagcacttcttggcatctgaaatagtgtctgggtttggtgacatatgtatatggggtggatccccaggtgggacagtctctggcttttccttcagtctctgctccaccctttgtgtccctgtttcctcccatgagtattttgttcccccttctaagaagcacagaagcatcaacattgtggtcttcattcttgagcttcctgtggtctgtgaattgtatcttaggtattccaagcttttgggctaatatccacttatcagtgaagaaatttttataaggcaatagtaaagaaaaaaaaaccaaaacaaaacaaaacatttgcttatccactcaaaaatggtcaaaatgcctaaatggacttctctccctgcagaaaatagaaagtagccaagagatacatgaaaacatagtccatgatattagtcatcaaatacaaaattaaaactttaatgagttatttcatactcattaagatggctatcatcaaatggtggcaaaagacaacacatatttgtgagtatatggaaaaatgggatctttcattttgttaatactataaattggtaaggccattatggaaacaatatggagatgaaatatacagctggcacatcgtccaaaaatttcactgctgagtgcatgttcaaaagtaataaaatgagcacttcatagaggaaaatgtaatattgttcaccatagagaatatatatatatatatatatatatatatatatatatatatacacacacacacacgtgtgtgtgtcctaaatgaatgtgga

SEQ ID NO: 2861 - DNA, 1200 bp, mus musculus
atatattactcttaaatctatacaatctatatcctaaaaccctttaagctacatattattctgaaatgctgggtatacacaaagtgatacaaaaatcttgcacatctaagagttcagcctattttatatggggttatatccactctcatcatattatggctaaatttaccttgagatcccattactgttttgtaataccattatcatagtgtgtttaattcataaggtgcaatgtcattgagatgatcaataaagagtctctctctttttttattggatattttctttacatttcaaatgttttcccctttcccagtttctctccctccaggaaacatcctatcacatcctccctcaccctgcctctatgagggtgttcctccactcacccacccactcccacctccctgccctcgattcccctatactggggcttctatggagtcttcataggaccaagaacctctccttccattgatgcatgacaaggccatcctctgctacatatggagttggagccatgggtccctcctttgttgatttagtccctgggagttctgggggtctggttggttgatattgttgttcttcctatggggatgcaaaccccttcaattccttcagtcctttctctaactcctctattggggactgtgtgctcagtccaatggttggctgtgaacatctgcctctgtatttgtaaggctctggcagagcctctcaggagacagccatatcaggctcctttcagcaagcacttcttggcatccacaatagtgtctgggtttggtgactgtatatgggatggatctccaggtggggcaatctctgtatggcctttccttcattctccactcaacactttatctccatattttctcctgtgagtattttgttctctttgtaagaaggactgaagcatccacactttggtcttccttcttgagcttcatgtggtctgtgaattgtatcctggttatttggagcttttgggctaatatccagttatcagtgggtgcataccatgtgtgttcttctgcaattgtgttacctcactcagaatgatattttctagttctatccatttgcctaagaatttcatgaattcattatatttaatagctgagttgtactccattgtgtaagtgtaccacattttctgtatccattcctctgttgaaggacatctgggttcattcc

SEQ ID NO: 2862 - DNA, 1200 bp, mus musculus
tgaaatgtagattataatactaaacttgtaacttttttgatgtttggtagtaataattttaggttgtacagcatgcagattgttgctctcatccaacagtcgttctaacattgacagttttcttatatattcttgaaataaccaaaatacactaatttttatgaacagggaagaaaatggaaaacaaagaacaactaagaataataatcactttaagaaaactgttgcttgcaggcaggagcctagcattgctctcctctgagaagctctatctaccagcagccgactgagaccgatgcagatacttatagcctagccagccaaccattggcctgaggtcagggaccccattgaaagagttaggggaaggactgaagggactgaatggggatggcaaccccataggaagaacaacaatgtcaactaacccaaacccctcagagctcccagagacttagccaccaaccaaagagcatacatgggctggtccatggccccagctaagtatgtagcagaggggctgccttgtctggcctcagtgggagaggatgtgcctaatcctgtagagacttgatgccccagggaagggggatgctggggggacagctgggggaggaggtgggtagaggaggtggggtcacaccctctcagaggcaaaggggaggggtaaataactctgggaggggggaccaggaagggggtcaacatttggaatgtaaataaataaaataatttaataataataaagaaaactccatgaaaaataatgtttctgcagcccgtcctttaccttagtggcaacaggaaaagcgtaaatggagaggatgttggacaataccaataaaccactccttttcacacatttgacaactgatagctctggctatagacccatggaaacagggacaaagtttcattttcttttgcactattaaatgtaaacctgacaaagtgaaatgcttatcaacagaattgagaaactgcaataattttcactaactcttgacacttttcaagctctatgtgttttgcaaggttaacttacattttccaagtgaccccaaaggaacacaaaataccttgaagttcactaatggatggtgtagggaggtcaattttatgaaccctagattctttttagaatgcacagatattcttggatggcttgaggcaaatgataattactgtttctataaaaca

SEQ ID NO: 2863 - DNA, 1000 bp, mus musculus
caaaggggaaagagaaccatatccagtggttaggcatggcccctggctgagagatcagtccacccacccatctcaaaaatattgctcctgactaaaggaagtacagggacaaagagtggagtaaaaactgaagaaaaggccatctagagactgcctcacctggggatccatcccatctgcaaacaccaaacccagacactattacagatgctaagaagcacttgctgacaggagcctggtatagctgtcccctgagagtctgtgccatagcctgaccaatacagatgcggatgttagtagccaaccatcaggctaagcatggggaccccacaatggaggagttagatgaaggagctaaactgaaggggttagcagtcccacaggaagaccaacaatatcaaccatccagaacccccagagctcccagggactaaatcaccagccaaagagtacatatagtgtgaccaatggctccagccacatatatagcagagtattaacttatctggcatcaatgggaggggagccccttagttctgtagaggctggatgacccagcataggggaatgctagggcactgaggtaggagtgagtgggtggataggggaccaccctcatagaagctggaggaacagggaaggaggataggggatttaactgggaaggaggatatcatttgaaatgtaaataaataaaataaccaacaaaaaagactatacatttcatgtataaaattatctaagaaggaatacaactaaaatttgtcccttattaatacagtatgcataagttaagtattaaataagaaaatactactcatttcattttcttagtttttttgagacaaggtctcaactatggagcctaggttggcctcaaacttggcagtaatcattttaccttgtcatcataggttctgagattgcagatgtgtgcctggctgccttgagtatttttgaaaaaacacatttctacaaaattcttgcaattgtaagcgta

SEQ ID NO: 2864 - DNA, 1000 bp, mus musculus
ccaagaaacatgtgtctcactttccagtcttcaaattccattgttgcttcttgttagaaggaatcccagaagaaggacattcatataaaaatctatttgagtagtaaagagagattgatttcacttccagcttgtcatagtttggtttactattgctatgatacatagcaaccatgaccaaacagaatttgaaaaggaaaggatttatttgttcaacacttccacattgatcatcgatcactgaaggaagttaagacaggaaatcaagaagagttggaacatgcagacaggagctgatgcagagggcatggcttgctccccatgacttgctcagcctgctttcttgtagaatccaaaacaatcagcccagtgatggcaccactcacaatcccgggactgccctcattgttcactaggaaaatgccttacaggcttccctacagccctattgtgtggagtcattttctcaacaggagtcccctcctctcagatgacactagcctttattaagttgacacaaattacccagcacacagatcttctactaacccatagtacataaatttgtatcactaactcatagtgcagatgctgagacaccatatgatatatccaagttatccaagttgtcctccttacaataacaaatgtgggagttgaattgcatgattttaaaaaaatcatttctagcaaaagtagtctagaaatctacccatatcttccatgaatataaatatatttgcaaagtttctttcaaatcagtgcaagcaaaatcctaactgtaatattgttttaaatcatgttttgtgatggcatttgtccttcattttgcagttataaatgtctatttgtgaggtataagaaactcatataaatgctaaaggaacacaacataatacctgtggagaaagcagctgcactgcagacctgctctgcttgctcgaggaaagctgtctcatttaacccatttcgaaaaaattgaggtgaacagaaatattca

SEQ ID NO: 2865 - DNA, 1200 bp, mus musculus
aatattttatgaaactatgttatacagttgattttattgtttttttctttttttaaattataaattttatttacatttcaaatgatatcccctttactcatttcccctccaaaacaccccctatcccttctgccctctccctgatcactaacccttcacccctgcagaagctcctgcttctctgccttggcattcccctacactggggcatagagccttcacaggaaaagggcctctcctctcattgatgtcccacaaggccatcctctgcttcatatgtggctgtagccatgggtccctccatgtgtacactttgcctgatggtttagtccctgggagctctgtaggtactggttggttcatgttgttcttcctatagggctgcaaactccttcggctccttgggtactttctctagctccttcattggggaccctgtgcactgtccaatggatggctgtgagcatccatttctgtatttgtcaggcactggcagagccttttatggggacaggtatatcaggctcttgttagcaagatcttgttggcatctacaataatgtctggttttgttagttatttatgggatggatccccaggtagggcagtctctggatggcctttccttcagttaaaaaatgttttaacttatgttacacaattgctaagttgttcaaggtaaagtcaatgattcactctaattaacacaaagaactgtttgaataagtagaaaaaagcttcttatatggtcttacatgcaaggggagagggcaggaggaagcaagcaagggagggaaagaaagagggagggagggagagatggggagagaaagagagatgaagagagagcgcgcacgcgagagagagagagagagagagagagagagagagagagagagagagagagaaggggttgacttggtatttggcaggcatcaaggttattcctgccaatgatactaacgacgctgacatgttcaatcaagagttggccatttatatcaataaagattcagtttctctattatctctcctttgacagtcatgatttttctgtcactctatattactacttgttgaagagatgagggagacctccttattctcactcttggatattttcaaacctatccctttcctagacagggtgattgcagacttcatcttctaccccagaggatgtatgatggatcctagtgt

SEQ ID NO: 2866 - DNA, 1400 bp, mus musculus
gttctacctcaagacccagttataccactcctggacatatacccaaaagatgccccagtataccacagggacacttatgcaactgtgttcatagaagctttattcataatacccagaaactggaaacaacctatatgtcccttaactgaagaatggataaggaaaatgtggtctatctacactatgaagcactattcagctattaaaatcagacatcatgaatttttcaggaaagtagatggaacttgagattatcatccggagtgaaataactcagaatgaaaatgtcatgtatggtgtgtactcattgataagtagattttaaccctaaagtgcacaatacccatgatacatcccacagacccaaataaattaaacaagaaggaaggcccacatgagggtgcttagaacagagaacaaaattgccatgggaggcaggtggagggaggggacagggtagaagaacagagggggagggaaatgggaggtattcataatcaggtgtggagaaaggcattcgagatggacagatggccatgtgaatgactgcctatcacagtctcacagtggagtgatagggacactaacctacccacaaaatgttcaacacaaaatttatcttgcctacaaaacaaaacaaatcaaaaaccaacataaaaaaacaaaacaaaacaaaagcaaacaaaaacaaaaacggaagaactgggatggagcagagactgatggaatggttaagcaataaccagcccaactcaatattcatcccattggctagcaccaatccctgactttactagtgacactccataatgctggcagacaggaggctagcatggctgttctatgagaggctccactctgtggctgactcaaagagatgcagagacccacagccaaacattggctggagcttgagaactctttttttttttgggggggggggagttcaagacagggttgctggcctcaaactcagaaatctgcctgcctctgccgcccaagtgctgggattaaggcatgcaccatcactgccaggcttagagcttgggaactcatatgaaagagttgcagtgaggattgagggccccaaagaggataggaacaccccaggaaaaccaagagctaactaacttggatccttggggctttcagagactgaatcaacaaacaaagaggatacgtgagctggacttaggcctccctgcacttatgtagcagatatgcagcttggtcttcatatgggtactgaacaattgtagcaggggctattcctaaagctgttgcctgtctgtgaaatttgttcccctaactaggctgtcttgtctggcttcattttggaagaagatatacctagacctgaagatactttatgtaccagggtggaggcatatccatggggt

SEQ ID NO: 2867 - DNA, 1000 bp, mus musculus
gttgcaaactaccaagcaatatgggataaaagcatttgcacggctatactctcacccacagagaagatgttcctcattttgaaggtcaggccatacatcactggcccaatgtcaggaaacatgcatttcctccgcctacgctgtgccaggtcagtcagaaaataaacaaaagcaaccagcacccccacaaaacagctaccccctcagctgctcttgcttcttctctaccattccatctgcaaaaaatccagtcagggaaatttaaacatgttgtttaaaagatcagagattctaatatctcacagcaacagactctctctctctctctctctctctctctctctctctctctctctctcatcaatgtaaggaaaacttgttttgaacttgaagtgctatattattgacaataattctcttttaaaatgtcaccagagacgtgcttatatctatttcagactttctagagttttttgctttgaagtagttgctaacaaaagtgtcattgtcatgagtctatcatctcagatacttttcattcctaacagaagtcatctgaacccacatgtgctagaacactgatacattacacttgtaacctgaaaagatgaaacaggctttagctactggatgatcacttttcattataaattcagtatgaacactttatcttatttccttgtggtcatatgatggttcaacaccaagtcttggcatacctagacatcttaaagataaagataacatggatttcaaatattcagttgtaaacatcaatgtagaaatgaatgaagagatgaagaattctaaagaaatgtttctaatgcctaagagattataacagaagcatttacagaatcatatggggcccacaataaagccactgagcttgggaaaatggttttgaatgagcaggtagccaaaagactaggagactaaaatcacatgacctcataaaatgaattatatctatggaactttaaaccttcaaaactcatga

SEQ ID NO: 2868 - DNA, 1000 bp, mus musculus
tgaaaggacccagatatagctgtctcttgtgagactatgctggggcctagcaaacacagaagtggatgctcacagtcagctagtggatggatcacagggctcccaatggaggagctagagaaagtacccaaggagctaaagggatctgcaaacctataggtggaacaacaatatgaactaaccagtaccccggagctcttgactctagctgcatatgcatcaaaagatggcctagtcggccatcactggaaagagaggcccattggacacacaaactttatatgccccagtacaggggaacgccagggccaaaaaaatgggaatgggtgtgtagggaagtgggggggggggttatgggggaattttgggatagcattggaaatgtaattgaggaaaatacataataaaaaaaaccaaattcataaaaataaaaaaagtgtgcatttggaactacatgttgaatgaaatatatgttgaacttaaatatcaaaaattgacaccaggcagtgtaggaagccaactctaagatggcgccagtttccagtatgctgttttcataaacaacatcagtgcaggtgtaagcctgagtctggtgccaacccctcaggagcgggtacatgctaattaggtgattaggtgacagcggttcaacctatcccaggagaacatgaagcctttccctgtgctggggtgcatataagcagacctccctgggtccccggagtccccgtagcagcaccgaggcatttctgcaataaaggctgttgagaagaatccgactgcgttgtgtcttccttgctggccaaggtgggtgcaacaaggcagcatacattagctggtgtgaggcccctgacacatgtacagcagaggactgcctggtctggcctcagggagagaagatgcacctaaccctcttgagacttgaggccccagggagtagggaattctggtggtgtgggactggggatggggacatccttttggagacagtgggaagagg

SEQ ID NO: 2869 - DNA, 1600 bp, mus musculus
atgagcgaaattttcaggtaatcaatgtgcctgaggtaataaatatctattcacaatataaatgtgactccattttatgactttacttaaagctaatattaatactttacttgatataatttaatctctccttgatgaatcatagtatagctttatatatggaaaaaatttaacacccatgatttaaaataatagctattgatttattccttaaatttggaaacgtagttaaccagtgctaagcatatattcagcatatatatatgtatatatatatatacatatatatatatatatatatatatatgatccacattctaaatatttactcttagtcaatagttgcaagcaaactttttttccctataatagacgattttagtaaaccttgcatggtatcatatctctgcattctcagttctgtggatgtttaggcaatagtattagaactcaaggttatcaatagctatatattttaagccaaccagagacacataaaacaatgtctcacaaaatcatacagcacacacacacacagacacacacacacacagagtcacgcacacactcagagtcacacacacacagtcacacatacacagagtcacacacactcagagtcacacaaacacagagtcacatacacacagagtcacacacacacacacacacatgcacacacacacagagtcacacacacacacacacagaatcacacacacacacatgcacacacacacacacacacacacactcacactcacactcacacaaacacacactaggcaactgagagagtcagatgtagatatttacacccaaccaatggacagaagctggtgatccctgtagctgaattacaggaaagctggaagaagctgggaaggagggcagtcttatcagatgaccagcagtctcaactaacctggacccctgatatctctccgacactgaatcaggcagcatataggagctagtaggaggccctggacacatttacagccgagtactgcctggtctggcctcagtgagagaagatgcacttaaccctctagagaatggaggctccagggagtggggaggcctggtggtgtgggactggggtatgaatatcctcttagagacaatggggaggagggatgggatgaggaacagtcacagggtagactgggagggggatgaagactgtactgtaaaaaaagattaaagaatgataataataattaaaaaataaaacatataaatatttaaactagtttgttaaattcctcatctgaaacatgctattcaaacctctaaagtattcctaacactccagcactcttagaagacattaaattatagaacatccatttttatataacatactaattttgaaattagagttggcaaactttgttctgtaaatatctaaatagtaagcatagtttatgtttgcacataataaggtctctataaattctgttgtagtgtgaagtgagccacaggaaatacattaactaagggtgtgtctgtgctataatacaaaataataaaagcagccattaagacaaattagatctacaggacaaatgcatgactatatagctgaacaacactc

SEQ ID NO: 2870 - DNA, 1000 bp, mus musculus
tagactcttttctctcacaatatatcctgttcataatttcccctctatctaatcctcacagttcctcccctctttccttcccctcacctctggattgtctcccttcctgtcagacacagtttactttttgttctgttttggtttggtttggtttggtttggtttggttttaattaaatgttcttactccacctatagggttacagaccccttctccttgggtactttctctagatcctccactggggccctgggttccatccaatagatgactgtgagtatccacttctgtatttgccaggcactggcctagcctcacatgaaacagctattatcagggtcctttcgcaaaatcttactggcatatgcaatacccccagagctcatgtctctagctgcagatgtaatagaagttggcctagtcagccatattgggaaaagaggccccttggtcttgcaaactttatatgccccagtacaggggaacaccagggccaagaagtgggagtgggtgggtaggggagcagggcagggagagggtatgggggactttcaggatagcatttgaaatgtaaataaagaaaatatctaaaaaagaaagaagaagaaagaaagaaacacacacacacacacacacacacacacacaaagaacttcaaatatggtaataaagtggacaaatctccaaaaaaaatgttcttactcatgagatggtgtgataaaaaatgtagatggttattaacttaagatcttccacagctccttttatatcttggattaatttgcataatatgacagtaagaaatgccagtaccttaaaggaagacatggttcttataaaattaccatatatatgcttggtggttggctaataattcacaggaataagtaatctcaagtatttcatcatcttgccatggaagagttccaaaaaaagcttttgaggtctatagagatctaatgtcaggcaggattttttgttaattttaccatattgtatt

SEQ ID NO: 2871 - DNA, 1400 bp, mus musculus
gaatgagtgcatagttggagagatgagagggtttgaagggaggaaggggaatgcagaagtggttcattaaagcataattttaaaaataaacaaaaaatttaaaaagtaaaacaaaactcccaataaagtagttttagaaggaattcacccttaaaatatttaagtcagatatagaaggccacagctaatataataatcaatataaattctctatcctaaactctagtataaggcaatgatatactaactgactccattcaacatagtactggaaattgtaaccagagcaataagctcagaaaaattagtaaatgcctaacaaaggagaaaggaaaacctatacagatcatatccagaggttaggcaaggcctctggttgggggatagggacacccacttatctccagatttttaacccataattgctcttgtcaaaaagaaatacagggacaaagtgtagatcaggactgaaggaaaggccatccagagacactattgcagatgccaagaagtgcttgctgacaggagactgatcaagctgtcccgagaggttctgccatagccttacaaatacagaggcaggtgtttgcagctaacggtgggactgagcacggggaccccaaagaaggattgaggggaaggactgaaggagctgaaggggtttgcaaccccataggaagaacaacaatatcaaccaaccagacgcccccagagctcccagggactaaaccaccaaccaaagagtacacatggaggaacccatggctccagccgcatatatagcagaggatggccttgttgggcatcaatgggagtagaggaccttggtcctgtggaggctttttgctcccgtgtaggggaatgccaggactgagaggcaggagtgggtgagtgggtgggataacactctcatcgaagcagctagaggggggatggaatagggggttgcagagggcaaactgggaaagggaatatcatttgaaatgtaaataagtaaaataaccaataaaaaaggaaattttagtaaatggtggtaaattaagaaatgaaaagcaaaaagccttgaagatatgggcacaggggaaaaattcctgaacagaacagcaatggcttgtgctgtaacatcaagaattgaaaaatgggacctcatgaaactccacagtttctgcaaggcaaaagccacccaccgtcaataagacaaaaagaccaccaacagattgggaaaggatctttacctatcctaaatcagataggggactaatatccaacatatataaagaactcaagaaggtggacttcagaaaatcaaataccccattaaaaaatggggctcagaactgaacaaagaattctcacctgaggaataccgaatggcagagaagcacctgaaaaaatgttca

SEQ ID NO: 2872 - DNA, 1400 bp, mus musculus
tattacatcaatgatgttttcaaatttctactgatacagtaactattttgaactgaattttattatcctgaatcaactgcttatttatcttaaagatatctattatggtataaattaattaggtcaaatcttagtagaaatgttagtattttatttcattttagtgacaaacttgcttccttggattatattttatggagtaattacacagttcactttagaactagatgactcattttcctgtaagaaagaaacagatttagaggcagggatccttgagctggaaagatgactcagcatttagaatcacttactgctcatgtagcggacccaaattcatttcttaatacctacattgagtggctcacaactgcctataactgcagctctaggggatctggtctccatgagtatccacatacacagtagcagtcagttttagtatcagcttccaaattttagattcaactgagtagatctcactgcattaattgatatgggacaagtcattgcgagtatgggaagcaccgtgtcatggcttgccagataaaaagagggcatagcaaaaggaaggttattaacaccccttgcttgcttggccatccctcctgttggcctagccttcacttttgctgctgaattgatttagccatttgctgctgaggattccttcactaaggtcagaagcagcatttctcagctttactatttgacacatgggttgtctccagtgtgagacatacactgtgagactactgtgactgcttaggcatccagcctcaaggagcaaggaactactagattctcaacctcctcaaagttagacaatttctgttacaactttagcatagaataacttaatatattattttattgtatatgtatattacatctccatcctattggccctattcctctagagaacagtgactaatacaaatgtgtacacacacaacaaaaacacacacacacactcttaaaaatgataaaaataaatcttaaaaaaaaaaacaatgagcctgaaccagtctagacctagaaatgagtataaatcctaacaccatttagtaatacagaatatcttaggatggaaagaggccaaagtacacatttagacctggcccatctttagattataaatattattatagcttactctgctttctccccgaccttcccttgccaaaactattttaaaactatacttgcaatactgtcttttttcattggccttgctgacttattctgtaatccattcctttggtatgagattgtagtacctactgtcatttgacattttctcatagttaagatcacctttcatctgttccctaagaattgtgaagacacaaaataatccaatcttttcattctccaagtaaatacttacgaaatttaac

SEQ ID NO: 2873 - DNA, 1200 bp, mus musculus
tcctgatgtgctctatggaatcttctgcacctgagattctctcttctatctcttgtattctgctgttgattctcacatctatggttccagatttcattactaggatttctttctctaaaattgcctcactttttgttttctttattgtgtctatatccctttttatgtcttggatggttttattcaattccatcacctgtttggtcgtgttttcctgcaattctttaagggatttttgtgcttcctctttaatgtctttcttctacctgtttagcagtgttctcctgtatttctttaagtgggttattaaagtccttcttgatgtcctctaccatcatcatgagacatgcttttaaatccgggtcttgcttttcaggtgtgttggggttcccaggacttggtgggttgggagtgctgcagtctgatgatggtgagtggtcttggtttttgttagtaagatctttacgtttgccttttgccatctggtaatctctggagttatttgttatagttgtctctggttagagctcattcctcaggtgattatgttagcctctctcagcagacctgggagactagctctctcctgagtttcagtggtcagacactctctataggcaagctctcttcttgcagcaaaggtgcccagatatctggtgttcgaatctgcctcttggcagaagttgtgatctactcaccagagttcctaagatcccgtggagagtcctctggggaccttgggtgtgtctgcagactctgtgcccaaggtggcctggtgctggtgtcgactcgaagggacttgtgaccctggtcaggcacggttttttgcttccctaattaatgctgtctcatgtcctgcgcgattggattggagtagcagttgtgttccactcacaggaggtcctaagattccatggagagtcctgtggggaatttgggggtgtccgcagactccgcgcccaagttgtgtaggtgctggcacagactggaagggctgtttccatttcttttaaatgtgtttaatggctggaagaaaaatgaaacaaatattatagaggcagggtagtgacaaaggttttgacccttttccatacttgtggatgcattagtatatttctaatagagcacactctcttttgtctcttggacaaaataaatttataagatttaatttatctaatagttaaaaatctgcccaga

SEQ ID NO: 2874 - DNA, 1000 bp, mus musculus
gtggttggtgaaaactgaactcagtagctctggaagagtagtcaatgctcttaaccactgagccatctctccagccccttagatcagatttctattgctgtgaagagaaaacatgaccatggcaacttttataaaggaaaacaatcaattggggctggcttaaaggtttagatcacagtcatctattggatggaacacagggcgcccaatggaggagctagagaaagtacccaaggggctgaaggggtctgcaaccctataggtggaacaacaatatgaactaaccagtacccccagagctcatgtcactagctgtatatgtgcagaagatggcctagtcggccatcattgggaagagaggcccctaggtcttacaaactttatatgtcccagtacaggagaatgccagggccaagaactgggagtgggtgggtaggggagcagggcaggaggagggtatagggaaccttcaggatagcatttgaattgtaaataaagacaataactaataaaagaaaaaaaaaaaggtttagagcttcagtccattattggtatggtaagaagcatggtgacatgaagccagacatggtgctggagaagaagtagctaacagttctacatctgtatctggaggcagtaggaagatacagtgccactagacctgccttgagttgtagaaacctcaaaccccaccccacagtggcacacttccaccagcaaggccacacttcctagtagtgctactcctagtagtagtatcaaggggaataacaaagcatttctttgggttccaagtatgagtgtttaagaaatattgatcagtgtgtgcaatgactactaactgtgccttcctcctcccggaagtttatagcactatactgaacacctacagcgacctcttatgaagactaccaaactctccctactgtgctccctacttcacctaaatatgatgctgaggtttcaggttatggtacaaaaaaaaatgactatttggtcc

SEQ ID NO: 2875 - DNA, 1200 bp, mus musculus
aagtataatacgagtgtattcttactactagaaatacatgagtactctctattatccaaattatgttgtgtacatttccaaagcctcttccaaattataggcttttaatttccatataatgttgaattgatgtacagcatacctttttgaaggaaacaaaattctgtttttaattagttagaggtatctgacttgtcactatgtagtttatagcacagaaaagaatgaagaatctttttattacaagacaagacttgcttgctgaagattttttccttttttaattgattattttatttatttacatgtcaaatattgtttcccttcccagtctcccctctgcaaagtcccatcttttcacccctcccatttatctttaagagggtcctcccctacccactcactctcacctcaaccctctagcaaccctcttttctggggtaataagcctccacaataccaagtgcctccccttccattgatgccagataaagcaatcctctgctacaaatgcagctgtagtaatgggtccctccatgtgtactctttggtttgtggtttagtccctaggaactctgggggctccatgtagttaatattgttgttcttcctaaggggatacaatacccttcagctccttcagtcctttccctagttcttccattggtgtcccagggctcagtcctatggttggctgtgagtatctgcatttcttagtcaggtgctggcaagccctctcagatgacagccatactatccttggcatcaaaaatagtgtctaggcttggtgtctgcagatgggatggagcccaaggtggggtggtatctatatggcctttccttcagtctctgctccatattttgcccatgcatttcctttttgacaggaacaattctaggttaaaatttttgaggtgggtaagtggccccttatctcacctgggggccatggattcaaagaaatcatttatgtcaatagtccttaatattttacactttaaaaagatactgtcaataagacaaaaggccaccagcagattgggaaaggattttttccaaacctaaatatgacaggggaataacatccaatatatacaaagatctcaagaagctggactccagaaattcaaataacccctttaaaaatggggtactgagctaaacaaagaactgtcaactgagtaaagggctgagaagcac

SEQ ID NO: 2876 - DNA, 1000 bp, mus musculus
ttacctaacaaagttaatttggagcactgcctcctctcccaaaaagattgcagcccttctgtttctcaaggccagctccctcacactgggagctcaaggtctagcttggtcgttgttaatttgcaactgaatggagaacctggacttctccaaagaagcttttatattgttgcttttcactgtcccacctttgtttttcaagcaggtcagtcaactcccttcagtctgactgcagcaggtgtacagccccatctccaacagagcaggtggcggttattaatcttcatcaaaaagaattctaagtacttattgtggctttggtctgaattgggaataaggtgtgctaatgagggccagacagtcaatgatgtgcacccagatctcgggaccgtaccaatataagacagaggtacatgccaaaaggccgtggttgttgataacacaccacagagccatgtttgtttgaaatataacacaaactagctgcacataacctccaagatggaattggatagtttgggaggatctaagatttcctaagacaggcgcagccaccagccaccataattctcaggcaggactatagagcataagtaaattttatgcctcagtccagctttttttttttttttttttttttttaaataacagggaggaaattgtaacctgcccctcagcctgaagcaggttgagccagaccttgacttcactgccactaaggagatcacctagggtggagccttcctccctagatcactctattgtttagtcactgtcactgttcctcttcaagatactgctacctgctgggaggccctggagctattcctgagactatgtcctatcctgtagctggctccaagaaccagtgggggatgggcctccccctcttctttataagcaagatccccattaaacctttgagccttgaacagactagcttgttttagtttccattatttctcgaactgcctaggttccctcttctctttcagcctcc

SEQ ID NO: 2877 - DNA, 1000 bp, mus musculus
catgaggaggaaaagggcccaaagagcaggcaaaagagtcagaacacccacaactctgacttgtaggagtcctaaaggaataccaacacaaccataacacatataaaaaggacatgagccagactcatgtattccatggctgttgcttcagtctatgggagtcagtgctcttaggccctgagtttactttttaaacaattttctgtttagtactatgctcatttaaaactgaggttattgttgggtgtgatcccggcagagggtcccaaggtccccagaggattctccatgctgcaaggccctctagcacacccagggtcttgagatcactggtgagtggcatgcaacatcttttccaaaaaacaaaaacaaacaaacaaacaaaaaaaaaacccagagggtcttgagccagaaggaacagggacaaaggactactgtctgaacagtggcctaggttcttttaagtcagcgccacccttgcatcatcttggacacaatctcagcagagggtcccaaggtccccagaagactctacactgaaggcagcatagtacacccaggtcttgagatcagtgataagtgtattccagcatctattgcaaaaaatccaaaagggtcttgtgctagcagcaacagggtcaaaagacaaaggcaggaactagcacacccagaatcttgggatcactgagaccagtccatgaaggagagcacatgggcggcagaagcaacagagattcttggacagggtgccttttggctttcattctcagccaggagacagagctgagacccagaaccctgggtaccttccctaccagaggagagtcagcttccagggagtgctctgatcccaggactcaggaggtagatccaagctccagacttctgtgcaccttccctacaaaaggagagcttgcctgcagagagtgctctcaccactgggactcaggagagagttggtctcccaggagtgctgacagaggctaaaaaatcacaggag

SEQ ID NO: 2878 - DNA, 1400 bp, mus musculus
tttgactgggtttttcttcgtatcctattgatttcaatcccaaatctgactcgttcttgctgactacatgtgttgggtatagtgcctttctttgttctagaaactggatctttctggtgtgcttcaaagttactagtatgaaatctctccaattgtttatttagtcactatatgctataaacctttctcttacaagtgcattcattgtgtcctataagtttaagtatacagtatattctttttatttgaatttaggaaaatttttcattgcttgatttatttctgtcttgaactactcttcattcaatagtttttcaatttctacgagtttgtcatctttcagttgtttctactgtttttgtcctctttaatcacaaccaccaggttgttctagtaggatgtcgggcggtatttaatttttcgtttgtttgttttgtatctgttgaaacttgtttcacatctgagtctttgataaattttggagaaagttccatgaaatgatgatagaaaggtatattctcttctgtttgagggacatgttgtataagtatctagtagatttatcttgtttatgaaataagttacctccactatgtttctgtttaatttgtgtctagatggcctgcctattggtaagagtcaggtattgaaattcatccattctcattgtgtgatttaaagtgtattcctaattcttttatgaactgtgcgcccttgtgtttagtgagtggatactcacagccaaccatcaaactgagcacggagtccccagtggaggagctagagaagtgacccaaggagctaaaggggtttgcagctccatagaaggaacaacaatatgaactaaccagtacctccggaactcccaaagagtagaccaccaaccaaagagtacacatggtggaactcagggctccagctgcatttgtagcagaggacagccttgtccgtcatcagtgggcagagagacccttggtcccatgaaggctctatgccccagtgtaggggaatgccagggccaggaaccaggagtgggtggattagtgagcagggggagggcggtgggggtgtgtataggggttcttcagaggggaaaccagaaaagaggataacatttgaaatgtaaataaagaaaatatctaataaaaaagagaaaagaagaactgaaatatcatcttggtgaatttgcctttgatatgtattcagtgtccttccccacctctttttattatttttgatttgatatctattttgtcagatattgaattagctatactggcgtatttattaggaatacctttttctagctcattatcccgaagtgatatgtatccttgatgttaaagagtcctttttagatacaacagaatgaggaatcgatcctaatttttgtatttatt

SEQ ID NO: 2879 - DNA, 1000 bp, mus musculus
gtccttcaaagtgtccctcccaccactccttcctcttctttttggagagggtgaggccaccctgtaaatccttcaaacctggcacatcaactctttgtaatgttaggcaaatgctctcccattgaggccagagaaagcaggcctgttggggaacagattccacaggcaggtaacagcttggggacaggccccactccagttgctggggtgcccatatggagactgagctgcacatctgctacatatgtgcctgaggcctcagtccagcccatgtatgctctttgtttggtggcttagtttctgagagcttccaagggtccagacatcttattttaggctaagtgacccagtgtctctcactcggcacatttttcagtagtgaatctttttgataattactatctactgcagaaataagttttgctgatgatggttgaacaatatagtgtgctatgaggcatagcaatatgtcattaggtgtcatattattattatattgctttagttgttaaccagcacaatttgttgagatgtctttatcaaactccttctctcaagactcagggatctttgtggaaatgaaggttgaaagattttaagaaattcagtaagtttttccaataaaacagaacttctgtacaaaacaggacagaaatgtacctgagctcacagagactatgagagcatgcacaacaaatacatggatccaaatcctagtgttgagagggggaagtaaacataaagtcacactccagccaagacgctctttgcaattaatgtctgctcagaaaaagaaagttagttttctccaatggagtggcattgggtgtatcaaccacgttccagagcacggactatgttaaatagcagataactaacacaaagcagattctatggtttggtatgtgtgtgtgtgtgtgtgtgtgtgtgtgtgtgtatgcatgtgcgtatgtgtgtgttgttgttgttgttattgatttcgtttaagtttgtttctctg

SEQ ID NO: 2880 - DNA, 1000 bp, mus musculus
tgcctttcagttttcaatgtttaagtctttcacttacttataagcttattctttttttcttcaattttttattagatattttcttcatttatatttccaatgctatgtcgaaagtcccctatagcctctccccaccctgctcccctacccacccactcccacctcttggccctggaattcccctgttctggggcatataaagtttgcaagacaaagggcctctccttccagtgatgaccaactagtccatcttctgctacaaatgcagctagagaaaatagctctggggttactggttagttcatattgatgttcctcctacagggctgcagaccactttaccccttgggtactttctctagctcctccattgggggctcagtgttccatccaatagatgactgtgagcatccacttctgtatttgccaggtactggcatagcctcacaagagacagctacatcagagtcctttaagaaaaatctttctggcatttgcaatagtgtctgggtttggaggctgattatgggatgtattcccaggtggggcagtctctggatggtccatcctttcgtctcagctccaaactttgtctctgtaactccttctgttggtattttgtttcccattctaaggaggaatgaattattcatgcattggtcttcttcttgagtttcatgtgttttgcaaattctatcttgggtattctaagtttctgagctaatatccacttatcagtgagtgcatatcaagtgagttcttttgtgattaggttacctcactcaggatgatatcctccatatacatacatttgcctcagaatttcacaaattcaatattttaatagctgagtagtactccattgtgtaaatgtaccacattttctgtatccattcctctgttgagtgatatctgggttctttccagcttctggctattataaataaggctgctatgaagatagtggagcatgtgtccttattaccagttggaatatctt

SEQ ID NO: 2881 - DNA, 1600 bp, mus musculus
tgttttgaaaaaattttggcagttgtgtcaatatcttctaaggtatcttctagacctaagactctctcttctgtctcttgtattctgttggtgatgcttacatttgtaattcttgaccacttctctaggttatccatttcaagggtcacctccatttgtgttttctttattgtttctacttcctctttcaggtcttggactgttttttttttcccaattctttcatctgtttgattatgttttttttctgtacttcttaagggatttgttttctctttaaaggtttcttcctgtttgtctgtggtttcctgtattctttcagtgagttatttatatcccccttaaaggactctattatattcataaaataggattttagatgagcttcctaattttcatgtgtgttggtttacccaaggcttgctgtggtgggaaaactacattctgatgatgccaaactatattggctactgctgattctggtcttacacttgcatcttgtcatctggattttgctggtgttatctattctgggtgtctgtccttggatcctgccttccatgtcacttggtttctgaaggtcacctgggatgcctgtggcccgggttatagcagaactcctttgaggccttcagactatagtgtcttcagggagtcagacaagctgcaaatctgttaccctgcatacagcagatctcctgggagattttcagagtatgcagtcttcagaggagtagacaagctgatgatgtgttttcctgtatgtagcagaacatgtgggatgccttcagactgttgggtgtttaaaggagcagtcaagatgctgccctgtttatagatgttcttctaggagactttcagagtgtggtgtctgttgccctgtgtgcaatagaactctgggtaagccttcagacttttgggttttaagctaaattataaaattttaaaacatataaatacgaaactcttctgctactagtatgatttctgcagtcaaaatctggtagtggcaatagaagagagagagagagagagagagagagagagagagagagagagagagagaaacttactactcctgatcaaagaaaaaaatggcatttaaaaagagtacactatgaacttgtattaaaatgcttttcacaatgtgtattctggaaaatttatatccatacacatattatataattttgagagatttttcaattatatattctgactgacctgtaaatgtctatgtagttcaagcttgtcacgaactcttggcaatccttttaaatgaccctcttggttcttcaattgtaggtacgtaccaccatgcttggctgctatttttgttgtttgtttaatttgtgtgattttgcttaatttttagttattgaacacctaaaacaaaccctttgtatatatatttccaatgttatagattgaagtttataatatttctttttttttaaatttttttattaggtatttagctcatttacatttccaatgctataccaaaagtcccccatacccacccacccccactcccctacccacccactccccctttttagccctggcgttcccctgtactggggcatataaagtttgc

SEQ ID NO: 2882 - DNA, 1400 bp, mus musculus
ggatttcctggatgttttgagttaggatcttttttcattttccattttctttgattgctgtgccgatgttctctatggaatcttctgcacctgagattctctcttctatctcttgtattctgttgctgatactcacatctatgcttccagatttctttcctagggtttctatctccagcattgcctcactttgggttttcttatttgtgtctacttccctttttaggtcttggatggttttattcaattccatcacctgtttggttgtgttttcctgcaattctttaagggatttttgtgctacctctttaatgtcttctacctgtttagcagtgttctcctgtatttctttaagtgagttatttaggttcttcttaatgtcctctaccatcatcattagatatgcttttaaatccgggtctagtttttcgggtctgttggggtgccctggactgggcgaagtgggagtgctgggttctgatgatggtgagtagtcttggtttctgttagtaagattcttacgtttacctttcgccatctggtaatctctggatttagttgttatagttgtctctgtttagagattgtgtctttggtgattctgttaccctctatcagcagacctgggagactagctctctcctctgagtttcagtggtgtgtgcactctctgcaggcaagctctcctcttacatggaaggtgcacagatatctggtgttcggacctcccttctggccgaagatgaaggcccaaaacagaacctttcccagaagctgtgttgctttggcctgtcccagaagctgttagcttctgtgtgcacactctcacctgtacagactacttttcggtcgagtaccggaaccaagatgggtcccgcagttcctgagtcaaaagcctcctgggctgggtggacacctgtcctctgccggggaggtggtcgaatgtctggagccggaaaagggtgctgcctaagaagctctgtggctcctgcctgtcccagaagctgtcagcttctgtgtgcacactctcacctgtgcagactactttttggcggagtccccttattactctttcttgccttgtgcatataaacaaacaaacaaacaaacacacctggcaaaaagtaagaaaaagtagggaggaagagataatttggtttatagtttggaggaatacattatattattgaacacaagtatatcaggaagaaccaggaaatgagaaagaagtaaggttgaattataaaactttatgggccacttccattgacctacatgctcaagtgctgctgcatctattaaagatttcacaatattccaatgaaggcaaccagttagagaccaagcatttaagcaaatgtgtctactaattactttcaaaataaaacccaaataagcca

SEQ ID NO: 2883 - DNA, 1000 bp, mus musculus
gttaaatagattgtcttagagtcgggaataaatttcagccataaagaaatactgtcatgaacaattcaattgatacactagttttccatctttgaagtttttttgataacaatttgaggatgaccattatttaagtctatccagatattttctttctttgtgatggtggtggttgttgttgttggaggtggcagtggtggtgatcgtgttggcggtgatggaggtggtgttgatgaagtacgtgtgtgtgtgtgtgtgtgtgtgtgtgtgtgtgtgtgtgtgtgtatgcatctgtatgaaaacttctcggttttagtgtgtatgtagttttagtagcacacaaaagtatgcttaagagtatacactctgaaccatcaaccaaggaggcatgcacaggctagatctaggctcctcacacttttctagaagatgtgcaacttgatctccatctgggtcccctaacaagtgaaacaggtgctgtctctggctctgctgtctgccattggatcttcattctgtaactagactgtctggttaggtctcagtaggaaaggatgtgcttagtccttttgggtccaatgataacagagaggggcttccctttttctgagaagaaggggaggagtaatggggaggtatttgtaaggatggaaatgggaggggtggaaggagggggatttcttttgggatataaaataaattgtgaaaaaaatataatctttgaattttaaatgatgtgtctttcaatttaacttcaggtattttctagtcctacttatcgaaaacagctgtttttaatgggaaagtgagttaaaacttttaagtactaagaatgctggacttacatagcatttaaggacagcagtgcttgcacccaagatgaggtcagggttcccagcagtctacctttaggaagtagcagatttttcaagatcagtttcagctgctttgagctacttggagccatatcaaacattgtgaaaaaaatacttaatgagca

SEQ ID NO: 2884 - DNA, 1000 bp, mus musculus
tgaatttctggcttatcaaaagtcaggtatctacaagtgtgaagatttatgcctatgtcttcaattttatttcattagtcaatgtttgttttcatgccagtaccaggtgttttataattataacttaatagtaaaacttgaaatggggcggtaagactcctgaacctcatttattgttcaggattgctatagctattctggagtgtgtgtgtgtgtgtgtgtgtgtgtgtgtgtgtgtgtgtgtgtgtgtgaagctgcgaattgtcttttaaagatctgtagaatattgtgtttaaattttgatagggattaaaactgtagactttttttcaattttattagatatcttctgcatttatctttcaaatgctatagcgaaatttccctataccctccccctgccctgcttccctacccacccactcccacttctttgccctgacatttcactatactagggcatataaagtttgcaagaccaaagggcctctcttcccaataatggccgactaggccattttctgatacatatgcagatagagacatgagctctggggatcctagttagttcatattcttgttccacctattggtttgcagaaccctttcagctccttgggtactttctctagctcctccattgagagctctgtcttctatccaatagatgactatgagcatccatttctgtatttgacaggcactggcatagcctcacaagggaaagctatatcagggtcctgtcatcaaaatctttctagcatatgcaatagtgtctgagtttggtgactgattatgggatggatccctgggtggggcagtctctggatggtccatccttttgtcttagctcctaactttgtgtagactttttgttatgatcctaccaatcccacccactcccaagtaccttgggatgtcttttcatcttcaggtatcttcttaatttttcagtctgaaaattttatcatagaaatgtttcactttcttggttagactt

SEQ ID NO: 2885 - DNA, 1000 bp, mus musculus
cagactaatttcctaagttcggcgggtcccggaccaagatggcgaccgctcttgttatattttttgagacagggtttctctgtgtagtcctggctgtcctggaactcactctgtagaccaggctgtacttgaacttagagatccgactgcctctgtgccactacacccaggaatgagccataatttatttcaatacaaatggacctgactcagaattaagaataagccactatacttggaaagtctctgagttttaaggtagaaattgaaaaaggggggggggaccaaatttggcagagggtcccaaagtacccagaggactctccactccacaggcaccctagcacacccaggatgttgagatcactggtgagtggaatgaaacatctattccaaaacaacccagaggggtttgggccagcaggaagagggacactggaaacccgcccaaccagaacctgggatgtcttctgatctgggccagccccagtgccacccttgtacatgaactcagcagacagtcccacagtccccagaggactctcccctccactggtaccctagcacacccaggatcttaggaacactggggagagttggcctccagaaaaggccttgacactgggactcaggtgagaacacaatcttttatcccaggtctctcagagaccagtcctcacaggagaacatatgggcaacagaagcaacagaacttcttgaacaggattccttcaggccttcatcttcagccaaggggtggatctgagctccagacctctgagcaccttccctgcaggatgagagcttgcctgcaaagagatctctgaccactgggttttactagagagttggactcccaggagagctgaaagaggctaacagaatcacaggaggaagaagctctagccaaacacacctagaacttctaacaccagagattaccagatggcaaaaggcaaacataagaatcttactaacagaattcagtacactcaccaca

SEQ ID NO: 2886 - DNA, 1000 bp, mus musculus
tgtgtttatatgggaagagaggggagtgagagagcccacttatggccagagttcctgtgctctgtgcaggtggatgcgggagggctgctggatgcttttgatgaggccctgggtgggcatctggctatgtgaagccactgaccccacactgcagggggtgggcaaggggcagcccctggtaccaggttctcagtctctgtcatcccattctggatatggcagaggatctgaaaacagtataggggatatgggaagaaaggttcccatgcaggcatgagtcctaaatccagtccttggctggagcacaggaaagccttctgatgggagattatgcacagctctttaggaaaaggcctatcccattgtccaagcacagtggccttgatgaacagagacagtctatggttttagagttttattgtagaaaggtagggggaaagagaaaaggtaaaaagagagaaactggccatggtcaagaggagagaaggggaaaagagagagttagagagtaagaaagataaaggcttagagagagaaaagcttagagagtaatagggagagagtgaggtgggggccaagcagcccctcttatagtgggctgtgttatcttgctgttgctaggtaactgggaggtgtctagcccgaaggtcagaagcttgggacatcgtttaagtgactaatagccacatgcttctcctgtgggacctgtgggggcagtaacttctacaggagccagctatccaggagacatgagggaacaccttctgtcccatgtaggtgaattatcaccactggatcctactcgggttccacctctcaactctacaggagaccagcctgtctgtgcatagcccattgccctacaattgagtaaaagaagtttaaggattcttttgttgtttttttgggggggttgtttgtttgtttgtttgtttttggttgtttttattttcagctgggcagtattggcacactcttttaattccagcacttgggaggc

SEQ ID NO: 2887 - DNA, 1200 bp, mus musculus
cattttagattatttccctaatatttttaggacctcagacatgcatgtattttattcactgaaaatgttccaaaatgttgaggtcaattattggattgtaaaagaagtaaattatttttattttattttagctttaatcctttttacagtccagtatttatcccgctcacagtctgttctctgactgttcttcatcccatacctccatccccccaccctattcctgtctccaagaggatgtccctatcccctacctccaacccaccagacctcaacactacctggagtatcaagtgtctcaaggtttaggcacatcttctctcactgaggccagaccagacagttctctgttgtatatgtgccagagcttcatattagctaatgtatgctgcctggttggtggctcagtgtctgagagatctcagggttccaggtcagttgagactgctggtcttcatatggggccctcttcctcctcagcttcttccaattttcccctaactcaaccacagtggtccctagcttctgcccactggttgggtataaatatctgcatctgactctttcagctgcttgttgtccctctcagagggcagtcacgctaggcctctgtttataaggacaccagaacatcaagaatagtgtcaggctttgagacctccccttgaggtagattccaatttggagctgtcactggacctactttccctcagtgacttcttcaattttgtccctgcagttatttcaaacacgaaaaattctgagtcagagtttttgattgtgcgatggcaaccccatcccttcacttgatgtcctgtttttctactggaggtagactctacaagtaccctctctctactatagaatatttcatcatcatatttagagaatttctgaactcttgggtctctggtagattctagaggttctcctcacctcctatctcctgaggttgcatgtttccattcttactgctggtcctcagggtttcagttctgtccccatcccaatacctaatcatgctcccatataccccttcctgtcccctttcacacctaggtccctccttccttggcccctccactattgtttgcaattttctccttttcaagtggaattgaagcatcctaacttgggacttttgccttgttaacctttttgagttctgtggagtgtatcctgggtaatctgtaatgtttt

SEQ ID NO: 2888 - DNA, 1000 bp, mus musculus
tatcagtagtgaaatctgaaattgttgatacacaatcaaagaaatgttgaaggttggagagatggctcagcagttaagagcactgactgttcttcgaggtgtcctgagttcaattcccagcaaccacatggtggattacaacgatctgtagtggggatctgacgccatctacaaaattgaataatgtttcatatagacttggggtaggtagggatggaggtagaggtttaggttttagggtgatcaggagattaggcagaatgctgagaaagatggctggaataagggctacttgtggggctggtgtgcaaaattagtaaagtggaaactttctggattctagagaccctaatgaggactcctattaatggaggatatggcatctcatctggtcatatcttgtagccaggcaaggctaccattggagggactgggttgcattcactttatttgttggccaagggtttccatggaaatttgcaaacaattcaggctgttgctaagacaaaagactgccctctacaagctgacagcgaggccccattaccaaagacaacaccctcacaattcactgaacatggagaagtcaaggtggtacctaaacagagactttatacctatattctagtttctttcatgcaaaaaggtacgtttcagtgaactaaaagaaaaaagggacaccaactcagccccaaaattttgttctaaactctatccttcttgtaaaatatgctagaacaaaggtgcgacagaacatacagaagtagctaagccatctttgatttgatttaagatccactgcatgaaaaagaacccacactgaacactgctttggcagccaagagccagagactagatagtccagggatctagggtaaaaacaaatactactgatataaaaaaaatcaataaaatgatttctgatgacattctgctatactcataagtcagtgccttatctagtcaacataagtcttcctccagcattgatgataacaag

SEQ ID NO: 2889 - DNA, 1200 bp, mus musculus
aaacaactcataattttaaatgagtgtggtgaaaaaccagtatattacacatgaatcagtgtttgaaacagatgaaagaagaatccagttgttaccattcaatattgcaaacaagttaatggatgcacattgtaatatttgcagttaaatagcagatctataggtaatcaacaatttttaaaaagtttttattagatattttctttatttacatttcaaatattatcccctttcctggtccccccccctgaagatcccctatctccttccccctctcaccaacctacccactcctatttcctggccctgcagttccctacactggggcatagagcctttacaggaccaagggccctatcctcccattgatgaccgactaggccatcctctgctacatatgcagcttgagtcacgagtctcaccatatatactctttagttggtggtttagtccctgatagctctggggcattggttagatcataatgttgttccttctttggggttgcaaaccccttcagctccttgggtactttctctagctacttcattggggaccctatgctcagttcaatggatgtctgtgagcatccacttctgtatttgtcaggcactggcagagcccatcaggagacagctatatcaggctcctgttagagcacttgttggcatccacagtagtgtctgggtttggtgattgtatatgggatgctattttttttaatgtgtttaccttcttatctgtatatatattactgtaccgcatacgtgtcggttgccagtagaagacagagaggccatggcaggctctggaacttaagttaccagtggctgtgagcctctgaactggtgctgagaatagaagcctgggaacaatggaagggcagtcagtgctttaaatcactgagccttctctccagccctaatcaataattccttgcatgagagatctttacaacaaacaatgttgcaataaagttagtaatacaaatgtcataactcatgtctgtaatatgtagtaactatatctgggtggatgcatagcttgaattggatatcatatataggtatctagataagattttaaattttctattttgtaaaatacttcattatgtgaaaccatacgaaatgtagtttttggtctccttagcacatacaaatgatatataattttatctaacacagacttgtttattat

SEQ ID NO: 2890 - DNA, 1000 bp, mus musculus
ctaatttttagcttaaggacctctgtcatattcataaagggtattttacagtctttgtgttgtgctttagctatgttataagtctcagtcttactgcagtaaggttgctgagatgtagtgtagacattgtctttgggcatttattgattgtgtttttgcattggcatctaagcatctgtgtttgagattatggtacatcttggtgctgacaactgcttttatctttggcatatttttccttgattattactgccctttctgtgttcttaggaaggtatagtggttgtgtatggcctggtagggaattcttctgagatttcacaagtgtggccactgggagtccctggtaaaatgtgtttctaagtattgagagttgacacttagtaattgagttgtgctgggttagggctgtgggagtcttcagaggagtggaaagcatggtgtttgccaggatctgtttagtctcctggaaatggggggcaaggagtgcagaaatgccacactaggatatagagctggggcttacactgggaagttgtatatggaggtagagcaaaaatctgaatcttgcctatctcctttgctataccacttgcttctctagcagccttggctggtggttcccaggaatacctactggaattaggagaatagaataaataatatctgagtaataaactatagatggggacagcagaagtgaccacagcaagtagactgccacagaatcgagggagagactggtaattgggtttgtaggagaaaagggagaggtaagatctccagttaacttacctgtttctctagcctgagtggccttcagttccaagggagtgcccagtggtgttcggactgtgataaggccaagaaatggtgaaggggaacatctttgttatctgctggggatgagggcaggggtggatgggaagctgaagcaggtagtctgctacagagctaggggtgagacaaagggattggattttgagtagtaacgatctgc

SEQ ID NO: 2891 - DNA, 1000 bp, mus musculus
tctttcttctatttctcgtattctgtttgtgatgcttttatctatgacacctggtctcttttctaggttttctatctccagtgttgtctccctatgttatttttttattgtttctatttctgtttttagattctgaatggttttgtttatttccttcacctgtttggttgtgtttccctgtaagtattttagggatttttgtgtttcctctttaaggtcttctacatgtttcctgtgttctcttgtatttctttaagggaattatttttgtccttctttgattcctttatcatcatcctgagatgtgattttaaatcagattcttggctttcttgtgtgttggggtaaccagagttctctgtggtgggggaactgggttcttgataccaagtagtcttggtttctattgcttatgttcttgctcttgccttttgctatctggttatctctcgtgttagctggtcttgccacttccagctttgtccctcctgcaagactgtgtgtcagttcttctgggagaccagttctctccaggaggaatttgggtatggagaactgtggtacagtgtcatctctagggtacagacagagatcagaaggattctgttcctgtttcctgatggctctgtgaaggcccctcttggtccaggaatttgaagagaaatggttgtcttacctgtggtaataggtatgtagggactcttaggagaccatctctctcctggaggtatttgtgtatttagctctgtggcaccagatcagctctgggtgcagaaggagaccagaaggctcctgtcctagagatccccttggttcctgtgttctgagggttccaggctggttcctctgagcagcaatggtgatgctacctacactcacaggcctttcagcactcctaggaggctcgatccctcccagtgccattttggtttggagccctgtggcaaaggatctgccacagccagagactgaaactggaagccagccattttcttaaagg

SEQ ID NO: 2892 - DNA, 1000 bp, mus musculus
ccctttcctggtttcccctccaaaaacccccatatcatccctccttcccctgcttctatgagcgtgctctcccatccacccatccactttcccatcctggcattcccatacattgggccatcgagccttcataggacaaagggactctcttcgcattgatatttgaaaagcccatcctctgctacatatgtggttggacccatgggtaactccccatgcatactcttcggtttgtgttttagtccctggagctctggctgtactgctggttgatattgttgttcttcctatggggctgcaaaccccttcagctccttgggtacattttctagctccttcattagggatcctatgctcagtccaatggatgactgtgagcattcagttctttatttatcaggctctgctagagcctttcaggaggcagctatagcaggctcctgtcagcgtgcacttcttggcatccacaagtgggtggatgtgtctgggtttggtaactatatattggatgaatactaacaattaataataataataatatacaattgtggaggaattatatatatgactatcagttttaaatcatatccacccctccaactcatcctgcatctccatactctcaaatatatgacttttaattttttaattattgctgttgcatatatatatatatatatatatatatatatatatataattatttttctgttatatggtaatagtgctatacttcatgttttccttgagcttttatttagtaatcatggtaaactgctttaggttcaatacattactataaatggaaaatagcattaataaaaagtcttgtagattgtcgggcatggttgcacacgcctttaatcccagcactcgggaggcagaggcaggcggatttctgagttcgaggccagcctggtctacaaagtcagttccaggagagccagggctacacagagaaaccctgtcttgaaaaacaacaaaaaaaaaaagaaaaaga

SEQ ID NO: 2893 - DNA, 1000 bp, mus musculus
tttttaattgggttatgtggttattggagtctaacttattgagtgtaggaccatgaaaggcagcctgttttctggttgagctatgtttaaaccccagagacccagcagattaatctgcaagagatggaaggcctgtttgccatgttcccagatccataattctgtggccatcagtcacatagggcaacgccccaagctcctggtattttgtctggacttcaccccagtaccagtttgccagcaccacagtacctggaaacagccaggtaggcttggcccactataaaggaggctgcttgccccctcctcccactcgtactcctgctttctacttggttctctcttaccttcttgctccccctctctctgtattcccttcccctcccctcctcctgctgtggtcatgcctgaactctctgccttcctctgcttctactaccctcttagctccccttcctgtcatgacaataaatgccttaaaaccatggactgccttttctctttgatacccactgtgctggagcaatggagcaagtcttcttcctctaaagagccatgcatctaatcttccacatgaggcctccctgtgttctcagacatgctttccaccagccaacctgcctgctgtacaagccaaagactctccccaacaggactatggggtacacacagtcaaactttgtgcatccacctccatgaacggccctagcaggccggacagggtactccattttaacccacaattgagttatttttatattttggatatgagccctctatgaaatgtagggttggtgaagattttttttttcaaaatcaaatttgctgttttgtcctattgatagtgtcatttgatttacaaaagcttgtaagtttcatggggtgccaatcatcaattgttgacattagagactgagccattggcattctcttacaggaatttccccttgtaccaaagcatttgaagctatttccatttcttttctattagattgagtat

SEQ ID NO: 2894 - DNA, 1000 bp, mus musculus
caaaagaagaatggatacagaaaatgtggaacattcacacaatggagtgctagtcagctattaaacacaatgaatttatgaaattcttaggcaaatggatggatctggaggatatcatcctgagtgaggtaacccaattacaaaggaactcacatgatatgcactcactgataagtggatattagcacagaaacttagaatatccaagatacaattggcaaaacacatgaaacacaagaggaagaaagatcaaagtgtggatacttcattcttacttagaagggggaacaaaatgcccgtagaaggagttacaaagtgtgaagcagagactgaaggaataactatccagaggctaactcacctggagatccattccatataccatcaccaaacctagacagtattttggatgccaagaaatgcttgctgacaggaacctgatatagcgttctcctgaggggctctacctctgcctgacatatccagagttggatgctctcagccaaccattggactgagcacagggtccccaatgcaggagctagagaaaggacccaaggagctgaagggattttcagcccataggaggaacaatgatatgaaccaaccagaccgcccctcccacagagctcccagggactgaaccaccaaccaaagaatatacatggagggatccatggctccaggtgtagcagaagatggcttagtcggtcatcaatgggaggaggggctcttggtcttgtgaagtctctatgtcccagtgtaggggaatgccagggccaggaaaaaggagtgggttgtttgttgagcagagggtggagggagggaggaggtgtttttcagaggggaaaccaggaaaggggataacatttgaaatgtaattttaaaaaatctagtaaaattaaaaaaaaaaaagaattttcatgtctgcattactaacaagtgttaagttgatgatcaggaacaatcactggggatatgtactgtactgaatgatctg

SEQ ID NO: 2895 - DNA, 1600 bp, mus musculus
tccatgttttgtatggaatcttctgcacctgagattctctcttccatctcttatgttctgttgctgatgctagcatctatggttcctgattttccctagggtttctatctccagagttgtctccctttgggttttctttattttttccaacttcctttttagatcctggatggttttattcaattccatcacctgtttgttagtgttttcctgtaactctctaaaagatttttgtgtttcttctttaaaggcttctagctgtttacctgtgttttcctgtatttctttcttaaagtcctccataatcatcatgagaagtgactttagatcaatgtcttgcttttctggtgagatggtgtatccaggacttgctacagtgggagaatttggttctgacgatgtcatgtaaccttgctttctgttgcttttgttcgtatgcttgcctcctgccatctgattatctcaagtgcttgctgccctcaatatatctgattggaccctgtccttcctattatcccagttgattcaggactcctcagagttcagctttctctttgatcttttgattgtggtttcctgtgaacctgagaatctgggtgtgtcagagattttggcagtcaagcttcctctgagaccctgaaatactggtgtgacccagctcctgttatcatgggatcctgctgtcctaagatcctgggtgtgttacagtgcctggaagtggtatcacctttgtggaccatggagttgtctggtatgttctaaaccaaggtaaaccagaactgatcaaaagaacccaagcctctggttaggaagggctctggtgtccttgttcctgctgtcacattcccatcacaattggattggaacagatattgtgttccactcaccagtgatcctaagatcgtgtggagaatcctctgggaactgtggtggtgtctgctgattccataccctaggtgactttatttattcaattttattattcaattatgctggtgaggactggatgggacttgtgcccctggtcaggccagttttctgcttccctactgctgtctcattacttacttttaagtattcagcttattattccaggatttttgggaactttttaggacgttgtgaaaaggtgataagtttgcatcatcagaagattatctgatctattttggactttttctaccatgaattccatgatttataaaagtacttaatgatgaatgaatgagggtatattgaacaggtcatgcctaagacactgcagtagtcactgctgaattctgaataagaattatctcaagattacaaaaccatctgtcatgtggttcttcccttctagcctaagtttaaactgctatttgctaaaacaaacaatcaaaaaaaggatcaagagattttattcttcacttttcaagccataccgttggtgattacacagttaaataaaatatatttgtttcctgttgattacgtttttcaagacaatgatttataactaagagtattttgttcctgagcaaatattttaaatgtttgaagacatttttatatatcttaaattacctgcaagatgctactagttataagatggcacagttct

SEQ ID NO: 2896 - DNA, 1000 bp, mus musculus
cagtgttgcctcactttatattttctttattgtgtctactttccttttgaggttttggatggttttattcaattccatcacctgtttgctcatgttttcctgaaattctttaagggatttttgtgcttcctctttaaggtcttctacctgtttagcagtgttctcctgtatttctttaagtaagttattaaggtccttcttgatgtcctctaccatcatcattagatatgcttttaaatccgggactatctttttgggtgtgttggggtgcccagcactgggtagggtgggagtgctgcattctgatgatggtgaatggtcttggtttctgttagtaagattcttacatttgcctttcaccatctgtaatctctggagttagttgttatatttgtctctgcttagagcttgttcctcatgtgattctgttagcctctatcagcagacctgggagactagctctctcctgaatttcagtgttcagagtactctctgcaggcaagctctcctcttgcagtgaaggtgcccagatatctggtgttcgaacctgccttctggcagaagttgtgatccagtcaccagaggtcctaagatcctatggacctttggggtgtccacagactctggacccaagctgccccggtgctggtgcggaccagaagggacttgtgaccctggtcggtctaggttttctgcttctctacttaatgcagtctcaggtccctatgattgcattggagcagaaattgttttccactcaccagaggtcttaagatcccttggagggtcctgttggtaccttgggggtgtccgcagtctccacgcacaaggtgccctggtcatgggacaccttttaaattctgaatagtgtctgcattattctatgtaaataaatatggcaacatgttttgccgattttttttcttaatgagacaaggtacagataaatcatagaggtaaacttaattggaattgcaataatacatttaaaaacctttta

SEQ ID NO: 2897 - DNA, 1200 bp, mus musculus
atatttttcatttaaatgtttgcttatttattgatatatttgtctattaaatgtttacttatttttctaatgcatataggtcttttgtttacatatatgtccatgtggcatatgaggacctgttatgcttgttgttctcagacggccaggaaatgatgttagaaattgagcccagaacctgaggaaggaagaacactattgttattttagttgtattttattactcattttattcatttccatttcaaatgatatctctcttcccagttatccctccaaaaacccactatcatatccctcatctcccccacccctttgtctctattagggtgcttccccatccacccatccactcctaccttactgtattctagcatctatctaccctgaggcatcaagcctcaacaggaccaagggccttccctcccattgatgccagataaggccatcctcttctacatatgcagctggagccatggatttctccatgtacattctttggttggtgatttattgcctgtgagctctggggtattttattactatagggttgcaatccccttcagcttctccagtccttcccctacctattccattgtggtctccagactcaataaaatggttggttctaagtatctacatctatattagtcaagtgctggcagagcctttcagggaaaagccataccaggctcatgtcagcaagcacttcttggcatcagcagtagtgtctgggtttggtgtctgtatatgggatggatcccaatatggggcagcctctagatggcctttccttcagtctgtgttgcattttttgtccctgattttcttttggacaggaacatttctgggttaacaattttgagatgggtcggtggccttatcactcatttaggggctgtgcctatctaatggaggtcttttctacaggttttctttcctcttttttgggtatttcagctaaagtcatccctgttgggtcctgaaaatctcttgcttccttgacatcttggacttcctagtggctaccccagttccctattccctactgatatatatttctattagatttcctgacacattttaggctacaaatatgtgaagagtttaggacattactgaagttatttttttctatgctcatatttccctttgcaagtcatctattcatgttaagttatttttaagatgcttttttgt

SEQ ID NO: 2898 - DNA, 1200 bp, mus musculus
attaaaacaagtataagcttcctagaatcagagccagttaatttgtagggtggaggtaatatttatggggattaatgtaaataccgaaatcatcatgaatgataaatgaggtagatttagggggaaatgtggtgggagataaatgtgttaaataatgaaagagaggagccttcatgattcaagtaagagctccagtgatattatcagtggtatttgcaaatataaatatggtttcctctggggcagtgggctacccacagacagacagcctggtctccagtcgagcataggtcttgaaccctgtaggacccaatgggtgatgatttccatttacatgggacagaaggtgttcgattatgtcttctggacccctggttcatgtcaaagttactgcccccaaagcccccacaggagaggtgtgtggctatcagtcatgtaggaacagtgtcaagcattcccacatgcaaataaggtttcccccaaaatctcagtccaagccaatgagaggcacctgctgttgaaccctgaattacccccagaactgtatataaatccatccaaggaattaaaggtatgtgagaactattcatttgtctgaatcttttgttccaagagctgtaacacttgggaagagatcttctctcctgaagagccaactaaggtctcaccgcattcctcactaaatagttggcttctccttggcccagcctgacctgactcattgcagagtgactaggagttactgagcaacctggaagacactgcagagtcttcctctccttgccttcactagcttccctttgctaacctcacaccaggcctggccagagatctccatggaaaacctctggtacccaggcccacattttccagaatgatagggcattagaatcattgactcgagatgcggtgcacttaaccaagtgtatgctctcagaccatgaaactcaggaaaagaggaatatttacaggaaacaatgggaggggggagggattttgcagctaacagaggtatgatagtggtatagcagtaaactgtgtcaaattgtagagggtgggagtcttggcaatgaaaaactagctaagagtactgtctttataatagttactgatgtataaaaagattacaaaactttgggacaaaattttagggcctttctaatattttctttgctgggataatgttcagagcaatttatt

SEQ ID NO: 2899 - DNA, 1000 bp, mus musculus
acatttcaaatgttatcccctttccaggtctcccctctggaacacccccattccatgtctctccccttgcctctatgagggtgctcccctaaccatccaccaaatcccaccttcccaccctggcatttccctactatggggcgtcaaactctctcagacccagggaatgttcctcgcactgatgtctaacaaggccatcctctgccacctatgcagccagagccatgggtccctccatgtgtactctttgcttggtgattcagtccctgggaactccagggggtctggccagttgacactgctgctcaacccatggggatgcaaacaccctcaagtccttcagtcccttctccaactccttcattgaggacctaagaagacaatatctaagagaagaagagaaaacattcattccaaagtcagaaaattataagaataaaggaaatattatttaactaaaaggtgatttatggaccaattagactgcttaggtaaattattaatcaattaaacattttaaaaaatatatacaagggtagaataactacaaggaagttaaaagaaaggacatggatctcacatggttttgtttcgatttttcaaatgtaatggaaaccactgaatatttaatgttagaatttctgtattatgggtcccaatatctcctattcaactgttcttttccatatctgataaatattcactgaggacccagtactgtcttaggtctgagtttagagttagtgaatggaataacaacacttatatctttgattttataagatgagtaggagggcaaccctgtaggaggaccagcagttccaattaacctggaacccagagatctctcagatactgaaacacaaaccaggcaatacacaccagctggtatgaggaccccaacacatatacagccaaggacttccagatctgagctcagtcacagaagatgtacttaaccctcaagagactggaggccccagagaagttagaggtttgg

SEQ ID NO: 2900 - DNA, 1600 bp, mus musculus
aagcttcctcctacagatagtgacccacaactggacaatgtgcagaaattgagagaccatagaacattgaaaaaacaccttctctcaagattcagagaaccatatggaaaagaaggtagaaaaattgcaaaacccattggggataaacgacaccaaggaaacaggttactgtgttccagatataataggactgactagaacgtgaaatcatagagatcgtgtcagaatgtacagagtctaagccagataggtttctagcactgaaaaagaaagcagacacaggctcttacttgatcagactcctatccctatccctatccaagagactataaaagtgtcaaccagtctcaaaggaaaagttcatttctgtcacagtctcattaggtatacaaaccacagttaagagcatgcccatatccattgatggccaatacaaaacaaactcaatggtatttctggatattttactttgtttctttttctttttctttttcttttcttttttttcctttttttttttttgacatcgaaagattatttaggcatttttattagatattttctttatttacatttaaaatattatcccctttcctggtttctcctctgaaagccctcttcccctattgcctatcccctccccctctgcctgctcaccaactcacccactcctgcttcctggccctggcattcccctacaatggggcatagagccttcacagaaccaagggcctctcctcccactgatgactgattagtccatcctctgctacatatacagctggagccatgagcattagtgcctattttgagcattacaaaacaaaaacaaaaacaaaaaaaacaaaaaaaaacccttaccagtcttttgcttaaatattatggattctaatttgtggattttatgtttcatttgtgtgaatgtgcatctctctctgtctctctatctctctgtctctctgtctctctgtctctgtctctctctctgtgagtgtgtgagtgagtgtgtgtgtgtgtgtgtgtgtgtgtgtgtgtgtgtgtgtgtgtgtgtttcttaggctttttcttctttttctgtttcattttattctggtccatttgtttttttactgcatatttgttttctaaaaaagaaagaaaggaggcatagaattgtatgtgtggggaggtgggatgatctgggaggagatgatggggaggaaactgtgattagaatgtgttgtataaaaacttatttttaaaaaatgaacaaacaaaccttgtttacatcctttttatgtcaaatagggtcacagcatttttaagcctaagaagaatcacaacactgtttaacatctaacagaattccctgtaagaatgaaattatcaattaataattgaagtatagaaattgccaagtccatagtccaaagatgcagaaagatatcaagtttatcaaactcaagtaatatttgtgtcacgaataaacttctgttagtatgtgggtaataaaaaacttactcaatgttttcattatcataatggtctccattcctatataattacaaatgaaaaatagacctagttcagtttttcagaatcatcgttataacatagttaa

SEQ ID NO: 2901 - DNA, 1400 bp, mus musculus
tcatatgaagtacacaattgctttttccatgtctgtgaagaattctattggcattttgattgaaattgcattgaatctgtgtattgctttttataagatggccattttctctatatagatcctactgatccatgagcatgggaaatcttttcaccttctgtggtcttctttgatttctttcttcatggatttgaagttcttgtaatacagatctttcaagagaatctttaacagtatgcagggctcatgtttcttctcaagtgagctagtaagtgaaatctatagaaagaactatactgactatttttattttttattattttattcactttacttcccaatcaatagctgtctccctctcattccccctcccacagtccttcccctgcccttcctctccttcacctctgagagagtggaggccttctttgggtatctcctcaacctggcacatcaagtctctgtggagctaagtgcttctctcccactgaggacagacaaggtagctgagctagaagaacatatcctacagacaggtaacagctttggggatagcccccacccaagttgttcaggacccacatgaagaccaagctgtacatctgctacaaatgtactggtgtaagaggcctaggtccagcctatgtatgttcctttttggtggttcagtttttgagaacacccaaggatccaggttagttcactctgctgttcttcatgtgtagttcctatcttgttcaggcccttaatacttctgcaaccctttctcaatctagggaaaccttagaggtcataacttttccactcattcacacgtgcacacatgttcaggtacacacacacacacacacacacacgcacgcacaagcacaagacaggtacccttactctcttttatggcccatcacagaaaagagtcctactgtcacacaagccatacctttctgcttaggcttcataagtcctaagagttggagagcgagctctatagtctgaagaaagcaaaggcaaataaaaagggggagtcccattcactagagcagagaagcctatcataacaatagaaattgggaagaaacagagatacaaagcaataccctgatttgattcttagaaggccaaatgtgtcactagaatgtacatgagtactctattcttattgtacaatatcaccaacctgagcatattagagcaaagtattttggtacttagttcagccaaagcagtaccatgttcttcacagaattaaaagagaaattcaacatgagttctaaggaaatctatcttcttagaagactcagtagctcactgcctgttcttgttatcatctctgagaggcaccaggtctaattttggcaaaaacagtctcagggatatgagagggatttggtgtgaagaca

SEQ ID NO: 2902 - DNA, 1400 bp, mus musculus
aagtaaagatgaatttgaaacagcactctagaacattcttctcaagctggatgaggggaaataaagactaaaaggcaatgcaagattcttcttaaagtacaagatgacattaatcagtgcaacactggtttggtcaaagaggatgaaatggaaggaattctttgcttcacttctgagaggtacttttatatcacatgaaatttaagcagaaaggagggaaatattggcaaaagaacccattatatcacactcagattatactctattcttttttattttattttttctttttttatttacatttcaaatgctatccactttcttggtttcccctccaaagacccccccatcccttccaaagaccccttcaccctgcttctatgagggtgttcccccactcactcacccactcccactttcctatcctggcatttccctacactgggccatcgagccttcaccaagggcctctcctcccactgatgtccagcaaggccatcccactcccactttcctatcctggcatttccctacactgggccatcgagccttcaccaagggcctctcctcccactgatgtccagcaaggccatcctctgctatatatgcggctggagcatgggtccttccatgtgtactctttggttggtggtttagtccctgggagctctgggagggggtctggttggtacatatcattgttcctcctatggggtgcaaaccccttcggatccttcagtcctttctctaacttctccactgggtaccctgtgtgtccaatgattggctgtgagcattcacttctgcatttgtcagactctggtagggcatctcaggagacagctataccaggctcctgtcagcaagcacttgttggcatccacaatagtgtccaggtttggtgactgtaaatgggatggatccccaggtagggtcgtctctggattgcctttccttcagtctctgctccacattttgtatctcctctcataggtatttgttctcccttctaagaaggactgaagcacccacactttggtcttccttcttgagcttcgtgtggcctgtgaaccttgggtattctgagcttctgggctaatatccactcatcagtgagtgcataccatgtgtgttcttttgtgattgtattacctcactcatgatgatattttctatttctatccatttgcctaagaattccattgtttttaatagctgagaaatactccatcgtataattgtatgtcttccggatgccaagaaccacttaattttctgtaagaattattttctcagttcagctagagctctttctattctgtttagagagaccctgactaacattttcacagatcatatctcaacacatgtgcacattatttggtgaagcattagaaaga

SEQ ID NO: 2903 - DNA, 1000 bp, mus musculus
tgctggagcttgatcctcctgtgattctgttagcctctgtcagcactcctgggagtccaactctcacctgagttccagtggtcagagcacactctgcaggcaagcaattttcttgcagggcaggtgtccagcaatctagagctctgatctacatcctgagtcctggggtcatagccttccctgtaggccacctttgctctgtcaaggaaggtgcccagggttgtgggtctcagctctgtctcctggatgaggatgagggcctgaccggaccttgaccaagaagccctgttgcttctattgcccacatgctctcaggtgattaggagttccttggtgtgctaggggtcctttggcgtggacagtcctctggtgccatagatgtcctaggttggcttcattcagaagatgtgggggttagcctgttcagaaaggatcccagcctctggttggtagggtttcttctgtccctgtaactgctggtacaagaccctccgcgattcttgatgatgcgatcccggggttctgcggcctggacagcactctggagcccctagcggcctctgctgggctcagaaggaagcaaatgaaaacttttgtagattggttttttacttccaccatgtaggtcctagagggtgtcaacctctaattgcaaggctcaggagaaagaaccttcacctgttgaattatctcactggctcaaaccttagaaatgttttaagtggggctagagaggtggctcggtggttaagagcactgactgttcttccgaaggtcctgagttcaaattccagcaaccacatggtggctcacaaccatccgtaataaggtctgatgtcctcttctggtgtgtctgaagacagctacagtgtacttacatataataataaataaatctttaaaaaaaagagaaatgttttaagtatttaaaataagggacttaaccttttaaaacttttaattctgatgactagtgtatatgttatctcagaataacatg

SEQ ID NO: 2904 - DNA, 1000 bp, mus musculus
gcaagggctgcttttccactgcaaaacagagggaaatctacaagggaacatgtagtaaagacctgttttacaggtaaagggccagtagtgtaaggactgcacactaaggaagtcttagaggaagggtgttatagtgttccaaagagctacagtggacatgataccagcttctgaatcctgttcacttttaggaagcatggatctagatgtagcaggttcctaagaaaatgaatcttaatgctaacaacttgatttgtatttttttgttctctccctttattgattgtttggattaatttaatttattaatttaaatacccacgccagctgagaaaaaacatagggcccagcttatgcaggacatacttcacccattcccactccaggaactccaaatttcttccatcccacttcctatcagcagccaagcctgtgtgcctcctagggggtccacggcaatcaaagacacaggtgagaatctcacccaaatacccatatgagctgggacaacaacagggcctccctgattcaggaccaacctcccctgctgccttttgaggtggggggggggatgcagatcagctgttagattcccaccgatgtattacagtgtacctgccttctaggaggtctgcagtaatcaaagctacatggcagagcagcagccagataaaccacccacatgccacaacctgcttgcttcctaagaggtccacagtaaacaaacacatagagccaagctgacatggggccccactcgccatactgagatccaaattcctccttgtctgtttctacactcaggccagatcagagggcccaatatcttcccaaacctcacagcctgtctgcctcccaggagacccaaccttaccagaaacagtactgcctgcctccaagaagactagctctcactgccaccaaggaggcctgctctagtcagagacaccaggccagttaacacccgtgataaccagatggccagaggcaagctaaagat

SEQ ID NO: 2905 - DNA, 1400 bp, mus musculus
tcctccagaaaaatgaaatcacatgaaaattaagcagggaaatgtgtagagggtaaacagtaaaacatttataactcatgaattgagacaagataacatcagataagatcagaaactttaaatacccctccccatatatatgagtttcaaagaacaatggttgaattactactgctttttctctttcctttgtgttaataagagaaatgcatttagtcctgaaaataagctgacttgcagaaagcattaacacttttttaacaacctaattttggacatattaaacagcatcatactgctgctctattcgtggtctctaagcaacttattcaaattttagatatgcacaaaatgtgtgttgtcaagcttccacagatgtacatactactgagaatagccacacaaacaagagattgctgtattgatattcacattttcctacttcaacataattaagagtttaattgtgccttgttccttaaaggtgagatgcaaaatcatcagcattaaataataaacaaaaggctttatttctcagatacaaatgaataactaacaattcaaatgttattttaaggaaaaaagaaggaagggaagtatgtcaacatgtctacatggaaaatatagaactttctaaacaagacaaaggttattgtttaattttcagatatttactttatttacatttcaaattttatcccttttcctagtttcctccctgaatgtcccctattccctctccctcccctgttccccaccccacccattccagcttcctggccctggcattcccctacactgggtcatagagccttcacaggaccaaagacctctcctcccattgatgaccgtttttcagtaacagtgagaacctttagaagtatctctacaatgacaaatacagtctcccacatatattctaattcaaaatttcttgaatgcagagtcactaagaaaagtagaacctcatgtgtcctgcatattttaaaatagacaaatattaagcttgctaactcattttagatatgcaaaaaaacaggattgggtatgttgagtgatttcactttggagaaggacaaaaaagattagtattcatagacatatttatctttaccattcttaactcatggagctcctcctccttaaaaaactaaaaagggataaaagaacaaacaacaactacaacaaaaacttcatgcaatcaatttcctccaagttgtaaacaaaagtgtttttccatgtaagctatctgcttcacagtcctttgagaggcaagaagcccatctgttagggcttcattataagatccttttgacatacttgaatcttttaggttaatcataggctttgctctttaatgtttccttggccagaaatgtttcccaatcctttagcaatct

SEQ ID NO: 2906 - DNA, 1800 bp, mus musculus
ccacactccaagtttgtcagtgactcgtttgtaattacaagtctccagaacagtaaaaaataatttctactgtacataagtcatcagtatacaatgttcttttacgctagtccaaatgaactaattaaggactttatatacatgaccttgaatggcagtctggttcttggtcaatcataggatggaaatcccggtgaccctgaggcattttgacacactcctggacactaggctcttgacatatggcctcagccctccatagatttttggccatcactcaggtaagggcattcctgaagcccctccacaggtcaagtagcctcaagaggtaagtaaaggcctgaagggcttagccaattaagctttccttcccagacactcctccttgtaaaaggtatttaacctcaggctcacccatgagaagtgggatatggtttttactcaactattctctgccatgacaatatatatatatatatatatatatatatatatatatatatatgtatatatatatatatgtatacacatatatatacacatatatatatacatatatatatatatatatatatatatatatatatatttgagacagagtttctacacatatatatatatacatatatatatatatatttgagacagagtttctctgtatagccctgattgtcctggaactcactctgtagaccaggctggcctcgaacttagaaatctgcctgcctctctgcctcccaagtgctaggattaaaggcatgctccaccactgcccagagacaataaatgtcttaaaaccaggaactgcctctttttatcaggatcctctgtggggagcaatggaacatgccttcatctaaagagctggccacctaatctcctgcagaaggcctctcagcactcccagccatggcattcaccaagcctagccacctgctaaacaaaccaaggattctcatccccataggacccagcaggagctcccccctttcccattttccctgggctagatccagcctgtgggccaccacccagttctcagctcttccgtggctctaagtggcacctaggtgaccaagagcctgacaaccagatggccccagcaaccctgcaagcccagggactcctgagccagcttctgcagacaccagggacctcagcctgcactcccctactcctggagtggtgtcctgcagcttcccatagcccaacagtggccaggtgctggtgtggggtaaacacagtcaaaactccctcatcttgcctccccaagtggcccaagccctgtggtagagcagatgtgagataccacagaccctacacatgtatatgtatacatttacacaagtatgaatatatgcatactttaaataaggaactgtcgtatttaatatataaattgataactacctccataattggaaaatgccattaaactggagacctaggagctctaattggacacttgtagagctaaggctgacagactcaagattcaggatcacttgattatttgattatagtttaaagggaagcagaaaaagggttaatgtctcagtaagaattaattcttaatcttgaaaagctattctttttttattaatttttttttgtttttacctattcactttacatcccactcactgccctctcccagtcatccccccacatgatcctccctcccttctcctctgagcaggtggaggccccctggatattcccctctccacactgatacttcaagtctcttgagactaggcatctagacatggaaagctgtgttcaggctgaggtcaattc

SEQ ID NO: 2907 - DNA, 1000 bp, mus musculus
atcaaaacccaaataatcaaatttaaaaatgaggtacagttatgctaggcttctgtctgaaagcataagaaagtatcattaataaagtcagggactgattcttgtccataagatggatctcaagctgaaccagtcattggttggccattcatccagtctctgttccatttctgtccctgcacttcttgtaggcaggacaaaatttgggttaaaattttgtgagtgggttgaagaccttatctctctcctaggagtcctccctggatacaggaggtggccatttcaggttccatattccccactgctaggagtctcaggtagagctacgctcaatgattctctggagcctcccccattccaggtgcctagaacagatggaatgttcactcccactgcctatttctgatttctgtttactgttatggcccctggttctccctacattagatgctccccctctgtgcttccttttggatacctgttcccacccacttccctccttccatctacctccaatgactcaccctctgagtgagatttaaacatcctcccttgggacttcattgttatttagcttctttaggtttgtggtgctgcatccagcagaagatggaaacacatgcagagacctgcagccaaacattagattgagcttgtggaagaattagaggatattgggaccctgcctgaggggagactccacaggaagacccacagagtcaactaacctggacacttggggaatttcaaagactgaatcaccaaccaacgtgtatacatgagttggaacttgcgcccccttatataatgtagaagatgtgcagcttgaatttcatgtaggtctgccaactactgggacatgggctcttactgacttggtttcctgcctctggatcctgtttctctaactgagttgctctgtctagcttcagtgggagaggatgtgcttagtcctgcagtgatttgatgtgccattgtgggttagtatccaggtgggcgg

SEQ ID NO: 2908 - DNA, 1000 bp, mus musculus
agaggatgggagggacttgggagaaaaagaggagggagtgggggaaaagaggggcagaatcaagtataagaagagatggaggagatatacagagggtcaggaaattgaacagagttgtgcagcaataggggatggagaactgggggtcgcaaccagaaagtcccagatgccaggaaagcaagagtgtcccaggaccacatggggataatatttgttgaaataccctacaaaggggagggagaacctgtcaagaccatatccagaagctaggcatggccccagggtggaaggatggggccacacacccatctctaacattttcacccagaattgcttctgtctaaaggaaatacagtgccaaagagtggaatagagattgaagaaaaggccatccagagactgccccacctgggaatttatcacacatggacacaccagaaccagacactattgcagatgccaagaattgattgctgacaggagcctgatacaactatctcctgagaggctctgccagatgtggatgctcacagccaaccatcagactgagcacaggggaccctaatggaggagttagggaaaggactgaagaagctgaaggggccttatctggcatcagtgggaagggaggcccttgttcctgtgaaggcttgatgccccagtatagaggagtgctagggcagtgaggcaggagggggtgggtgagcatccttatagaaacaggataaggggatatgagatagggagtttgcagagggaaaaccagaaaaggggataacttttgaaatataaacaaatataatatccaattaaaaatgaaaataaaaacaaaaaatgtttaatacttaaatcaataattactttttaaatattggttatcttgatagctattggtgaataaatttctatttatttatttatttattttagttagatattcatttcatttacatttccaatgctatcccaaaagtcccccacactcttccccactcactct

SEQ ID NO: 2909 - DNA, 1400 bp, mus musculus
atatgtacatacatgcatatatgcatatgttttgtgcatatgtccatatgtatatatgttggaaattcttttttcccatttttatactcaatttattatttgtactactgacaatgtccaaaatatatctcatgtaaaagaaatgggaggaaaaacaaataaaattcaattatttttacagtttcaagctgcaaatcacaagtaattataaagccctgtaagaatattgatcaacaaagaaaacaaaggataaacttcacatgaatcaaatagtacagagataataatgtcacttgacttttgttaactataaaaaatagagaatggaaatgcagaagtctcctctccggaatggttaagatttaaagttttctatatgttcaatgtaacaagataatctagaaagtcttctagatgctgtccaatggcctaatctctcaggttacaaatgcatgatagattttcattgacagcgaaaggagaaatcaatatgaacacttaggtcagttctgtgagtccaagttcaaaggagttcacagaaggccaggctacatctgtaagtgtaatttgtgtgtatacatatgtatatgtatacatatatatatagatgcatatatgtagacatgtatatgtacatacatgtatatatccatatatgttgtatgcatatgtacatatgtatatatgttggaatttcttgccactgtcttccataccctttattttcttccatcttttactgttactaagtgcattatggattaatttctacttgtatgtctcctctacaatatctaatgagcttctgaacattttattttattttattttattttattttattttattttattcttttggtttggccttaaactatcattacaaaatgactgattttaagctaagtattgtggtgcatgcctttgatccaagtatttgggaggcagaagcaggtgtttctctgtgagttcagggctacctggtctacatagtgagatcctggacaaccaggactatgtagtgagactttgtagaaaaataacagcaaaaataaacaaaatcaatgagttcagtttcaaaaatgtctgcagcaagtactgtacaggaaaactgaaaacatactattttaaataaggaacacagcgtgtttcgtccttttccacttttagtatcatgtactggggatcctgactagagattggaaggtagggaaagaaatatgactggaaaaaaaatacaccactattctccaaagaaatgcttattgaagaatccttaagtatcaaacagttaacaagatgctatgctaataaacaacaagttaattttaacagtaaatactgctactgacaatcaccaaacacctgagattaaacctaggatatgccttacatggaact

SEQ ID NO: 2910 - DNA, 1200 bp, mus musculus
gttaaaggatataaatgtacttggatgatgataaatacaataatatggaaataaaaatgcttcagataaaaatgtttaaagctggtaaatgcaagttataaatgctgaggggcttaagaaaaattttgaagatgtataaatgcaaattataaaaataaaaatgatttaagatatagaaatggctcttcttcccgccagcttcctacccaggacagatcatctgccagatacccacccataccttctgcctgcttacctcccagagggtctacaaaaattaaagacacaggtgagaatctcacccaaataccctcaccagctgggacaacagcaggacccagctgaccagggacccacctcccagatgttctgagtcctatccttcttcctatctgcttcctactcaggccaactcagttcccagataaccaccaacatgttacagcctgcttgcctcctacaaagttcaaagtaaccaaagacaaagagcccagctgacatggaacacacctgccctgcctagctccacctccttactcctccacttctacaccaggccatatcagaaggcctgataccctactacaccccacatcctatatgcctccagggagttctacaggaacaagggacattggaggtctgctctaaccagagacacaagaggcccaccctaaacagagatagcactgccccccttcaaggaaactggcttttcctaccactaaggaagcctgctctagtcaaaaacatccaggatagttaacaccagagataaccatatagccagaggcaaccacagggtcataatctacagaactcaatgaaatctggtatcaggagaaaccagttcttccaccacagcaagtcctggatacaccaacacacctgacaagaaagataattacataaaatcccatgtcataaagatgatataggcccttaaggaggatataaagaaattccttaaaaattacaggaaagcacaggcaaacaggtagaagcccttaaagaggagacaaataaatccattaacgataatacaggaaaatgtagtcaagcaggtgaaggaattgaacaaaaccgtaaaagaactaaaaatggaaatagaaacaataaagaaaatacaaaggggggctgccctgagtagtagatcaggagctacaaatgcaagcatcaccaaaagaatgcaagagatag

SEQ ID NO: 2911 - DNA, 1600 bp, mus musculus
tcaagagacttgaagtatcagggtggagaggggaatacccagggggccttcacctgctcagaggagaagggggggaggatcatgtgggggaatgactgggagagggcagtgagtgggatgtaaagtgaataggtaaaaacaaaaaaaaatattaaataataatagctttccaagattaagaattaattcttactgagacattaaccctttttctgcttccctttaaactacaatcaaataatcaagtgatcctgaatcttgagtctgtcagccttagctctagaagtgtccaattagagctcctaggtctccagtttaatggcattttccaattatggaggtacttatcaattcatatattaaatatgccagttccttatttaaagtatgcatatattcatacttgtgtaaatgtatacatatacatgtgtagggtctgtggtgtcccacatctgctctaccacagggcttgggccacttggggaggcaagatgagggagttttgactgtgtttaacccatgccagcacctggccagtgttgggctatgggaagctgcaggacaccactccaggggtagggtagtgcaggctgagtccctggtgtctgcagaagctggctcaggagtccctgggcttgcagggtggctggggccatctggttgtcaggctcttggtcaccaaggtgccacttagagccacggaagagctgagaactgggtgggggcccacaggctggatctagcccagggaaaatgggaaaggggggagctcctgctgggtcctatggggatgacaatccttggtttgtttagcaggtggcttggcttggtgaatgtcatggctgggagtgctgagaggccttctgcaggagattaggtggccagccctttagatgaaggcatgttccattgctccccacagaggatcctgataaaaagaggcagttcctggttttaaggcatttattgtctctgggcattgttggagcacgcctttaatcctagcacttgggaggcagagaggcaggcagatttctaagttcgaggccagcctggtctacagagtgagttccaggacaatcagggctgtacagagaaaccctgtctcaaatatatatatattgtcatggcagagaatagttgagtaaaatccatatcccacttcttatgggtgagcctgaggttaaataccttttgcaaggaggagtgtctgggaaggaaagcttaattgcctaagcccttcaggcctttatgtacctcttgaagctacgtgacctgtggaggggcttcaggcattgcccttacctgagtgatgcccaaaaatctatggaggtctgtggccatgtgtcaagagcctagtgtccaggagtgtgtcaaaatgcctgctgttcctcagggtcaccggggtttccatcctgtgattgaccaggaaccagactgccattcaaggtcatgtatgtaaagtccttaattagttcatttggactagtgtaaaagaacattgtagactgatgatttatgaacagtagaaattattttttactgttctggagacttgtaattacaacttgagtcactgacaaacttggagtgtggcaaa

SEQ ID NO: 2912 - DNA, 1400 bp, mus musculus
tcaatgataccttagtcaaggaagaaagaaagaaagaaattaaagactttttagagtttaatgaaaatgaagccacaacatacccaaacttatgggacacaatgaaagcatttctaagaggaaaactcatagctctgagtgcctacaaaaagaaactagagagaacacacagtagcagcttgacaacacacctaaaagctctagaagaaaaggaagcaaattcacccaagaggagtagacagcaggaaataatcaaactcaggggctaaatcaaccaagtggaaacaagaagaactattaatagaatcaaccaaacaaggagatgtttctttgagaaaatcaaaaagatagataaacccttagccagactcactaaagggcacaaggacagcatcctaatgaacaaaatcagaaatgaaaagggagacataacaacagatcctgaagaaatccaaaacaccatcagatccttctacaaaaggctatattcaacaaaactggaggactgtgcagcagatagcttacatggaaaaacacttttgtttacaacttggaggaaattaattgcatgaagtttttgttgtagttgttgtttgttttttatccctttttagttttttaaggaggaggagctccatgagttaaagaatggtaaagataaatatgtttatgaatactaatcttttttcgtccttctccaaagtgaagtcactcaacatacccaatcctgtttttttgcatatctaaaatgagttagcaagcttaatatttgtctattttaaaatatgcaggacacatgaggttctacttttcttagtgactctgcattcaagaaattttgaattagaatatatgtgggagactgtatttgtcattgtagagatacttctaaaggttctcactgatactgaaaaacggtcatcaatgggaggagaggtccttggtcctgtgaaggctctatgacccagtgtaggggaatgccagggccaggaagctggaatgggtggggtggggaacaggggagggagagggaataggggacattcagggaggaaactaggaaaagggataaaattttaaatgtaaataaagaaaatatctgaaaactaaaaaataacctttgtcttgtttagaaagttctatatcttccatgtagacatgttgacatacttcccttcctccttttttccttaaaataatatttgaattgttagttattcatttgtatctgagaaataaagcctttgttctttatttaatgctgatgattttgcatctcacctttaaggaacaaggcgcaattaaactcttaattatgttgaagtaggaaaatgtgaatatcaatacagcgaactcttgtttgtgtggctattctcagtagtatgtacatctgtggaagc

SEQ ID NO: 2913 - DNA, 1000 bp, mus musculus
catacacagacctgtgctatatcatatgccatgccataaagtgcaagcagtactcttggtaccatgcagtaggtattttcaggcatgagaacagagccatatcaaccacttattccatacatggttcctttgtttagccctggctggccttggattctctattctcctggcacagattcccattagctaaaaattgtgggcatgcaccaaagcaccaagttttgtagtaagtcttttatttttcagctatgttgaagttcaaaatcagaatcttttgcattttaagcaagcacaccactacagagctccacacttactcctagttagtcttcaaatgtattcaaagcagagtgttttctcctgtccctcattaaaatttaaattagggcaggaaatccatcagaaagttccttgcaatcttatatagacacatataacacacagaaatatcccaatttttaaaaaatgaaatatcgaagctctgaactatatttacagttaattccctagcattcctctagcatacccctagcctggctttccaatatgaagtgaggagaactatgttaagatagaaaaccccaactgaagtcatgttagcaccatgcaatcttgggggtttgcaaccccataggaggaacaacaataccaaccaaccagacctcccagagctcccaggaactaaaccaccaacaaaggagtacacatgggggactcatggctccagctgcatatgtagcagaggatggccctgttgaatatcagtgggagaagaggcacttggtcctatgaaggcttgatgcaccagtgtaggggattgccaaggtaaagacgagggagtgggtgggtaaatgagtgggtgagtggaggaacaccctcatagaagcagggggaatggggatggaaagggggggttccggaggggaaacctggaaagggtataacatttgaaatgtaaataaataaaatatctaattaaaaaaagattcagaagccaaag

SEQ ID NO: 2914 - DNA, 1200 bp, mus musculus
aaagtacaaagggactaaagttagagggggtgttatgggggaatggaatagcaggatacaggaaatatgaagtgaaacacagaataactgggagggggctccaactggggaggaaggagggaaagtcaatacaggaggagaagggacaatggggcaaaaaacaccaaggttgtttgataaagcctgtcttagttagggttttactgctgtgaacagacaccatgaccaaggcaactcttataaaggacaacatttaattggggctagcttacaggttcagaggttcagcctataatcaccaaggtcagagtatgtcagtgtccaggaaggcatgatgtaggctgagctgagagttctatatcttcatctgaaggctgctagcaggatactgacttccaggcagctaggatgagggtcttaaagcccacacctacagtgacacacctactccaacaggtccacgcctccaaatagtgcctctgcctaggctaagcatatacaaaccataacagagtatatcatgtttacatgtgtgttccagatgcggccttgtgcgtggccacagctatcctggaattgaccaagcccaagcttcagcctctgtcttggtcccagcatatttcacatttttcttttaatatacttactttctttttcttttatatgcatgaattattgtctacatgtatgtgtgtgaactatgtgaatgccctggtgccctcagaggtcatgagaggacattggatttcagaaattgcaattaaagaaggtggtaagtggccatctgggtgctaagaattgaacttggtccactgtaagagcagtaaatgatcttaaccactgagacaaccagctctccagccttactttcttgtatttaagcagccagagttcaactagagaagcagaactcagaagtgattaataggaagaggtttacttccagccacaggcttcagcactcccaagtcttcccaaggcatttggtaagcagtaggactggtctttaagaaagtcagactgagctcccgacagcgtccccaggtatatgctggatttggctagggatgccttctacagatcaaaattatttcatcagagacacctccatactgctattaaagctaccccattgattaaatcggtccctcaggtcaccaaagagagactcttccttatacagggtgaggtctccatcga

SEQ ID NO: 2915 - DNA, 1000 bp, mus musculus
acagccctcctcccaggccccactgctcagacagcccctccctttctcctctgagaaggggggggcgtaccttgggtaccaacccagcctggcatatcaagtcactgcaggactaggcacatcctcttctattgaggccagacaaggtatcccagttaggggaacaggatccacagttttgaatataaaagatttaagatttgaatctcaaagaaaaggttagattttttttaaaagaaaaatatctctaactgatgatctttttatgcattaaatgcaggcagaactggcagatataaaattttgtcaagtataagacatctttttttgctttggttttagtttaggggacttttttgtttgtaaatttttgttcttgagatggtcttgctaggtagtccaggctggccccaaacttgagatgctctggtctcagcttcctaggggttgaggttacagatgtatactaccacaccttaccctaaacaaaagacttattgacatcacagttagcaagtatactggctgttttttttttgtgtgtcaaacttgacacaaaaaagagtcatgagagaaggagcctaggttgaggaaatgccttcatgagatccagctgtaaggcattttctcaatttatgatcaggaggacagcctagccgatggtttgtggcgccattcctgggttggtggttctggattatatacgaaagcagcctgagcaaaccatggaaagcaagccaaaaagcaataaccctccaaggcctctgcatcagctcttgcctccaggtctttgccttgcctttaagttacagactacactgtcaaagtgtaagccgaagaaatcctttcctccccaacttggtttttgatcacagggtttcatcacagcactagaaaccctaaggcagcatgtaatttaagaataacaaccatttatggtgtttagtaagtactaagcacagttctaagtacttattttacatgatttgagtcattttat

SEQ ID NO: 2916 - DNA, 1200 bp, mus musculus
gaatggttttgttcaaagaaataaataaccatttgtttacttaagcaattggacttgggtggtgatttgaaatattgattgagggatgggataagaacagaagcagagataacaaaacaaaagttagacctgcaagtaaaggcaagaaggattcgtgtttgaatttgatcattagcaatgggaacacagaacaagaaaaatactcagatggcactatttttttaatttctttttttccaattttttatttaggtatttactgcatttacatttcaaatgctatcccgaaagtcccctatacaatcccaccagcctgctcccctacccacccactcccacttcttggccctggtgttcccctttactgaggcatataaagtttgcaagaccaaggggactctcttcccaatgatggccgactggggtactttctctaacccctccattggtgaccctgtgttccatccaatagctgacttctgtgtttgccaggcactggcataggctcacaagagacagctatatcagggttcaggtggcactattaaaagtcccaccagaggcaagagccacagagcttctgaggctgcgccatttttggctccagacaaccggccaccttcagggccagaggacaggtgtccgcccggcctgggaggctcctgcctcaggttccgcgggagggacagacgagagccacagagctcctgaggacacgccattttcggctccagacaaccggccaccttcctggccagaggacaggtgtccacccagcctgggaggcttttgcctcaggatccgggggagccatcttggtttcaggactccgaggaaagtagtctacacaggtgagagtgtggactactgaaacaatggcttctgtgacaggccaaagctacacagcttctcggaaagatcctgttttgggccttcatcttcggccatgaggaggtccaaacaccagataactgtgcaccttccctgaaagaggagagcatgcctgcagagactgctctgaccactgaaactcagaggagagaactagtctcacaggtctgctgatagagggtaacaaaatcaccagaggaacaatctctaaacagagacaactataacaactaacgccagagattaccagatggtgaaaggtaaatgtaagaatcttactaacagaaaccaggaccactcaccatcatc

SEQ ID NO: 2917 - DNA, 1400 bp, mus musculus
ttcctttttagtaatacaaatgcaattatggttggtaattcaattgtaatgtctctaaaatcaactgacccttcttctatacaatccaacctcattaactttggctcaagccttactgatatgcaaagcaacctgaaatctcgcctggcttcttcccaaacccaagaaactacatttttatacgattttttttctgtcattgtttccaagaaaagtaatcatttctcaaactatgtgctatttgtttgaatttccagtctgtaaattgtaaagaaggcttggggatatgaaacaagagaagataaattgcaaattggagctaaagagaaaataaagagatcttagtggattctaattgtttttcacatatcattggaacagctattatccttctttctaaatttatgttgtctgtgcatttatctatattcctatttgtctgtcatctatctgtcttccacctgcctgttagtgtctctttatttggcatggcaagttgtgctgtctttgtctgaaaagaagaaaagaagggggaaatgatgacaaatcttggtgtggcgtgaatagcaacgaggtaaggcggatgcctgatgtgcggatgaatcctggaaatgaagtggcccttgaattaaattaatttaaaatctggcaaatattacccggcatgtttgtcaatgtgctgtataattattaatttgttcattgaagcaactgtataaataaatagaaagcagaatgtcatgattaagcaagcattgaaaactccagggtcaaggagccctgcaatatagcaatctcaatagctttcctgggccctactttcatgtctccttgcaaagccacatgtcgataacagcaaattaattggcccacatttagatgccaacagggcttttgtattctcagtgcacatttttgtctccttggagtgagatgttagtaaccggggtgtttaatattacccctaggggagcaccagaaaatcttaacaatttccttcactagagtattttcattagtgctaaatgctgtgcaatttacatttgaaatcaggtgtaggggcaagcagcacgggacaaaacatgttgctgtggtgcagggggattttggttgttgttgttgttgttgttgttgttgtttcctcttcttccaatattctttatttactgccacaaggtctcaaaattaaagccaacaagtcgaaatgaaatgtttctagatttctctttgctcttccttatttaagggatggaaactctattttccttgcacatccaaagcagattttaccaagataaaggcacactttaaaaataataataacaacgtacctaaaggagagtgactactatcatgtgactgtgataaacagagattcaaggaaaaggacaaaatcctgt

SEQ ID NO: 2918 - DNA, 1200 bp, mus musculus
agagaaggatgggtcagtgttaagagccctggctgttgttccagaaaacctgggcttgatttcccagtgcccacacagcagctcacaaatgtctgtctgtaaccagggtatccaacagcctcttctggccatcctgggcactaagcatgcacaaaacatacagctattcagaggcaaaacacacatgtatataacattttttttaaaatgaaaggaatacaataaccagtgatactcatttcgacaaagtggtaaaatgctgttgaaagataaaatgatggcagcacaagctcacatcccctcctcaacttgcccagtctctccttaggtcactccaccacattcggaccctgcacaaccatgtccatcctctccttccccagcctccagagccctcatcgctgccagctacaaggaagttggtgatggtcctgggtggggaggccctcacccctgcatctgcctgcagcctcccgagtagccagactccattcactcccacccttgcctctcctaccaactctggagcagggtgtaggggggcctggctgtagctcagctgctgtggccaggaggcctgggtgaccccaggggcagctgggcagctgccctggtccaacaatgggtcagttatgtcaacatggaggcctttcttcaggaggtctggaagtggaaagaggagcagagtgacagaatttaccaccatttaaataaacttggcagctccttggtctgggattgagcctgcttcatcatagatcctaaactggcagcaactgtaatggaggcatttgttaggctccatgaagaaggggtcatctaccactgcacccacctggtcaactgatcctgcaccctcaactctgccatttctgacatttgggtggataaaaaagagctgagaggccgcaccctgctctctgtgcctggctactaggagaaggtagaatttagggtccccatgtcctttctcaggtctaaggctcagacaacaatgaggtggtggtggtggcaacaactaggattgaggctgggagatgtggctgtagctgtatgccccaaagattccagataccagcacttaaagggaaagtgtgttgtcaatccgttcttgtcccagagccttgccattgtcttcaataactttgtagacatggagtctggcataggtgctatgaagatcaacctggcccatgacaa

SEQ ID NO: 2919 - DNA, 1000 bp, mus musculus
agtgaccctccaggagaagctcaaggagcagatggtgaagcgccaggatcttctcatcagcaagctgtggtgcacgttccacaacaagagcatggtgaaaggagcctgccagaagacactgagtgacctgcagctggactacctggatctctgccttactcactggcccacaggcttctagcctgggcctgactatttcccactggatgcatcaggaaatgtgattcctagtgacaccgattttgtggacattggacggctatggaacaactagtggatgaaggtttggtaaaagcaattggtgtctccaacttcaaccttcttcagattgagaggatcttgaacaaacctggcttaaaatatatgtcggcggtgagccagatcgagtgccacccatgcctaactcaggagaagctgattgagtactgccactgcaaaggcatcgtggtgacaacatatagttcccttggttctcctgacaggccctgggccaagcctgaagtcccatctctcctggaggatcccaggatcaaagcaattgcagccaagtacaatagaactacagcccaggtgctgatccggttctccattcagaggaacttggtagtgatccccaagtctgtgacaccagtgtgcattgctgaaaactttaaggtctttgactctgagctgagcagtgaggacatgaccactctactcagctacaacaggaactggagggtgtgaacctggatgagctgtgccaaacccaaggattaccccttccacgcagaagtctgaagctgcggcagacggatccccgctcttcctcaagcggcttgcacctgttctgtctgcctcgtctgcccttgcaagtgtcctgtgccatgtgtccctctgaactgggtggcaccttgcaaaccagatggtgagaattaatttgacatagaatctggagggcagtaccagtagccgaggtttttcttcaagccttccttggtctttcttcttacccacccgg

SEQ ID NO: 2920 - DNA, 1000 bp, mus musculus
tgagatcttttatgttccaaatgaattttaagattctcttttatgtttcttttttttagtatttattgatttttttctacttttctttttctttgattaatcattcttttacatctcaaataatatcccacttcctggttacccttccacaaacctcccatcccatatccaccctctctgccctcccctttgcctctatgagggtgcttccccacttacccacccttttctgccccactgctccagcatccccttatccagctggggcatcaaacctccacaggacaaagggcctcccctcccattggtgtcaggcaaggtcatctgctctacctatgtatctggagccatggatccctccctgtacactccttagttggtgatctagtccctgggagcactgggtagttcggccagctgatgttctttttatggggttgcaatctccttctgctcctccagtccttccaccagttcccccatcagggtttcagagctcagtctgatgtttggctccaagcatccacatctgcattggtcagttgctggcagaacctcccaagaaacagccacatttggttcctgtcagcaagcgcctcttgacaatggcaacagtgttggggtttggtgtctgcagacaggatggatcgccaggccaggcagttcccagatggccttttctacagtctcattttttgttcctgttcttcctttggacacgatcatttctgggctagaacctttgagatgggtaggtggccccatccctcaaccaggggccatgcctatctactggaggtggtctctacaggttcaatctcacttgcatttcggctaaagtcatccccgttgggtcctgggagactctcttttccctggcatctggaaccctccagaggctatctccagttctagatggctcagctgttaaaggctaggctcacaatccttttatatttctatgatgaatgggtttagaattagttggggatttattgaa

SEQ ID NO: 2921 - DNA, 1000 bp, mus musculus
aatatgacccaaaaaatattgttttgtgcccttcgctctaagcagctcatcgagcgctgaaaaaattgggtgtgactgtgacgaccccatacctagtctttcacgccccacacagtcgccacagcaacaaaaatacatcgtgcaacaggtgtccctgtggcatggtggggcatcttttgggtatattcccaagagcagtaagctgggtcttcaggtagatctatttccagttttctgaggaacctccagattgatttccagagtggttgtaccagttttaattctaccagcaatggaggagtgttcctcttcctccacatcctctccaacatgtgctgtcacctgaggttttgatcttagccattctgactggtgtgaggtggaatctcagggtcattttgatgtgcatttctctgattgttagacctagtggggaaacacccactcaactcccgattcggtgtgcacccgaaaaaaatcacgaaggaccatctcttgatgtaattacatgagggcatttaatgacagagctctggaccgacatgcatcctgggaacacaggagataatggatgtcggctacgaggcttgaaagctaggagtttttatggggtaaggggcttaggggtgtggaattcagcatagcgacacactattggcttattcaaacattaacagaaagattacagggcatctggactttgttcctgtgggctgggggcttatctttgttcacatagcaaccagttgatgtatgactttacctggagccaagggacaatagacgggggggaggttccggccaaaatgtgtcgactctgacaagatagccttgcctgcgtccttgcattctttttcatctttacagccaagagccctgccctggcatccgggctcatggacaactcttttacatgaatcacaagttacaaaatctcattttccttcatgatcactaaggactttgaacatttctttacttgtttctcagccatttgaga

SEQ ID NO: 2922 - DNA, 1200 bp, mus musculus
tcggtataaattagtccaacaataaaggagtttaataatatgagtctgaaaatttgtttgaattttcacacactttatagttccactttgaaaattatgtaatagtaaagcaaagatacaagtgtgtgttttatgacattgggggtggggcatctctggaacatgtcatatatctaggacaaaccaggaacctgggacaagggagtctcctgggaggatatggttgtgaccctagcttagaattctagtagcaggggatatggagcatgaagtggccacctcgtgtagccaggcaggacttccagtggagggagagtggcaccaatccaaccacaaaacctttgacccaaaaagtgtcctgcctacaagatgtgcagggataaagatgcaacagaaattgagggaatggccaaccaatgactggtccaacttgagacccatcccataggagaaagcccacccccgacagtattaatgatactttgctatgcttacatcaggaacttagaaaaatataattcttattttaagtaagaatataaccaaagatctatcttcttacaaatcaaaagaatatagattctgaggtcactgcgtgggtaaaagtgaacacagttgggtaaaagctcttgccatgtcaccataaacagcaggatctccttcatttacacaggcaaatgacttttaattggttatgtgtaccccactttctatccatttatctatgaacatttatactactttcatgtattaacgattgtaaataatagtgaaaatggggatgcaaatatttctttcagaaaccatggtgggtttttgacttctgtccgagtatctgattgctcgatcatatggtaagtctgtttgaaacctttgaggtgcctgcctctgtgttgttttccacaggggttacaccagtttctgtttctgttaaaagtaacaagggtttccttttattcacctctgtcatactacatttgtcttcctttgtttttttgtttgtttgtttgtttgttttttaggtaatttgatattgtaactcatgtaaggtcagatctcagtgggattttacatttttctcctatgattattgatgttcagtactttcttcatacttattagtcttctaaatgttttcttcaaagaaattcctttaggtgttcttttgaaaattagattatttgtcttctttgttctgtg

SEQ ID NO: 2923 - DNA, 1000 bp, mus musculus
tggggagaaagggcatatttggcttacagctttcagtctgtcatcaaggaaagccaaggcaggagcctagaggcagaaactaaagcagagacaatgaaggaatgctgattactggcttgctcctcgtggcttttccacctccttttcttgtacaacctagacccatctgcccagggattgcattgcccacactggtttgcccattgcattgtccactgaagtttcctcttctccaataattccagctagctgtgtcatttgagaaatctcaacctcaccgtagtaaatgagttaataatcttacccagctacagaccccgcatgctacaatcctgatttatctggtaaaatgcacacttgcatggtggtatgacagttggaggggctaactaactgcattctggttagatatgaggatgccacaggagagacagtatatgctaggtaccgtaaacctggttttgaatggttctcaacatatttctgtcaatctcaaatcctcaggcatggaaatacaggtattgtttaactgtttttacaaccaataaccattatatacttctttttactgctataattattatgcatgcaaataaactgagaatacatataggttctaatccattggggacacctgccagtaagctcagacagttctgttggatacttgcaacaccagtctcacagcagaggaagagatgagttgaacagggaaggctaatactttttaggcctatttcttttgactatgtccaaaatgtacaaggtcagtcttggccccaagcacagaggggtcccattaactgatttcaaaatttcaggagcgttttgtgagatacatgctcaaaaactgagcagtatcaggataatgtaactaggcaaaagggggataatataggaaaatatgtgggtgtaatgcttgaattcttcattgcagttgctataatgacatatacagatctggaaaggcagatatggacagcatacttcaagagtggct

SEQ ID NO: 2924 - DNA, 1400 bp, mus musculus
ctactggagtaagataaaatctcattgattttcatttccttaactgctaggaaaaatgaacattatatgagacctattacatgtttttcaacttcttttgagaattctctattcaggtcccagaaccatttacagaatgcgtcgtattttgttttgttttgttttttctttctattttaagttctttatatattgtgaatattaatcctcagtctactgtataacttacaacctataatacatacacatgtatgtatgtatatatatatatatatatatatatatatatatatatatatatatatatatataatgaaagtagacagggtggggactggggagggagagggaaagaactgaagccctgagggccagcagaaggaatgtaatcaggcaacctcaggaggtagaaggttagggggaccccccagaatgcaccagagacctgggaggtgagagactcccaggactcaaagggagggatcttagatgaaatgccagacaatatgaagagggaacttataaagcccacctccagcaggaagacaggacatcaagtgagggatggggttgccatcccacagtcacatctctgacccataattatttctgtctgaaagaattacagggatggaattggagaggagcccgaggaaaagaaggtccagccacaggcccaaagtgggatccagctcaaggggaggccccaaggcctgacactattactgaggctacagaggtgaccactcacaaaaagggacctagcatgaccacgctccagaagacccaacaagcagctgaaagagtcagatgtatatatttgcaccggaccaatggacagaagcagctgacccctattgttgaattagggaaggctgaaagaagctaaggagaagattgaccctgtaggaggaccagcaccagcagttttttttttcttttgagacaagtgctgggattaaagacgtgtgccaccactgcccaggtaggagcagcagtcttaattaatctggacccctgagatctttcaaacagtggaccaccaaaaagacagctgatatgaggcccccccccaacacagatacaatagaggacctcccagtctgtgttcattcagagatgatgcacctactcctcaagagaatggagggacagggaatttagaggtcaggtgaggtggggtgtgtgtgtggggaggaggtgtgggatgtggagcagtcagagggtggatgggggggggagcagggaatggaatatggagtgcacaaatgaattaaaaatttaaaaaattaaaagaaaaaagaaaatttcaaggaaacttctctttgcaatagatgaagaccaggagagaaaactaaaagcaataaaatgtagagtatggactttgtcttaacacatac

SEQ ID NO: 2925 - DNA, 1000 bp, mus musculus
cagaactcaaaaaggttaacaagctgaaggcccacgtgagactgtttcaatcccacttgggaggaagaagaaagcaatcacggggcgggggaggggggagatgatgaagagggagagaggagcatgggtgggagagggggcagagaagggaaaggggtaacatgatcaggtagggggcaggagtgaagccctgggggccagcagaaagaacggaaacaggcaaccttgggaggtaggaggtggggagacactctagaatgtagcagagacctaggaggtgagactcaaagggagggaccttagatgaaatgctcaactgtggggagagagaacttgtggagcccaccttcagtagaaagacagggcatcaagtggagggatggagttgccatcccacagtcaaaaactctgatccagtattgtttctgtctaaaagaactgcagggacaaaaatggagaagagactgaggaaaaggaggtccagtgacaggcccaaattgggacccatctcaaggcgaggctccaaggcctgacactgttactgatggtacctatgatgtgcttacagacaggagcctagtttgactgccctcggagaggcctaataagcagctgactgagacagaagcagatacttacacccatcgagtggtctgaagtcagggagccctgttgttgaattagggaaaggctggaagaagctgaggaggagggcgaccccataggaagaccagcagtctcaactgacctggacccctgagatctctcagacactgatccaccaaccaggcagcatacactagttgataggaggaccccaacacatatacagcagaggactgcctggtctggactcagtgagagaagattcacctaacccttgagagacttgaggccccatggagtggggagacctggtggggtggagaatggggacattttcttggagtcagtggaggggggaggggcaatgggatgaggaactgtgggagggaagact

SEQ ID NO: 2926 - DNA, 1000 bp, mus musculus
agctaatcctgtacatggctcctttacctacacactggggatttgacctctatctccactctcattagttgggtggcctatttgctcttattaaaaggaaagggggagatgttgggagccgcccccacattcgccgtcacaagatggcgctgacatcctgtgttctaagtggtaaacaaatgatctgcgcatgagccaagggtattttatgactacttgtactctacctttcccgtgaacgtcagctcggccatgggctgcagccaatcagggagtgatgcgtcctaggcgaaatataacgctcctaaaaaaggggacgggtttccgccattctctctcgctggcatctctctggctctgcgcgccctgcgctcgctcgctgcctaaagatgtaaacaatagagcgcgcgcgccggagctctggctcctaaagatgtaattgaaggggctttcgtttttggggctgggcgctgggcgcttgccctcctggctcccaaagatgtaagcaataaagttttgccgcagaagattctggtctgttgtgtctttcctggccgggcgtgagaacgcgtctaataagaccagagctggatcagtacagatgtggatgtacacagccaaatattgaactgagcacagggactcccatggggaagttaggtcaagcattgtaggtgctcatagaaagaacaataataacaaccaaccagacccccaaagctcccatggactaaagagtatacagggtgtacccatggctccagctggatatgttacagaagattgccttatctggtatcactgggaggggacccccttggtcctgtggaggcttgatgacctaggataggatgctaagacaggagtgggtgggcgggtgggggagtaccctcatagagacagggggggaaggagggggataaggagcttgtggaggggaaactgggaaggggaataacatttgaaatgtaaataaataaaataaccaattaaaatgcaa

SEQ ID NO: 2927 - DNA, 1000 bp, mus musculus
tagtaagttggaatatggtcattgggacagggatgtaccttggtcatagaatatttggatacatgcacaccaaattgtaggtttcatctacagtaacatcaaagaaaaattgcaagatgagcaatatatttgttactatccacctttattgttactcagtaaatttgttttcttaaaaatacgaggaggaaggaaaaatgattttaaaaataccctaatagatttgagttgagaacagaaaactagatgaattccacaaaaccaggtgcattgcccatagaccttcctcactctgttactccagcatcagttctcagggttgcctctaacactgcagcagaataccagctgcaacttcccttccctgttctgcacacttcttgtggatttcactgacggttatccactgcttttcctttcccaattcattgctgtgccccagcccccaacctagcagacacagcctgttcaaccacaggccacacctaccaaaacattaggtaggctgcccacagacttcctctactctcactattaccctggactcaattctcagggtttcccctagttctgaaacagaacaccagaggcaacttccctaactctgtccatgcttcctgtggatccctcagagcatctcccactggcttcccttccccagcctccagtactagcaagaattctcccatgaacacaacagtcaaacagacccataaaacagtcaacattcagccaacacactatcgctatatccagagaggagacagaaacgaagagggagggaaccctacataacaaagacaaacccagaatacagctcccagacctataatcacccaaaactagatgccaacataagaacacaataacagtcaggacaatatgtcaccaccaaagcccagctatcctacctacagcagaccctgaatattcccagcatagctgaaagcacaagaaaaagaccttaaaagcaactatgtgaagatgatagaggtctata

SEQ ID NO: 2928 - DNA, 1000 bp, mus musculus
aatgtgaagtggaagattttacattcttaaagacacaaagcctaccctggtcattaataaggttctatgcagactgcagatatcaactccttgatacttctttttgttttgttttgttttgttttgttttgtcttgtcttgttttgttttgttttgtttttgagacagggtctcctggctgtcctgagtttgctatataaaccaggtttgctttaaactcatagaaatgtctacctctgccactcaggtactagagttaaaggcatgtgtcccttcacccagcacaaaaacttagtttttaaatgaccaatatttgtttatttgtttgtttatatgagggctctgtgtgtatgtacacctgcatgccagaagaaggcattagatccctttatagatggtcatgagccaccatgtggttgctgggaattgaactcagaacctctggaggaacagccaatcgtctttttttgggggggtggggtggggttcgagatagggtttctctgtatagccctggctgtcctggaactcactttgtagaccaggctggccttgaactcagaaatctgcttgcctctgcctccctagtgctgtgattaaaagcatgtaccaccacgcccggctcagccagtcctcttaaacactgagccatcttgccagaccaaatgaccaaaccaaaataatctaaataatcttgaaaaacttggtttggaggaaatggggagcatatgtagacagccaatagttttcatgttctaatactgtgaatttaactaaaaatgattttaacccttccgctcgactcgagactcgagccccgggctaccttgccagcagagtcttgcccaacacccgcaagggcccacacgggactccccacgggaccctaagacctctggtgagtggaccacagtgcctgccccaatccaatcgcgcggaacttgagactgcggtacatagggaagcaggctacccgggcctgatctggggcacaagtccc

SEQ ID NO: 2929 - DNA, 1000 bp, mus musculus
aggaacaacaatatgaaataactagtaccctcagagctgtgtctctagctgcatatgtagcagaagatggcctagttggccatcagtgggaggagaggcacttggtcttgtgaagatcatatgccccagtacagggtaacaccagggccaggaagcagaagtgtgtgggttgtggagcagggtggggggaggatatagggtcctttggggatagcatttgaaatgtaaatgaagaaaatatctaataaaaaagtctcagcagttaagggtactgacagttcttccaggtgacctgagttcagtttctagaacccacatcagtcaactcacaaccacatatcttttgaccttcacaggaacacacacgcacacttaaaagtaaatcttttcacaactaagaaattaggggccggagaggtgtctcagctgttaagagtactcaatgttcttggagacttgagttcagttcccaggacctacatgtcagcttacagccatccataactccagctccagaggatccaatgccattttctgacttctgcaagcatcagacatacatgtcattcatgaaaaatgatcataatcacaaaataagtacatcttcaaaattaaaaagtaaattattgcaaaaaacccttccaaatctagggaaggatatggacatccaatacaggagggacttggagagctatatggtgtaaaaagataattagcctctgcaagttggcctctatcctccacatggatactatgacatgtgtatggcccaccctccaaacacacacacacacacacacacacacacacacacacacagagagagagagagagagagggagggagagagagagagagagagagagagagagttttaactctctagtttaaagaacaagtaaatgattggtttagaggcaagatccacttatctgatatctgtaagaatcacactttattggtggaaaactaaacataccaaatataaaggaatggaaaa

SEQ ID NO: 2930 - DNA, 1000 bp, mus musculus
ctgcctggaatggaggaaaagaaggaaaacagcagcagtccactagacaaagccaatgtgcaggggagacctgatgagcactgtgaagtgactgtggatgctataggagctaaggggaagcagagaacacaaggagggtgtagagactgggggagggcttcatggaggtgaggcccaggtggcccaggggcaagagggccaacactgcctgtggccagagtagcctggctgaagggtaaggcctgtgtcagggagctggaggaagaaaaggctgggaagggaagtgaagtgtgtgcattatgaggcaggacacctgccaactcctaggacaggtcaaagttgccatttctgaagatcaccatgttaactacagggaggaccacaagggcagggcagggcagcctaaaggcaagatgaccatggaggcacctgtcttcacaatccaaaccggttagtaagggtggacctcaggtattgttgggagacatgggagggaggaagctgtagaagacagacacacagcagcagagcccaatttgctgaccaatggagatggtcaaacagaggagtattaaacaagacgatactgtgcacatacaagacggtgctaagagcaaaaccactaaggggtagagagctgctagggaggatgagggtgagcacacttcacagagcctgtcctctaagaggtagcctgcactgtgggacacacagcaggagggagggatgggacatatccttctagaagtgtcaggtgtgaagcatgcatgctttgtggagggaacacaagccatcatgcagactggtcacatgtgtctttggggacagagctgggatctactgactagactgggagtccctgttgacaggactcatttcatattctaagaggacactggttcaaatggaattgatctcctggctggaggaagatcctgaaatgctaacaactttatgtgaggaaaggccaggaagaaaccctcctctctcctccctgtcg

SEQ ID NO: 2931 - DNA, 1200 bp, mus musculus
agaccaagacacaatacatgctgataaacctgcaggactaaaaataagaataggtgttctcctggaatagagagaaagaagaaaaatagcagcagtccactagacaaagccaatgtggaggggagacctgatgagcactgtgaactgattgtggatgctataggagctaaggggaagcagagaacacaaggagggtgtagagactgggggagggcttcatggaggtgaggcccaggtggcccaggggcaagagggccaacactgcctgtggccagagtagcctggctgaagggtaaggcctgtgtcagggagctggaggaagaaaaggctgggaagggaagtgaagtgtgtgcattatgaggcaggatacctgccaactcctaggacaggtcaaagttgccatttctgaagatcaccatgttaactacagggaggactacaagggcagggcagggcagcctaaaggcaagatgaccatggaggcacctgtcttcacaatccaaaccggttagtaagggtggacctcaggtattgttgggagacatgggagggaggaagctgtagaagacagacacacagcagcagagcccaatttgctgaccaatggagatggtcaaacagaggagtattaaacaagacgatactgtgcacatacaagacggtgctaagagcaaaaccactaaggggtagagagctgctagggaggatgagggtgagcacacttcacagagcctgtcctctaagaggtagcctgcactgtgggacacacagcaggagggagggatgggacatatccttctagaagtgtcaggtgtgaagcatgcatgctttgtggagggaacacaagccatcatgcagactggtcacatgtgtctttggggacagagctgggatctactgactagactgggagtccctgttggcaggactcatttcatattctaagaggacactggttcaaatggaattgatctcctggctggaggaagatcctgaaatgctaacaactttatgtgaggaaaggccaggaagaaaccctccctcccctccctgtcgtccattagtgtgattaataataaatatccccgggcacttggtgctggcaagatgcctcgtcactgctgttcattacccatccgccatccccagcttccaggctgcccattaggtgctatggtgagaggagtcataaaatgcacc

SEQ ID NO: 2932 - DNA, 1200 bp, mus musculus
aagaagctataattactgaagcacaaaatagtaataaggacctcaaataacaaaatgatcaaaaagccaaaataataaaatggcaacaaccaacacacacctttcaataatagctgtaaatatcaagggccttttcttcccaatcaaaataaaaagacacaggattgattgaggaatgggcagaaacctagcataactgtcctactagggggctctacccaacagctcaccaaaacacatgcagatacccatagccaaacattagatggagcttggggactcttatggaagaataggaggaaggattgtaggctacaaagggaataggaactccactggaagaccaatagagtcaactaacctggacacttggagctctcagagattgaagcaccaaccaaagaacatacatgggctggacctaggccccctgcacatatgggacagatgtgcagcttggtcttcatgtgggttctccaacaacaggagcaggagctgtccctgagtctgttgcctgtctgtggatcccatttccctaactgggcaacgttgtctggtctcagtgggagaggatgcacctagtcctgcagtgcagggttggggtagggtggggtggatgatgttgggttgtaaagtgaatatataaattaataaaaaaaaaaacaaaatccacttttatgttatcgacaggaaactcattttagcttaaaaaaaaaaaaaacattaccttaaagtgaaactatagaaaaagtattccaagcaaatgagaccaggaagcaagcaggtattgctaatttttttttttttttggtcttttcgagacacggtttctctgtgtatccctgggtgtcctggaactcactctgtagaccaggatgacctagaactcagaatctgcctgcgtctgcctcccaagtcctgggattaaaggcgagcaccaccactgcccagctgggtattgctatcttaatatcaaataaaattgacttcaaactaaaacttttcagaagatataaacagtgttcattctgacaaagggttaaggcattataatcctaaggatatgtatgtactattccctggcacaactttatagacatgtactactggtattaaagaaacagattaacatcaacctagtaatagtaggtgtctcagtacttccattttctccagtagacaggatatccagtttaaaaa

SEQ ID NO: 2933 - DNA, 1000 bp, mus musculus
caaactcagtggacagccccatggtccccagatgaggtaaaacttccaggtgctataacaattccaggatcttaggatccctggattcctggagcttggtcacatcaggatctcaggggctcagaggaagcatgactgccaagacctctgagacacccataatctcagcatcagaggatcacagaatcacaggaccacaaagaaagctggactcagagttctgactcaactgggattataggaaggacaggatccagtcagatatattgagggcagggagcacttgagataatcagatggcaggaggcaagcataagaacagaagcaacagaaaccaaggttatttggcatcatcagaatccaactctcccaccatagcaagtcctggatacaccatcacaccagaaaagcaaaataagtatctaatgtcacttctcataatgatgatggaggactgtaagaaggacataaataactcccttaaagaaataaaggagaccccttctggtcggcgccagcaccaggtcaccttgggcacagagccggcggacacccccgaggtcccctagaggactctccactcgatcttagtaccactggtctgtggaacacaacttctgttccaatccaattgctcgggacctgagacagcattagagaagcaggaaacccggcctgaccagggtcacaagtcccttctgatcggcaccagaactgggtcaccttgggtatggagtcagcagacacctctaaggtcccctagaggactctccacacaatctttggaccaccagtgagtggaacacaaattcttttccaatcaaatcatgcaggacctgagacagcagtagggaagcagaaaacccagccggaccagggtccaaatcccttctggtctgctccagcactgggtcacctaggttcagagtcaggcaatacccccaattccctagaggacggcttctgaggcagaccccatttcgggctcaagacatccggg

SEQ ID NO: 2934 - DNA, 1400 bp, mus musculus
ctacagaatattccacccaacaccaaaggatacacattctactcagtagtacatagtagtacaaagaccaaccacatcttgtgacacaaaataaatctttacaaattgaaaagagagaaataactccttgcatcctactgaataacaatataacaaaaactgtctagtaaaaacccaaactcatggagattaaacaactcattactgaataacaactgggtcaaagaaatcaaaatagaaatcaagaccttcatggaaataaatgaaagtgaaaacacagtacaaaaaacaaacaaacaaacaaacaaaaccaattcctatgagggaaaaatatggctctaagtgactacatttaaaacaaacaaacaaacaaacaacagaaaacctgggaaacatgaagcagctctcggtgagtccgagattcatcttcacagggaggaggctgctcttgatactggcctttgtggggctctgaggagcacaacccagctcttactttaccgttccactgccagcactgctcatttgctgtctcagtttactctcaagaggaacagcctgtcagctgtgcttgggtgtgggtgggagcttgggctaaaggcatggctgctggaagcccacctttgtgtacgtcagtcaataccacaggaatagaacaagcctggagctgggatcctaaatatgtagtaaggtctcatagacatcaggtgagagccatcctccagcatctgtgtgcctcactgtctcatttaagaaatgagtgtccacctacttgctggttagtttacactacaactccaaggttattgtttagcagtcttaataagactgcaatctagttcaaggatgacattcagagataaaacaaactttattgattttcacgaatacaaaatttatcatatcataaaaaaaagaaaagcaaaaataattgacttaatgctgcaactaaaaaatttcaaaaaagcaaggacaaaccaactctaaacacagttgatggcaagaaataataaaattcacaggagaaaacaataaaaaagaatcaatgaatccaagagctgattgtttgagaagataagcaagattgatagactccttgtccagctaagcaaaaagcaaaaacaaaacaaaacacccagaaacacaccaacctagctcaaacctctgaactttctttgtatgtctcatcttgcctttctccacttccctcaactatctgccatctataaacccatgagccgatttctaggcctgtggccatgaattcttcattcatgaggcccacttgtgtgacttaactcagatgcatagtatcttctggtactatggaaactagatggaaggaaggaggctttcaaatgagtgataacaaatatctgcctaattggcttaaggcctga

SEQ ID NO: 2935 - DNA, 1200 bp, mus musculus
tggatgttttgaattaggatctttttacattttcattttctttgactgttgtgctgatgttctctatggaatcttctgcacctgagattctctcttccatttcttgtattctgttgctgatgctcgcatctatgtttccagatctctttcctagggtttctatctccagcgttgtctcgctttgggttttctttactgtgtctacttccctttttagttctagtatggttttgttcaattccatcacctgttagatagtgttttcctgtaactctctaagggatttttgtatttcctctttaaaggcttctagatgtttacctgtgctttcctgtatttccttcttaaagtcctccatcattatcataagaagtgactttaaatccatgtcttgcttttcttgtgtgatagtgtatccaggactttctatgttgggagagtttggttctgatgatgccaagtaaccttggtttctgttgcttctgttcttacgcttgcctcctgccatctgattatctcaagtatttgctgtcctcaatatatctgattggagcctgtccttcctatagttccagttgattcaggactcctcagagtccagctttctctgtgatctttgatggtgggctcctgtgaacctgagactctgggtgtgtcagagctcttgacagacaagttcctctgagaccctgaaatactggtgtgacccagctcctgttatcctgggatcctgttgtcctaagatcttgggcgtgttaaagtgcctggaagtggtgtctcctttgaggagcatggacctgtgtggtcaatggtcctaaaattgcatggagagtcctctagggaccatgggggtgtccgccaactctgcgcccaagatgacccagtgctggcacctacaagaagggcttattttttattttaaagaatgctttattagatatattctttacgtttcaaatgctatcccgaaagtcccctataccctacccccccagccctgctccccaacccacccacctctgcttcctggacctggcattcccctgtactgggccatataatctttgcaccatgctttattttaaagtgcaagttataaagaagttggattaactgtctaaggtctcacagcaagtggtttgagggtagtttcatacatactagctacatttctaaaggaggtatatacagaggtatcaa

SEQ ID NO: 2936 - DNA, 1200 bp, mus musculus
gtacagttgctgtcattctatgtgttattgtttgaagtgatcaaccatggattctaatatggtcaagaagatatgtatgaagggggtaggttggggaagtcaaatgatttagaaattaaatatggagacatcttggatcccggactccaccaagactaatctccacaggtgagagtctggactacagaagctaatagcttctgggacaggcaggagccacagagcttctgaggcagtccccttttcaggctccagacatccgggcaccttccctgccagaggataggtgtccacccagcccgggatggctttggctgagcatctgcaggagacatcttggctcccgggctccactgagactagtctgcacaggtgagagtatggactacagaagctaacagcttctgggacaggtcctgtttcgggccttcatcttctgccaggcagcaagtctgaacaccagatatatgtgcaccttccctgaaagaggagagcctgcctgcagagagtgctccgaccactgaaactcaggagagagctagtatccccggtctgctggtagagaataagagaatcatgagaggaacaaactctaactagagacaactataacaactgactacagagtttaccagatggcgaaaggcagacataagaatcttactaacaaaaaccaagaccactcactatcatcagaacccagcactcccacctcagccagtccagggcaccccaacatacccgaaaatctagacctggatttaaaggcatatctcatgatgatggtagaagacatcaagaaggtctttaataactcacttaaagaaatacaggagaacacggctaaagagttgcaagtccttgtagaaaaacagggaaacacatccaaacagatgatggaaatgaacaaaaccatactacactgctaaacaggtagaagaccttaaagaggaagcacaaaaatcacttaaagaattgcaggaaaacacaaccaaacaggtgatggaattgaataaaaccatccaagacataaaaagggaagtagacacaataaagaaaacccaaagtgaggcaatgctggagatagaaaccctaggaaagaaatctgaaaccatagatgtgaacatcagcaacagaatacaggagatgggagagagaatctcaggtacagaagattccagagagaacatcagcacaaca

SEQ ID NO: 2937 - DNA, 1200 bp, mus musculus; identical to SEQ ID NO: 2936

SEQ ID NO: 2938 - DNA, 1000 bp, mus musculus
agatggtttttttcaattattttacctgtttgttattgttttcctctacctctttaagggatttttgtgtttcctctttaaggaattctagctgtttacctgtgttttcctgtatttacttattaaagccctccatcatcatcattagaaatgattttagatccatgtcttgcttttctggtgtgatggtttatccaggacttgctatggtgggagagtttggttctgatgatgccaagtaaccttggtttctgttgattctgttcttatgcttgcccccctgccatctgattatctcaagttcccttgatatatctgattggagcctgtccttcctataatcccagttgattcagtacccctcagagtccaactttctctgtgatcctgtgattctgggctcctgtgaacctgagattctgggggtgtcagagttcttggcagtcaagcttcctctgagacccagagatactgatgtgaccaagctcctgttatcctaggatcctggaatcctaagatcctgagcgttgttacagtgcctggaagtggtgtctcctctgagcaccatggggctgtctggtgtgtttgaaaccaaggtataccagtactgatcagaaagaacccgagctactcatcaggcagggctcccattcccttgctcctgctatcattgtcccatcacaattggattggaactgatgttgtgttctgctcaccagtgatcctaagatcgagtggagagtcctctggggaccgtaggaccaatgggcacgttttgagcccaaggtgacctggagctggagctgacaggaagggacttgtgcccctggtcaggctggttttcttcttccctgctgctggctcaggcctggtgcccacaaacatattttttatgttgcagacattctttatatcttttggactttttaaaaaattaagcataaatgtcctttattttgagggctgttttttcacttttaaataatttcctttggtaatg

SEQ ID NO: 2939 - DNA, 1000 bp, mus musculus
aatctgcctgcctctgcctcttgagtgctgggattaattcttaagacaaaggatggaactagaaaatatcaaccagagtgcggtaacccgggcacaaaagaatgcacatgtgatgcactcataatatactgataaggtatattagcccaaaagctctgaataccgaagatacaattcacacaccatatgaagctcaagaagaaggaatacccaagttaggatacttcattccttcttagaagagttaacaaaatactcatgggaggagatgcagagacaaagtatggagcagagactgaagggaaaggccatctagagactgtcccacctggagatccatctcatatacagtcaccaaactcagatatattgtggaatgcaacaagtgcttgctgacaggagccttgtatagctgtctcctgagaggctctgtcagagccagacaattacatatgtggatgctcttggccagccattggactgagcatggggtccccaatggaggagttagagaaaggactgaaggaattgaagcggcttgcaaccccataggaggaacaacaatgtcaaccaaccagacctcccagagctcccagggactaaaccaccaaccaaagtgtatacatggagcaaaccatggctccagctgcatatgtagcagaggatagcattgtaagacatcaatgggaggagaggctcttgatcctgtgaaggttgaatgccccaatgtaggggaattccaagacaggggagtgggagtgggtgggttggtgagcagggggaggaggggtgggatagggggctttcagaaggaaacaaggaaaggggataacatttgaaatgtaaataaagataacatctaatttttttaaatttttttatttttatttttatttttttattttttttgtaaaggaaagtcctttcttacactggtgttacaggatatggcctccgtgttcttctagaagttttcatgtttcaggttttagatttagtt

SEQ ID NO: 2940 - DNA, 1200 bp, mus musculus
caccctttcttcagttttacctttcccctttgttttagaaaatgggaagccatgtcctaagaggtatcaaaaattatttttgtccttcatatgtctcctggacaacatttctgccaatttattctcccttaaaaattttaagacgatccattcaggtcggggccagccccaccatcttccacctgaacccaccggagccctctaggagccctagagtactctccacacctcaggacctctggatcacctcgggatcacgagtgagtggaacacaatatcggctccaaagaattgaggagggtcttgtgccagcaggaacagggatggaggaacccccgcccgaccagtggctgggatccgatcaggtcagggccatccctgccatcttccttctgaacccaggggaggattcaaagatgtccagagtattctccatgccacaggtcctcgggatcacctctggatcacaggtgagtggatcacaacatcagctccaaagaattgtggagggtcttgtgcccgcaggaacagggatggaggaaccctgcctgaccagaggatgggatccctttaggttggagccagcccagccatcttctgtgtgaactaggccgagggtgtctattgccccagaggactctccatgctacaggaaccctagcactcccaggacctcgtgatcacctgagagcaagtggacaacagaagcaacagagcttcttggacagggtcctgtcattccttcatccttaggcaggagggagagctgagatccaaaaccttgggcactttccttgccagaggagagtaggcctacagggagggctctgaccccaggattcaggaggtagaccagagctccagacttctggacatctgccctgcaagaggagagcttgcctgcagagagtgctctgacccctggaactcaggtgagagttggactcccaggagtgatgacagaggctaagagagtcacaggaggatcaagcttcagccagagacagctaggacattaacaccagagattaccagatggcaaaaagcaaaagtaagaatcttactaacagaaaccaagaatactgggcatcatcagaacccagttcacccactacagtgagtcctggataccccaacacaccctaaaagcaagactcagatttaaaatcatatctcatgatggtggtagaagattttaag

SEQ ID NO: 2941 - DNA, 1000 bp, mus musculus
gaggtaacccagtcacaaaagaacacacatggtgtgcacttgctgataagtggatattaccccaaaggctaggaatacccaagataaaactcacagtctatatgaagctcaagaagaaagaagacaaaaatgtgaatgttccagtacttcttagaagagggagacaaagcactcatgggaggtagaggttggaagggacttgggaggaagagagaagggggagggtggaaaggagggaaagtgggggcagatcaggtatgggaggagacaggaatttgaggatcaggaatttgaacagaggtgtgtagcaattgggaatgggaaactgagggtagccaccagcaagtcccagatgccaggaaagcaagaggctcccaggactcaacagggatgacactacctgaaatgtccaacaaagtgaagggtgaacctgtagaggttaggcaatcccccatttgggggtgggggcacccactcacccccaaatttttaacccagaatggctactgtgtaaggaaacacagggacaaagtgtggagcagagactgaaggaaaggccatgaagagactgccccacctgggcatccatcccatatatagacaccaaacccagacactactgcatatgccaagaagtgttttttgacaggagcctgttatagctgtctgctgagaggctctggtagagcctgacaaatacagaggcagatgctcacagccaaacactggactgaacccaggaatcccaatggaggagttagagaaaggactgaaggagctgaagaagttttcaaccccataggaagaacaacaatatcaatcaaccagactctcccagtggtcctagagactaaaccaccaaccaaagaatacaaatggagggacccatggctacagctgtatatgtagcagagggtggcattgtctcacatcaataggaggagaggcccttgttcctttgtagtctcaattccccagtgtaggggaaatgccagggtgg

SEQ ID NO: 2942 - DNA, 1200 bp, mus musculus
tttttctagtgaatattgccaaagttagctccaaaattaaaataaaatttaaggctactatgatccaactgatttatttcattctactttttagccaaacttggcaactgatgtgtatgaacacatgcatatacttaatgttatattgctgcattaatactttatcaagtatgtgtacatacatacacatatccagtaaggctggagcaacaactacaaaggtgacagtgcttctttacttgtcctatccctgtcatttgcaccatctctgaacctgttcccattgtctttgttccccagaaattaacttagaagagagtgaatgcaggcaggcaggaaagagaaaaggaatgacgtaggcattaataataatctcaacattagctcactgtgccctgaataaatgatgctggctaaatttcttctggatgtaaggcactcatgctgctgggtgtgcagctgcttctggccaccctttgtggctgttggtcttctcaacttgcagaaatgcctgtggcatgaagcatggtctctctatctcggatgggtagaacttgtaggatgacaagtctaaattaagaactcaagactttaggctatttgctttgcctgggcagtacagaagtcctgagattaaaaaagggcaataaagatagcagctggcccatgccctacccattcctctcctgcaagctcaatcaccacccatgtgcacaggtttgtcacaaatcaaagcagttgctcagcttggccttgagaataaatctttcctttaaaaaccccgctttctaatatgtatagtgcactcatcaattccagatgtttggcctgcagttcagatgttgctgcaaacagttaaatactgtctttcagttttctcttttctggtctggcccagatccatttctaccacagctttcacttatcattttcctatttccatattatcaagcatcatatcacctttctagatcactctttgtgaagttttatatcttcttttacttagagtgaatggtcccaggtacagctctgccaaaagcaacattcatactcattgctgactcaagctacacagtcatcatgagaagtttgcttaggttaaacacttcagaccagtggtctttatttcttgttatattttggaagctccaatatatattggtatctgggtaccactaatgagtctcagatataatt

SEQ ID NO: 2943 - DNA, 1200 bp, mus musculus; identical to SEQ ID NO: 2942

SEQ ID NO: 2944 - DNA, 1000 bp, mus musculus
agcctctctagttacaagtgtttttctccactctagccacaaccacgcccccacccatcaccacaggtcacatcacctcaccaggcaggcttgctcagccaatcagggaataagggcgggccatccaccaaacatgggcttgtttactacctggaacagacttccatcctgctgaccaggaagtccagaatggctccctacaattcccccttttatattttttttgaacaaactccatgggtgaagatagaggtctgatccccagtgtgcagaaataggggccatgtacaggattgactcttaggctcacaggtttttacccagagcaaccctgacctgctcccgtgccgttttttcctgggggaaggacactaggacactcaaccctcatgtaatcagacatacctcccagagattgtcaaacagcttccagactaacctctgtgcagtgcttagccgtacaaccctacagagcgatggcttcattgttcactcttcatggcagcaagccaaatctgaggtgactgccctgcttccactgtggcaaaagcttgcaccaccatggcggcagtgtggacctgggcattccgtaaccgacacatacaccatacacataacatgcatgccaaaacaagggccatagcgaaggcacctatcccagtccattctttgcagatgccaagccaggatccactcagatagaattcacggtgacaatcgccgaccaaagctcattcatcttgccatcaaaattttatagtccactttaaacatcacggtattccccatctgggttccacacccatcaggggcagacacgtgctcatcaccagtaagatcagcttcttcattttgacagcatcgcactagctgctctggaacccacactggctccttgcgattctgtggaaacatgcaaacaaaccctctcccccaggctaacacagggtccggaccattccttgatcctgtaggcacatccttccatttagcatacccc

SEQ ID NO: 2945 - DNA, 1000 bp, mus musculus
ctttttttttcacttcagattttatctccctccaggtctaccttcatactattccacattccatacctcctccctatccccttgtctccaagaggatatcttcatccaaccccccacccacaccagacttctaaactccctggggcctccagtctcttgagggttaggtgcatcttcactgactgaaccctgatctggcagtcctctgctgtatatgtgttgggggcttcatgtaagctgttgtatgctgcctgtttggtgatctagtatctgagagatctctgaggtccaggttagttgagactgctggtcctcctacagggttgccctcctcctcaacttctttgagattttcccctaattcaaccccaagagtcagcagcttatgcccattggttgggtgtaaatatctgcatctgactctttcagctgcttgttgggcatttcagagagcagtcatgataggtcccttttgtgagcacggcatagcctcagtaatagtgtcaggacttggggcctacccttgagctggatccaactctgggcctgtcactggtcctccttttcctcaggcttctctccatttacatgcctgcagttctttcagacaggaacatttatggatcagagttttgactgtatgatgacaataccatccttcacttgatgccctgtctttctgctggaggcaggctctacaagttccctctcctcactgtaggacatttcatataaggtccctccttttgattccttagaatttctcacctcccaggtctggaggaaccccctacctgtcctatctcccaagattgcctatttccattctttctgctggaccttggggcttcagtccttttcccctacctaataccagatcatgtcatgttcctctctttcccccatccccattcctttccagatccctccctccctccttctctccctccctccctccctccctccctccctccctctcttcctccttgtgattgctttc

SEQ ID NO: 2946 - DNA, 1000 bp, mus musculus
ggtgttcacccacaccctgccagccctctccactcactggggcctcaagtctctagagggccagaccaggcagtcctctgctatatatgtgtcatgggtatcagaccaactcatatatgctccctggttggtggctcagtgtctgagagatctcagaggtcaggattagttgagactgctggtcttcatatagggttgccctcctcctcagcttcttccagcctttccctaattcaaccacaggtgtctccaacttcaggccaatggttgggtgtaaatatctgcttctatctcagtcacctgcttgttgggcctcttagagggcagccatgctaggctcctgtctgtaagcacaccataccaccagtaatagtgtcaggctttggagccttcccttgagatggatcccaagttgggcctcctttccctaggcttcttctccatatttgtccctgcagttttttttattacatattttctttatttacatttcaagtgttatcccttttcctggtttccccttcaaaatccccttatccctttccccctccccctgatcacaaacccacccactcccgtttcctgttctagcattcccctacactggggcatagagccttcacaggaccaagggcctctcctctcattgatattccacaaggccatcctctgctacataagcgtctggagccttgggtccctccatgtgtactctttggttggtggtttagtccctgggagctctggcatttctcctatggggctgcaaacccctttcagctccttgggtcctttctctaggtccttcattggggaccctgtgctcagttcaatggatggctgtgagcctccacttctgtatttgtcaggcactggcaaagccttccaggagacagctatatcaggctcccatcagcaagcaattgttggcatccataatagtgtctgggcttggtgattatataagggatggatccccaggtcgggcagtttctggatg

SEQ ID NO: 2947 - DNA, 1000 bp, mus musculus
attagattttttctttatttatacttcaaatgttatcccctttcctcatttcccctctgaaaatcccctatcgcctccccctgttcactaacccacccactcctgcttcctgtcctggcatcaccactacactggggtatcaagtgccacactgtcaagggcttctcctatcactgatgtcccacaaggccatcctctgctacatatgtggctaaagccttgagtccctccttgtatactctttggttggtggtttagtccctgggagctctggggatactgattggttcctattgttgttcctcctataaggctgcagatccttcaccttcttggattctttctctagctcctccattggggaccctgtgctcagtccaatggatggctgccagcatccacatctatatttgtcaggcacttgcagagactctcaggagtcagctatatcaccctcctgtcagcaagctcttgttggcatccacaatagtgtctgagttggtggttgttgggtggatccccaggtgggacagtcgctggatagcctttccttcagtttctactccaaactttgtctctgtatctcctcccatgggtactttgatcctacttctaaaaaggaccgaagtattcacactgtggtcttccttcttctacagctttatagaatatcttagattagcctactgactctggcactaaacatctaaaatttgtattcatcaatatctacttcaatgaccaaaataagccattaaacacaaattatcatctaatattattaaatgtgattttgtaatgtggtaaggatgggaaacataaggtttcaacatgactgatgacatttctattcctttttccccctacctatagctactttcaaaacatttaagtttcacacatattctggcaaagagactttgtgcaatgtccagttgtcaaaagaagtgtggtgaatatattttaggtgccaaatttttagaatttctaggacattttg

SEQ ID NO: 2948 - DNA, 1000 bp, mus musculus
attgttattgctacatattcataaaatatagccttttgagtctgtttagtgatacacacacatacacacatacaccacacacatacacacacacgcgcgcgcttgcacgctttcagggttgaccacttagttgctggtagttcattgctgagggatggggtcacgtgagattttccccttctataatagagtgtctgttggtgttcttgtgcatgtcttgtaccttccctctcatatctaggagacacaagctcacagcagatttcttgattctctggatcttaaaatctctctgtacccctttcaacaatgttctttgagccttaggtgtggaagtcttattgtggatgtatccaatcagtgctggttctccaccatcagttgaaatctgcatttgaaccagttgtggttttctgtaacagtctccatcttctgcaaaaaaaaaaaaaaaaaaaagctcctttgatgaggtgtgagagccacaattatctatgaatatacagataagtatttaaattcagttagaaattaagctggctttgtataatggtagtactatgttctgttctaaaatccatgacctcactagcctgggaaagatagctagattaccagtaccaggcctgattttttctcttgctgtgcagaccttaaatccagtccaacagctgctgcttactatctatatatgagttctattattgtatctgtaggggtagagttttatgctggtcattgttgtgtttcataaacatcattgctggtttgtatgattagttgcttccctcccttggccttttgcacagtactttctagtatatgaaagctactgctcagggaggaagctttcagctcagatctagcttgcatcctctagtcctgtgtccgtccataggatatagtgtctttagaaatagagactgatgttcaacctctgggaggtacccaaaggcaacaacaatagcttatatgattttgggaatctctttgggaagggatt

SEQ ID NO: 2949 - DNA, 1000 bp, mus musculus
ctatttttatttttctacatacagactgccagttataccagcactattttttgaagatgctttccttttttccattgtatactttggctactttgtcaagtgttcataactgtccataactgtgtgggtttatttctgggtcttcaattctattccattgattgatctgtctgtctctgtaaaaataccatgcagtttttatcactattgctctatagtacagcttgaagtcagggatggtaattcccgcagaagttcttttattattaggaattggttttgggcagaaagtagtctgcacaggtgagagtgtggactgcagaagctaacagcttctgggacaggcaagagccacagagcttctgaggcagcaccattttcgggctccagacatccagccaccttcccagccagaggaaaagtgtacgcactgcttttgcctcaggatccacaggtgccatcttggttcggggactccacagaaagtagtctgcacaggtgagagtgtgcacacagaagctaacaacttctatgacaggccaaagcaacacagcttctgggaaaggtcctgttttgggccttcatcttcggccaggaggaggtccaaacgccagatatctgtgcaccttccctgtaagaggagagcttgccagcagagactgctctgaccactgaaactcagaggagagagctagtctcccagctctgctgatagagggtaacagaatcaccaaaggaacaatctctaaacagaaacaactataacaactaactccagagattaccagatggcaaaaggtaaacctaagaatcttactaacagaaaccaagaccactcaccatcatcagaacccaacactcccactttgcccagtccagggcaccccaaaacacctaaaaagctagactcggatttaaaagcatatctcatgatgatggtagaggacatcaagaaggactttaataactcacttaaagaaatacaggataacactgctaa

SEQ ID NO: 2950 - DNA, 1400 bp, mus musculus
ttacccttttctttgctatctataatgaattctaaaacaggtatatattgaacatctatcctatttttcacatccaacagcttaagcacaaagacactgacttgtctaaatttacattcctagtttagtgactatttgaatctgaaatagactttatttggcaatgtaactcttttccgctgtattatgtcaatcattttgaaaccatttataatatattattacatgtgaacatgtcttttctttgttactgttattcttttcaggatacatatgcatttttaatttgttttttttgacaatttcatagatgagtgctatatttatattatttaagcagcttccacttcctctccaacttctcctatgcctcccattcactttttttaaatttttattttttatttattttattatatttttgacaatccagtggctgtcctcctcctggtccaccttcacacagttccttattccattcttcctgccccctgactccaagaggattccctcactggaaccgttcccctgccaggcttccccattccctgggacaagtcgttccagagttcatccaatcttttcccactgaagccagaccaggtagtcgtctactctatatgtgcctggggcctcagaccagctagtatatgctgcctggctggtggctgagtagctgagagatctcagggtttagttgagactgctggtcttcctcaactttccccagcctttccctgatacaatcacaggtctccctgacttttattcaatggttggttataaatatctgcttatgtctcagtcagctgcttgttgggcctctcagaggacatccatgttaggctcctgtctgttagtgcaccatagcatcagtaatagtatcaggccttggagcctccccttgagatggatcccaagttgggctggtcactggaacacctttccttcagtctcttcgtttttgttcctgcagttcttttagacatttacaattctggatcagaatttttgactgtgggaaggcaactccatgacttcctttgataccctatctttctactggaggtggattctacaagttcactctccctatctgtgaagaattgtgttggaattttggtagaagttgcattgaatctatagattgcttttggtaggatggctatttttactatgttaatcctaccaatctatgagcataggagatcactccatttttctgaggtcttcaatatatttcttgagagacttgaagttcttgtcatacagatctttcacttgtttgggtagagttaccccaagatattttatattatttgtgtctacctggaagggtgttgtttccctattttctttctcagcccatttatcacttgtgtaaaggaaggctactgatt

SEQ ID NO: 2951 - DNA, 1000 bp, mus musculus
tgcaaggtctcacaaacatcctttgcctcattccaaagtcctcatgcattcttacatatttgtaatgttgcagcctcatgtgcacttccattatctcctactagacaacaagcatgtaaaaggcagaaagtaatcatttctctttttcacctacagacacttgttgtcttcaacaagctacttttgactaattgatttttggaatcaaacttaaagtttccgacccttttaaaagaggagttttcctaattcctcagtgtggtgaacaggaaacacacctactgtgaatgggaactatagattaggaaacaggatatgctaggagtcagattttttttctcactgaagtcttatagaatgcaatcttcttaagatgtgtatggctgtatcaactgaagctcagagagcagaaagaaccttaaatgcaaggtaacacagacataacaaagctgggtaactgtagaagattaaatagtaaaaaaaacaaaaaccaccctcccagttctacagaaatttagtcatctgtcccaactactacttatcattttgggtatattccttcagaagttctatacataaacataaacaaaaatacaacaattttatttactctattaacattttgtgtatttacaaaattaaaggagatcttggagacgattccagaccccttcagctccttgggtactttctctagctcctccattgagggccctgtgatccatccaatagctgactgtgagcatccacttctgtgtttgccaggcaccagcatcgcctcacaagagacagctatatcagggccctttcatcaaaatcttgctggcatatgcaatagtgtctgcttttggtggctgattatggtatggactcccgggtggggcagtctctggatggtccatccttttgtctcactcaactccaaactttgtctctgtaactccttccatgggtgttttgttcccaattctaagaaggggcgaagtgtccacactttggt

SEQ ID NO: 2952 - DNA, 1000 bp, mus musculus
agaagcattattctcgaagcttcctcaagcaccttgaatctctgaggaggaaagaaaagggtgacagccggcagacagaacccgagcaatgccttgccacctcggaaaaggccaccaaagcttcatctttccgcacttgccgtggcttcctctcagctggatttcacagggccaagaacagggtcaccacttcagccagggtcagagatggtgagactcagaaagcctgggaggcttggcctgtagccacattccggcatcctcagcctatacgcaggcgtgactatctggtgcatgtgcctggggaccataagccaggcacgttccctcgttctctgtccattgagagcctttgtccagatgaaggtcgtcacctggcagattggcagtcaagtaggtgctggggctatgaagggcgccggggctcctgtggttccacaggcagccatgccagcacttacgacaacttgcctgagctgtacccagctgagcctatacaggctgaagctgaggctgaagctgaggagggtgaaggcagctatgcccatctagatgacatcctggagcatgtgtgggggctacagcaacgggtagagctgtggtctcagaccatgtacccagacctgaggcctggagataaggaggaagaggaggaggaggaggaggaagaggaggaagctacttcatcagtggaagtagccacagtggaggtggaaggccaggatgaagatctagctcaggcagagtctcaagcccacagagggttcccaacccaagtcaaggaggaagtcccactgattgttctggatcaggccccaaatgtggtcgaaccattggtacaggctgaggctgaggctccagctcaggcccaggatcttgagcaagaagctaactcgactgcagagccaatttctgcctccagcctgtctgtggaggaagggcattccatttctgacacagcggtttcctccagtgagcttgacagtagtggcaactccat

SEQ ID NO: 2953 - DNA, 1200 bp, mus musculus
aatatataaatatattttcacattttgcacatatgaaaaatataaaggagaagctggagcttaaaacttataacactgtggggagcgggtgtggcggcagtcccaaaggtgccaggcactgcagctaagtcatatgacttgcacctgacttcctcatataagacacaaacatcttgagtgctgcgcaggtgtaccaggatacaggtgaatccaatttggtggagatttgcccctgctgccctgattagctgaagctgcgtgcctggtgaggtggcgtggcctgctgtgcgtggatgggaactgagagtataaaagagtgagaggcccagggttcgggggagatataaacaggggagatataaaaacaagggagatataaacaggggagatataaaaacaagggagatataaaaacaagggagatataaacaagggagatatatggagaaagaagaaacaggactgaataaatgtgtgcagaaggatcctgctgtggcgtcgttcttgctggcgagttgggggcgcgcgcaacaagtggtgcagaaacccgggaagaaaaactcgggacgggacgagaagacctgggacccaggacaagggaaaagaaacatcttcaggcatgagcgaagacccactgctacagggaggattcagaactgcatcacggggaatggtggtaaagaagtgttcctgtaaaacagactgttgagaaggatctggcgtggattcagaactcttcagctggggaacggtactgatgaagagaaagaagaaagatgaagactgaataaactgctgttagaaggactggtggtcgcgtcgttcttgctggtcgagagcgggcgtgacaattggtggcccgtacggggaaccgactcccccaccgagttcagaactttcagcagtcagtggttgctggcagggtaagttcatggtgagtgaaacttgggaccccaggagtttgggaaggacctcggataaaatagaggtgagcataaagttgccaggaagtaggcacaaagtaacccaggagtttgggaaggacctcggataaaatagaggcaagcataaagttgccaggaagcaggcacaaggtaacgaaaggttcccggctttgggacaagttaaggttcccggtttggggacaagttaaggaactatgataacctcagtgtagtgatcaatagatcctcgctgtgt

SEQ ID NO: 2954 - DNA, 1000 bp, mus musculus
ctacaaaccgttatcttcagtgatggaaatagcactgctcacttccctgcaccacccatcactacttggtcagtgcctcaagaagttctaggctgcttctccgggtgcatgtctgctcccgagcacagagatcatcaaggcagaggctgctggccactgcagaattcaaacctgccgtttctctaacaccatctgcttcagccaattctcatgtaaagaagcaaagccatttatggcacctttccagatctctgaaatcattacccagtcccccaactgcttcagaatctcttacagcaatgtctaatatgttacacgtgtttctttaggtttctcttgagcacactgctccctactggactttgttactacaaattgcttttattacagcctttgcttgtttgttttctgtggcttctcactagaatgtaaattggtgaaaagagaggctacactctttaaaattattttatttctttacatccctattgctgccccatcttgttcccccttgcagagttcttccctccatctccctccacttaacctctgagaatgagccctccccccaccctggggcatcaagtctctagaggattagatgcatcctctcccactgaggccagatagggcagtcctctgctacatatattccaagggcctcagacaagcccatgtatgttctttggttggtggctcattctctgggaacacccaggagtccaggttagttgacactgttggtctggtcttcctatggggttgtcatccccttcgattccttcaatccttcccccagctcttccataggggtccctgacttctgtccagtgtgtagctgtgagtatctgcatctgtctcggtcatctgctgggtagagcatctcacaggacagccatgataggtttttgtctgcaagcacaacatagcaacagtaatagtgtcagagatcggtgcccacccatgggatgaatcccattctttcagtctctgctacatt

SEQ ID NO: 2955 - DNA, 1600 bp, mus musculus
ctttgttatcaattgtacattttattgcgtagtgttcagatagtatccaaggaattatttcaatattttttaatttataaaagtatgttttgtatcccaagatatggcctgttttagagaagcttctatgtgctgctgagaagtatgtgcattttggggtgctggagtgcaatattctatagatatctatcaagttcatttgctatatgatgccatttatttctgatgtttcagtgtttagttttttttctccagatgacctgtctaatggataaatggatgtttaaatcatgtgctattattaatagattgatgctaatttgtgtctttaaataaatattgtttttttaaatgaaatctaagtgccccagagtttggtgtgtgtacatacatatatatatatgtacacacacacacacacacacacacatatatatatatatatatatatatatatatatatatatatatatatatatatatatgcttaaattgaattgaaaatttttgatgcagtttacgattattttttaacttccatattctaggattcatttaggtaatatcattgacagtcattttttctggattggtagatattggagagaagatatgggcttgatcgttcatgttgtttctatttttgtgatgagatctgggcatttgaactttttttttttttttttgctagttttgtgtcatatgaagaaagcagtttggtcctgaggagaggatgtttgagtaggttggctctagaggtttataatgacttagaaggaatgaaattgtgtggacacaggagacaggtgtgtaggatgtgcttcctatttcaagcctggagtgttggtagatatagatctgggtttgggagagtgtacatagaggggaatatcaggcataatcactagattaggccctggagagggacttgtagtatcttggctgggtcatgtgcatgtgtgagtgagtatgtatgtatgtatgtatgtatgtatgtatgtatgtatgtatttttcctgaaacttgtgtgttaattttgtatctttccacttttcaggaaatgtcagctctaacaattttctgatggagtgtttaggttctcttatgtatacaatcatatcatttgtaaataaggatactttaacttcttcccttcttgttagtatctcctttatttctttcctctgtcatgttgctatagtagacttctagcactatactgaatagtaatagagagactctacacctttgtattcaacctgatcttagtagaattgcctttgaatttttctccatttagcataatctggctataaattttctgtaattatcttattatattgcctctatttcttgaatttttagggcttttatcataaagagatgttggattttgccaaaggccttttctgcacctattgagattatcctgtgacttctggccttaagaccatttatgtgatgtattatatttatttatttgcagatgttgaaccatccctgcatctctggaatgaagccaacttgatcatgctgaatgattttctcttgatgtaatcttgaatttggtttgcaagtattttattgagaacttttttcc

SEQ ID NO: 2956 - DNA, 1600 bp, mus musculus; identical to SEQ ID NO: 2955

SEQ ID NO: 2957 - DNA, 1200 bp, mus musculus
ttcccccatccaccctctgactgttatatatcccatacctcctccccactccctgtctccacatgcatctacccatccccaaccccacctgacctctaaactccctggggcctccagtttccttagggttaggtgcatcatctctgaatgaacacagacctggaagtcctctgctgtatgtgtgttgggggcctcatgtcagctggtgtatgctgcctagttggtggtccagtgtttgagagatctcaggaatccagattaactgagactgctggtccttctgcaagattgtcctcctcagcttctttcagcctcccctaattcaacaacaggggtcagctgcttctgtccattggttggttgcaaatatctgcatctgactctttcagctatttgttgggtctttcagagtgcagtcatgataggttcctttttgtgagcattgaatagcctcagtaatagtgtcaggccttgggacctccccttgagctggatcccactttgggcctgtcactggaccttattttcctcaggctcctctccatttccatccctgtaattctttcagacaggaacaattatgggtcagagatgtgactgtgggatggcaaccccatccctgacttgatgccctgtcttcctgctggaagtgggctctacaaattttgtctccctactgtctggcatttcatcaaacttccctccctttgagtcctgagtctctcacctcccaggtctctggtgcatttgggggtcccccaacttcctatttcctgaggttgcttgtttccattctttctgctggccctcggggcttcagtccttttccctcacccagtaccagatcaggttcccctctcccccctcctctgcccaccagatccccacccccacttctgacagctttcttctgtctcccaagtgggactgaggcatcctcacttaggcacttcagcttgttgaactttatgagttctgtggactgtagcttgggtattctgtaattttggggctaatatctactcattagggagtacataccatgcatgtccttttgggtctgagttacctcactcaggatgatattttccagttccatccatttgcctgcaaaactcaggatgtccttgttccaaattttcaaagtccaaaatgctctaaaaatcttaattttttgagtaccagtatgatgtcaaaagt

SEQ ID NO: 2958 - DNA, 1200 bp, mus musculus; identical to SEQ ID NO: 2957

SEQ ID NO: 2959 - DNA, 1400 bp, mus musculus
ttttactaaaagatcttaagcccatgtgacatggtggcatatgcttcttatcccatagtttgagagacagaagcagaaggaccagaagttcaaggccagccagcctaacttcataatcagtgtgtagcctgggctgcatactatttatctcaatcaaaatgccaatgccatccttcacagaaatagaaaagatagacttgccctttcggtcggcaccagcaccaggtcaccttgggcacagagtcagcgcataaccccaaggtcccctagaggactctccatgccgtcttaggaccactggtgagtggaacacaacttctgttccaatccaatcgcgcaggaccagagacagcattagggaagcagaaaacccggcctgactagggtcacaaagtcccttcctgtgggcgccagcaccgggtcacctttggtgcagagtcagcagacacccccaagctcccctagaagactttccacgtgatctttggaccactgatgagtggaacacaacttctgttccaatccaatcacgcaggacctgagacaacactagggaagcagaaaaccgagcctgaccagggtccaaatcccttccggtaagcgacagcaccgggacaccttgggtgctgagtcggtggagaaccctaaggtccctagaggactctccacgcgatcttaggacctctggtgagtggaacacaacttctgttccaatccaatcgcttgggacctaagacagcactagagaagcaataaacccggcatgaccagggtcacaagtccctttcgttcagcaccagcaccagttcacatgggcaaagagtcagtggacacccccaaggtccccagaggacagcttctgaggcataccccgtttcgggatccagacattcgggcaccttccctgccagaggagaggtgtccaccctgcccgggagagctttgccagagcacctggtggagccatcatggctcccgaatcccgctgagagtagtctgcacaggtgagagtgaggactacagaagctaacagcttctgggacaggccagagtgacacagcttctggacacatcctatttcgggccttcatcttctgctaggagtcaggtctgaatgccagatatctttgcaccttccctgtaagaggagagcttgcctgcagagagtgcactgaccactgaaactcagaggagagagctagtctcccaggtctgatgatagaggctaacagaatcaccagaggaacaatctctaaccagagaccactataacaactaactccagagattaccagatggtgaaaggcaaacataaaaatcttactaacagagaccaagaccactcaccatcatcagaacgcagcacccccaccttgcccagtcctgggcaccccaacaca

SEQ ID NO: 2960 - DNA, 1400 bp, mus musculus; identical to SEQ ID NO: 2959

SEQ ID NO: 2961 - DNA, 1000 bp, mus musculus
aatccgacgtgaccctgaggaagggcggggccgggaggaagctgacgtgtgggcagtgggcctgacaagatcaaagctgcaggaggatggacagtgaggtacagtaagatggaaggatcttggacctgattaatgatgcttggcgggaaaataagctgccgtaagaggatgtcaccatttcactgagcccgagcaagacaacggcggcaccacagagtctgtgaaagaacagaagattaagtggacagacctggccttacagggcctccacaagaatgtcccacccaccagaaactgatgccgggctccttcccatggatggagttttcaaacatatgtggatagacagtttcctgtctccaaatgcagatctttaggaataaatcaacactcaaaagcaaaaaaaaaaaaaaaaaaaaaaatccttaggaaaattctaaggatgacctttatagattgaaatgtttcctgaatatttctctcctgcccccctgtttctgtctcgtctctgtatgtcttcccccactcctctccactcacagagatctccctacatctgccttctgagtgctacgattaaagtgtgccacacacaacctaaattcctcttttgataaaacagtgtttttctcgggcagtgtactgttttagtaagttggagtcagtgccacaaagtgcagcttcttatgtgacattgcctattctaagtggactcctttgtatctgacttcattcacttagcctgtttcaaggttgattcatgttccctaatgccacctttgttgttccaaatgacaaaatttaatttttatcatatgtattttgtgtgtgtgcacacacaccatatgtgtgccacagtatgcatgtggaggtcagaggacaatttgcagaagttggctctcacttgcagccatgtgggtctgacggactgaacttggttgtctgaattgtcagcaaagacatttaccacctaaaccatctcactggcccccagaggttc

SEQ ID NO: 2962 - DNA, 1000 bp, mus musculus
ctggccagttgggcgcgcgcaagacttagtaataagtcttgcatgcaagaatcaatggaagccagcaccatttgctcaaagacttttgagaaaaggtatagggcagtgagctgtgcacagacagcctggtcctggtcaaacacagaccttgaaccctggtgatgctaagggactgcaggtgttcagccacacctcctgggaccctggctcctgttccggctacagcctcccaaagaccctcctgcccccaccaggcagagaggcatgtgtggccatcagtcatgtaggcaatgccccaagctcctggtattctgtctggactccacccccacagttacctggcaacagccaggtatgctcctccccacagttacctggcaacagccaggtaggccaggcccactataaaaggagctgtttgccccctcctccctctcttatcctcttattctcttgctcttactcttgctcccttgctctccctgtctctgccttccctttgcccctctctccatgtggccatggctcacctctgcttctctactctctccccctctctgattttctacaataaatgccttaaaactatggactgcctcttttcattgggatccaccatgcaggagcaatggagcaggtcttcccctaacaagccatgtatctaacctcccactgggaggcctccctgcactccagtcacaacccaagccaccaatgagcaagccaaggactttcctccctaaggaacccagccaaagctctcctccctgccccttttcccttcaggctctgggccagagtctgcctgtgccccctcccccgctctgttctcagctcttctgagacatccagcagtgtctgtggtgtcaaagacccagaacctgaagtccctggccttcttgcagcccagggacccccgaaccggctcttttgtggtacccagcagcatctgtgttacctgagagtctgagcccaactccctactccactccggcaggtc

SEQ ID NO: 2963 - DNA, 1400 bp, mus musculus
ctcttccatctcttgtattctgttgttgatgctcacatctatggttccagatttctttcctagggtttctatctccagcgttgcctcactttgggttttctttattgtgtctacttccctttttaggtcttggatggttttattcaattccatcacctgtttggacgtgttttcctgcaattctttaagggatttttgcgtttcctctttaaggtcttctacctgtttagcagtgttcgcctctatttctttaagtgagttattaacgtccttcttggtatcctctaccatcatcatgagatatgtttttaaatccaggtctagtttttcgggtgtgttggggtgcccaggactagttggggtgggagtgctgcgttctgatgatggtgagtcatcttgatttctgttagtaggattcttacgtttgcctttccccatcttgtaatctctggagctagttgttatagttgtctctggttagagcttgttcctcaggtgattatgttagcctctatcagcagacctgtgagaccagctctctccttcgtttcagtggtcagagtactctctgcaggcaagttctactcttgcagggaaggtgcccagatatctgttgtttgaacctacctcctggcagaagttgttttccactcaccagaggtcttaagatcccctggagtgtcctgtgggggactttgcgggtgtccagagactccgcgtgcaaggaaccccagtgctggcgtggaccggaagggacttgtgaccctcatcaggccaggttatctgcttccctaattaatgcagtctcaggtcccgcacgattggattggagcaggtgctgagttccactcaccagaggtcttaagatcccgtgggggatcctgtgggggtccttgcgggtgtccggagactccacaggcaaggaactccagtgctggcatggaccgaccggaagggtagtaccaaattcttaaatgagaaggaacaagaaataaagtccacaaactttaacttccttcatcctaggaaaaccaacctctttcttaaaatgcaagggcatcctccttttcttagaacacaactactagcttttgtgtgtttgtgtttcaacatagaagtgaacatttaagactatgtggacaatttagtgtttattgcagctgcccaatttctgctatgaggtgggaagtagcctcatacagtatgtaattaaatacaaaagagctatccaaaggcagcctgcagggcagaactaacctaatgttctgtgtctcctcgatgaaactaatgtctagtcagatgccctggatcccttgagatatagcactataaatatttttgacaatgaatattttaaatataaccaactctgtgtattaagacttatcttttaagaacca

SEQ ID NO: 2964 - DNA, 2000 bp, mus musculus
ggttttttattagaaatttttcataggtatatagaatgcattctgcttactcttccactttcaatttccctcccgccctggccagcaccccttattccttacaaaatgtctctgtcatatttgctagttttattttgtttagtgtttcatagttcaccccagacatagtttggaactattaaatactcatcagtggatacgtttgagtgccccgtgtcccaatcctttagttgccagtaataaatggtaaggtttcatgggcttcttggagttgggccaatgctattttccaaagatgttaagatttaccataatagattcttgtacctgcctcactcacactcgcttgcagtacctgtctatctttctcttcttgccaatcacattgtagatgaggcttttgtggttttgttggctccttgtattagcataaggtgaactgatttcaggtaaaatgttgttgcttttctggcccattcattggatggaaacgaaggcccggttttgttggagcacttctactggttagcaatggctaggcagagccatgtctaacagtacaaactctctcctgagagaatttatcttttctcctagacgcaattttgtcactttgaattttagaactatcagaggcccctttctctattcaaggacttcttgacagccatgttctttcttttcatttcatcttaccagtactcccacttttgagcctcaatattttgcttctcgtgatcttattagatttgtgttctcataatctttctcctgaacaacttaggctctaagttatgagacctcaaattacccaaggaactggctaggcctgcctggtggtgtaggcctttaatccgagcactcctgagtcagtagcagacagtgctctatggatttagggccagcctaatctacatggacttcaggctagccagatggccagggcaacataaccaatttcattacatagggaattaaaactgaggtatctggtatgataaaagggccactgagttagaaactatcatctgaaaagcaggcttagtggtacaagcctgtaattctaacacaggaggatcaggagctcagagtcattccggctacttagggacttggaggctagcctagttctggctccatgcaaaggaaaaggggaatgtggcagtggttaagataccataatagattcttgtacctgcctcactcacactcgcttgcagtacctgtctatctttctcttcttgccaatcacattgtagatgaggcttttgtggttttgttggctccttgtattagcataaggtgaactgatttaagagcactaactgctcttccaggggatctgaattacattccggctacacacaagatggcgtctgtaacttggtttccttgggatccgacaccctctgctggcctacacgggtataacacccaaacctaatgcatagacaaaactcatgcacattaaataaaatttaaggaaaatatcatatacagcacatgatgttttcaaaacaaagcattttatttaacagcaaactaccccacccactcaaccacccacccacccacccacccacccatccacccacccacacacggactcattgtgacatgttggtaagcaacagttttttttttcaagtcttcaaaacacccaagagtcaacagaagttctgtattccgcatccgttcacaaagtccaggtgttttccatgtgttttttcacagttggtgggaagatgactccagtctttcaacaacagattggtacacagttcatttatgtgatcaaagcagatgatggtaggatgtgcttaattggtagcaatattgatggcagtaactgtgaaaggaaggctttcagttattttttcctttgcaaattccagaaatgtaagcccattcctacccatacaaagggatattactgaatccagccaatttccactaattaaaagctaatattagtaacacttttgatgcccaattgagtt

SEQ ID NO: 2965 - DNA, 2000 bp, mus musculus; identical to SEQ ID NO: 2964

SEQ ID NO: 2966 - DNA, 1000 bp, mus musculus
cagacctcattttgtccccaaaccattattagaaaaccataccctgctcacctaagcccaaagaaagaaggtgacactggctggtgcttctcagagggttggcacatctgcatattgcttgtctaattcttctcattggtctggaacaactctttatattttctctagatagcctgacattgttttccccctaacaacctgatgctttccttttcttgtcagcctagggcttctgaggtagggaggatggcagtatgcatatctgtatgcatgcttattcctagggaagtttcaatagtcaggctatatacactggctggatttagttccgtctcaagtggagcagatgtgaagagaaatggaagttgtaaaacatcaacaatttaacaaatggctaagacccagtttaaaacagacccttgcacaatactatccagctaaaaacgtattcctttatgggcaatggcaacaatgaaaaattacatctcaagtgaagacagcttaaatagaaatataagaaatggaaagggatgctggggttggggggcaggtctcatcttcgaatttcccttcttggtcttggggatagaaggatagaaatatccttccagagttctgggccataggcctttatctcttaaatattctgtccatataggattgggtccttaggtcttatgcttggacttagctcaggttttgtgtcttatgacatacgtagttccccgctcttggaagtcacaggtgtcctgtagaaacagttcctcttctttgggttgtcagcattctgtccagccagctcaagacgggccatctgtgtattttggtccttttaaatctcaagtcgcaaaacttctgtcttctacttgggcgttcacttcagagccacttgaatcctgaccggacggaatgatgtattttgtcttagattatttctcagggcagtctggtgtgaggaacggctccacgggtgacattctggacctattgggaaggggct

SEQ ID NO: 2967 - DNA, 1000 bp, mus musculus; identical to SEQ ID NO: 2966

SEQ ID NO: 2968 - DNA, 2200 bp, mus musculus
caccagaaagagggtaacaagaaacagggaagggcaaagaaaaaaattgccattagtacactgtaccaggctatcaacgttaaacttaaggtttccttaacataggaccataggacacacccgtcaactcttccaaatggcctagtcatgcaactccagggcatatttgccaggctctgtactcaacactttccattcatgatttcatttgaccttcacaaacagacaggtcttagcagaactaaattgccaaagggcatacatctaggggatattacatttaaacacagaatgaacatctcaacattctgttacatggattaaaagcttctgtaagcagcaaacactataagcgactgcatatttaattgtcagcttcactctcctcttctattaaaaaaaagggggggcttggtttttacatccttcacaagtctaatggctgcttcacagatggagataagaaataaactatttaaagcttttcaatgtttaagtctgtaagaatggtagggcaccaagccaaaacaaacaacaacaacaacaaaacctagaagctaaattcctcttgtgatataactggtaagcagataatagtttgagttgctgctgtgaggccatttgataacgtgaaagcctgttcatcttccatcgtgtacatggccctgcctcacattatcacattagatgctctccacccagcaccatcttccagcaaatgcaaatcctcagaagactgcaatgctagtgacttacctcattctattgcttttaagatgctgcagtcaggcatgttgatcctcgggtcatttataaagctgccttccttttgtgtgttcacattgcttgatcacgctgaagacccagttttctgtgctgctttggggaagggtaatatttggtagatggcactacaaagaacaaaagaagctgtatgaatgccaggaaagaagtactagaacatcctggctctttaaattctgcctaatgatagatacttctgtatcaattccagccaggtttccatttgtagttagaggcattcatcatcagtaatgttagtgatggctcagtggttaagagcacctattgctcttccagaggtcctgagttcaatccccagcaaccacatggtggcgcacaaccatctgtaatgagatctggtgctctcttctggtgtgtctgaggacagcaacagtgtactcgtaaatagctaggtaggtaaataagctactcacttgtgtattatatggcatgagtagggtagcagtgcatcttgaagtatgtaaacagctggcaaagctttcctagcttctggagagagaaccaaatagagcagaatggcttcctcgaaggtcagtgccactattgcagcagcttttctcctagaagaaacatttgcactgtttagttacatttcccagatgtgggaaaaagataaaatttatgtatatatctcaagtaaaaggctgactttaatggaaaacaagatcaaagttaaaattattacactgttgcagaaaacttacctactttgatgtagggtggcattctttgagcctttgtcttccttgctgggttcaggaaagcgtctcactgaaatctgggctaggcctgttgcccagtggtggtgagctattcccctggaggatcctcatgccccatctccacctagggatcgtcaaagggaataggtcgccagcactgcaaagcagcaagcccacaattctggggggagatctggaaaagaggtgaaagaaaagccaattcttgaaatcaagaatactgggaaagttgtctcattatgtagtaaccagcagttgtgttaaatcatggggaggggcttggagagtgaacccttcacatttgtagatcttagtgttaacttagagacatgagaattgctccatccaagttctttctggcttttattctgtcacctaccaatgagagatcctttagattataggttgtgttaaagtccttgtacttcaaatactctgggaataaaggggttaaattattttcttcttttaatttgtgctttaaacaataccatgccagaacactggcaaggtgaatagcattgtttggctcagtgcttatggtgcatatgtccctagaaactggtgtagcattggacctctgagtttgaggatattcagagaccagaattatgacaggcctacagaatgtgaca

SEQ ID NO: 2969 - DNA, 2200 bp, mus musculus; identical to SEQ ID NO: 2968

SEQ ID NO: 2970 - DNA, 4000 bp, mus musculus
aggtcatcttccaaaaagttaatcatactaaaggccacacaaagattgactttttcgttttgttaaacttgtagtaaagaccaagcaaagatacttgtcttaaacattctgcaatagttgcactgatctttccacagactcatcaccctcagtacactgagacactgcttagtcttcagaaacatgacacaaatggctatttttacttcacaaaagctaatgatctcacagtcaatccaccttgcaatccaaatgcctttcttaaggaataaaattatcaataacttttctggcagttggtcctgtacagtagcaatatacaaaatcgggcttaaagtttcttaagcagacagttggctccttcctggaggaagaacggaaagaaaagtgctaagcttccttctcaggaagacaattttcagttcatactgtaaaggaaagccccaagtaaaaggtggcaatccaactccctgagctacttgcctgcaatattttgcacaataaagcattaataaaggtaggcaagaatggttcctggccctagaatgtgccagcagttggaattggaataatttagaagtgcaagttaaagattgaaggctcatccacctagttttggcctgcttttgctattcagtgtataaatacaccaaaatttattaatgacacatagggtgtttggggtaattaacattacccagaataatgtaagaattcgaggtgtctctgttcagtgggagcaaggagaaggcaactgagacactgtagccatatgaagtgagtaaactggtgttgttgactttaagtcaagagaagggctttgcccagtcaatactgttcaaacaaagaggcaaaagggatggcatgatggaattgagaaagggcacaaactcttccttaatgatgggtttgtgagaattagtgattcagaaaagtggtcaatggacaaactagaggccgggcaaaaggaacactataaagtgtgagattgtgactatttaggattgtatatattaaagcaatgcaaaaagggtcgaaatccgggtcattgttgggtgtacatactgctgtactttattatatcattgggaaactagcaggggatttgctcaagttggagtagaaaataaaccatccagaactgccattgtgcctattaagagtcccaaaatcagtttaaggaagagagcaggtcattcgtcagagcccctgtgctcattgacagtaccgggtagtttcgggggctcagcaacctctgcaataatgtaaaggggacaaaatattccagacattcatagttataaatacgcataacttagcaattaattctgggactcagtagccttgatggtatgcaaagagagcacacaggtccttgacatttttgcatagtaatcatccaaatgctgaggttactaatagttactaccactcagcagccccagtcaaaaggtaggcatttcagaacctttgctgccgcacaggtcatatgtgtaagggtacagattaatattgacaagagaagtgctcagaaataattaatatgcctctggtgtcaaaagagtacaaggatgtaaaatccaactccaaaggtaatgatggacaactaactgcattaatgcacttaagtccaaatgaagagcacttcgtacaaccctctttctgctttaaagcggagaagagggtacagtagttcttagagaagtgcttagacatgtgaactttccaaatgaaagtcttgagcttattatcacttcctgctgaaggtgctaaggaagtgagtgggatcctttcaagtgcacagagcaggtggcagtgcatacgcatacatttaatatatgataacagtccaaaagaatgcggccttgttgatcagcatatcctgatatagtgcaaatgaaaggcgaaggagtatggcctttgtttactggcaaagacaaaggaagattcactgtatattaatggtccactagcagggaccttgggagataaacggtatcccttgcaggagtgcaagagatacaatggtccgaaaagtaataaggttgtggataagtgtaattttacacattaactggccaagtatttttattaaaatgaatggatcatgtccctgttatatacattaatgttcaagggacatgttatcaattaaaaaccccatcctttatgcaaatattaagtctttaaagtaatagtcctggaaattaaagagtggaaaggaggggacagccttatccagtgtccaggaagatgaagaagccaaaagattagtgacccttgctgtactgcaaaagggtttgagagtaggatcgtatccaaatggaatgagatgtgtgcagtaaatgcatactaatatgcaaggtacatgtttatggccattacagttttacgctgttcaggtttccttctgtagtgaacagaaaaggcctactacaatcagtcattattattagcaagccacaaaatgggaccttataggtcaacaccacttctgtacttcaaagttaagagtaaaattgatcctactaaaattgccagtatgtacataaatagtttgaggaaggggtttcaagtgcacagcacatacataattccataaagcaaagaggatatgaatgatcagagacagaagtcttaccttgaaggaccattgaccgtattggaatcgtttcaatctatagtctcatgaaagaagctttatattagtgagcctctttgctttgctaagtacaggagtcctgatctaaaaggcacaactgtggacatgagaatatgtacaatagagttaacactgtgcacatttactatgttaaggatcttaaatactgctgcaatacaaataagtcttcaccagatgcagattactacagtgaaatgacatatgcacattcacaatatgaaagactgcatgcagggcatagtggtaggaaccagatatgccaacacttgttaaacgcaggctagatcctgagctcaaggctagcctgggttatatgctaagttccaggccagcctggaagttaaaaacaggacagatcaaaggtcttcttgattaccaacaaaatgacttgacttagtttggtttctttatccaatgcttaggaagagggacaaatgcagctgtgcacacaacaggcacaaatatgtttacattacaggtggcaatgcctgtaagtcccgcccagcccaggctacataagaggctgttctctcaaaccaccacacggtggggctgtagctctatgacagtgctttactagcgtacacaagactcaaggtttgattccccagcacagcagaaagaccagaacagagaagtggtctcattggttggcacccttgattgtcacccattagggtatgagggtatgggatcttggttactaacagaaggggacttgaacaactgcaattttgcacaattgtgtaagaggcattaagtaatcagcaccctctttacataaagcaagggtagtattaggaccttgagaaaagactcaattcctagtcaggattatccacataaaatgttccagtgcagaggtttttggctgaaataagaaagcatgtgagactagtatacaatatcatgagcaaataaatgtatctccatcagttagaaagatgtgacctggggcgatagcacccatgacagcatgccaacagtatatagtattctaccccctttaatggccaatgccttgaaaattgggactgagcactttaactgtctgataacagacctgtgtttgcccctttgctaaatgcacacagggctggactagctaaagtctaatccaatggacaaaatatttctgacagaattattcagtactcaaggtaatacatgagaaaagacgactgaacactgcttagaaacttgggactgtgactactacagcaatgacagaatggttttctttccttaaaggaaaggagacttgagagatgatacctccatggcaagtctctgatataaaactcttgtttgattggt

SEQ ID NO: 2971 - DNA, 4000 bp, mus musculus; identical to SEQ ID NO: 2970

SEQ ID NO: 2972 - DNA, 1000 bp, mus musculus
accttccaaactaaaactttttcaaagacatgctattatttcttatcccccaaatcttttttcctattcatctaccaggccaacatctaccaatgtgtcttcaatattcatctacaaatttatcatctagaagctcttctctatcttctctaaactaaatatgtttctctatttctgggttcccctaaaatcttacacacagcactttaaaaatacttgttacattttatttgaattgttatttactagactgttttccctcaaaatcttgatttgttgaagggcaggttatgattcattcattgctgtagcctcagtgactagttatgtctatcaaatgacaagtgcctaacaaatttgtttaaaattttaatttgtttcccagtactcataaaatagcttaagataatagtgacatggtcctttttaaatatggagctgggttaggtccggataaaacctagtttagaatgattttgctacctttgtatgcatttcaatatactaagctactagtatagaacaaagacagttttacaacaggtttattcaaatagctataaactaatttttcatccaggaaatagacaacgggtatacaaaggatcatatacaataaataagacagtatactccatcagtaggagctgtcaatcattgagctttcaggataaggagaaataaataagtcaaaagacctggtttgggactaagatgactcagcaagtaagacacctgtactagtcttaggtcttcaaatccctagaacacatatgaaaaaagctgagtgtggtcatgttatgacccggtaatccctgcagtatgttaacagaaacaggatgatcactgggcttgctgtcttacagcctatctccaagttcaatgagagaccctgtctcaaagaacaaacaaggcaagtggcagaggttaacagtcactgttttctggtctccatgcacatgcataggtaaatgcactccaacacattcatacacataca

SEQ ID NO: 2973 - DNA, 1200 bp, mus musculus
ccttccttccttccttccttccttccttccttccttccttctgcctgccctccctccctcccttcctttctttgattgagtatttgggcatctcacatcatgtacccctatcactctcatgtcccagacttctcatgtcaggcctcccttcccctgtgaacaccccctcccccccccacacacacacagaataaaaagcaagtcattttgcgttgtccatatactcactgaagcatggtcaaattcctagtggccagccccccaacgcactgagggaggatgtctttttctgcctgcatgtgcaccagaagccatcagctgagaagtgtctcctagtggccagtgaggggcagggtcagtttttccactcactgacattaatgtgacttcaagaggctgccaccgacttagagtgggttttggtggtaacaggccttgcagacagaaacactgacctactcctggctctcagcagctgcacaggcctcaacatggcctcaggtggacatgtcattcatatgaggagggccctaagaggcagcaaagtgcaaggacatcaccaaatcatcagtcagtgacaaagactgcatatgcccacatttatctcaggcttcattgggtcctggggcaccagcttggaccaacagacaccaacatgctttccggtggcttcaaggaccatggtggtcctttgaggaggtacagtccagggaatcaacctttcttcatgtcaagcttccatcactgccaagagccaagggggagtcccttagctgggtggcaggttcaggggctgagtctgtgtttgcataagctccaggctgttgtacatcatcaggcagaccctactgggtgatgacaatatgtccacctcaggcttctctttcacctgttactgcctgtactggctggttttgtgtgtcaacttgacacaggctggagttatcacaaagaaaggagcttcagttggggaaatgcctccatgagatccagctgtggggcattttctcaattagtgatcaaggggaaaaggccccttgtgagtgggaccatctctaggctggtagtcttgggggtctataagaaagcaggctgagcccttccgctcgactcgggactcgagccccgggctaccttgccagcagagtctttcccaacacccgcaagggcccacacgggactccccacgggaccctaaga

SEQ ID NO: 2974 - DNA, 1000 bp, mus musculus
catcaagccttcacaggaccaagggcctctcctcctattgatgccagacaaggcaatcctctgctacatatgcagctggagccatggattcctccatgtgcactctttgattgatggtttagtctctgggagctctggggagtgggtcaggttggttgatattgttgttcttcctttggggttgcaaactccttcatctccttcagtccttcctctaactcctccattagggccctcatgttcagtccaatagttggctgcaagcatccacctctgtatctgtcaggcactggcagagcctctcaggagacagctatatcaggctcctgtcagcaagtgcttcttggcattctctgtagtgtctgaggagtcatttctaagatgtgtccttcccatcagtaagtctataatttcttgtaaataaggatctatagattgttgtgcagaattataacattcataaatttctatagtaccattatcttgttgatatgcaattccagtaggagatgatcagaaaggagggataagtaattggtaaggaagcaagggattaattatttgagctacggctttagcagaagcattatttaataagctaatcacctcctctgctttaggtattacatttcttgtagaatttaaactgggcaacttactgtaggcatatttaagttcagtataactttagaaaatgttccctgctgtagcacaatcccatgtgcacaaggaagcatattacatcaaaattcttctcaaagcacatgtcacttcttctataaaaataggttctatagctaggccaaatgtgttatattaagggcctagatgaggacctggtatggtctcaggcatgcagatagtgcagaggtcacctagactattagccacccccagtcctgcttgtgggaacttggaggaaccaggtatgttctggtcctacagaaagcacaggggtcaccgaagctattggccacctccattcccagctttactggga

SEQ ID NO: 2975 - DNA, 1200 bp, mus musculus
ttctcctgtatttctttaagtgagttattaaagtacttcttgatgtcctctaccatcatcatgagatatggttttaaatctgggtctagcttttcgggtgtgttggggtgcccaggactgtgtgaggtgggaatggtaggttctgatgatggtgagtggtcttggtttctcttagtaagattcttatgtttgcctttcactatctgataacctctgaagttagttgttatagttgactttggttagagcttgtttctcttttcattctgttagcctctatcaccagatctgggagactagctctctcctgagtttcagaggtcagagcactctctgcaggcaagctctcctcttacagggaaggtatacagatatctggcgttctgacctgcctcctggcagaagatgaaggcctgaaacagggcctgtcccagaagctgttagcttctgtagtccacactctcacctgcgcagactagtctctgagggatctgggagctaagatggctcccccaggtgctctggcaaagccctcccgggtggggcagtcacctctcctctggcagggaaggtgcccgggtgtctggagcccaaaacggggtctgcctcagaagctgtcctctagggaccttgggggtgtccgctgactccgtgcccaaggtgacccagtgctagaggcaactgcaagggacttgtgaccctggtcaggccgggttttctgcttccctaatgctgtctcaggtcctgagcaattggaatggaacagaagttgtgttccactcaccggtggtcctaagatcgcgtggagggtcctctagggaccttgggggtgtctgctgactccatgcccaggtgacctggtgctggcactgaccggaagggatttgtgaccctggttaggccgggttttctgcttccctaccaataaattattgatgagaaaatgttccttaactcattctgtaaaaccagaaataatttgatattaaagtcagacaagacacggcagatgcctttaatcccagcactcaggaggcagagacagatggatggatctctgagtctctagagtgagttccaggatagccaggagtacacagagaaactgtctcaaacaaacaaacaaacaaaaaacaagaaaaaaatcttacacagacagaaaaccacagatcaatatttttttctgatttttctgaattt

SEQ ID NO: 2976 - DNA, 1200 bp, mus musculus
tctaataactgcaatgtgatatcttcatttatatagctgtctaattgggaaggctacacaaagggactggagagatgactcagtggcaaggtcttgctatgtaacctctgactggactggaattcagtatggagaccagaatgtccttgaacatgtggcagtacatattcatagtacacaaaggaatagtattaagccacagaaaaaaaggaagtattgtcacttgtaaccatatggatgtaactggagattattatgttaagtgaaataaaccaagcacagaaagacaagtgtggtttaaaatggtggccagccacagggctagctggaaatttatcttcgtgcaccccacgcctctgctgggcggggtgggtgtcaggctgtgagaagccgaaggaccccgctccagggggtggggaagcagtctgaggccccctcgaacctgccagaattggtggtggtggtggggtggctggctctagcttggggacaatgggtgggaggagagcactctgggagacctcccatgggagattagatgcagctctttagaggaagacctgctccattgctccagtaccatggattccggtgagaagaggcagtccatggttttaaggcgtttattgtcatggcgggaaggggagctaagagggttgtagaggcagagagagggagagagtagagaagtagaggctggccatggccatgtggagtgaggggggaaaataatgtggagggggggcaagaggccaagagagaggcaagagaaagaggagggggcaaacagccccttttatggtgggccaggcctacctggctattgccaggtatgtaactatatggagcagcatacctggctgttgccaggtaactgtagggtggagtccggacagaataccaggagcttggggccttgccctacatgactgatataggactacagaatgatggagctgaagcctatcgggatcctggtgtctgggggtgtggcaaacacctgcctttccttgcagcaacacctgctgggtctctaaggtttaaacctagctcaaccagaaaacaggctgcctttcccggtcccacagacaagtggaatcttactcagtggaatctagaagagttgaactgccctgatgttaggagtagaatgccagaggctgggggtgtcagagggagggagggtgcaggcatattgat

SEQ ID NO: 2977 - DNA, 1200 bp, mus musculus
ccattttcctttatttaatctatctctatttatctgatgttctcactgaaatcactgcttctattaggatccagactctcttaccaacatgcctaatgtagaaagagaagttgaggacgcacttgtcaaatactttttgttttcatggacaaccacaattatgcaatgtggagagagacagattttggagcactcaatcctaaagaggatatctttataaattgttcccctcaaatctcggggatctatgccaaagatgaggcacaaaagtcttaagagccagttgtgattaataactccaaggaaatagtgtccttcagacacaacaggtcatatgcatctttgaactcactgagactgtgacagtatgcacaataaatcctgttcccacatctaacctagaagctatctgcagattagtacacgcttgcaacggaaaatttaagtctttgagtggaatctcactgggtatattaatcacacttagagtaagaatactagctcaggaatagttgtgcagcacaaaatgaactcaatagagttttgatagactttttttggtctcatttttgcttttcgtaggcagactttttggtaccgttgctcttttgcttgtgcatttggttttcattttggtagttttatgaatgtgtgtttcttctttcttaaaaaattaattggtgtacctttcctgttaggggagagcttgcctccaggaagtgtcggaccccgggacttgggtgagatcgccatttctctccaatgactctctaaggcaggactacttgggagcacacaggctacagaagcagcagctaggacaggtcctatggtcctacacctgcacccaggaggtggggctgttctgcacccctctgtgtactggtcttgccaggggagagattgcctccagagagtgctgacacagactaacagactcacaggaggaacaagctccattcagtgacagcaagaacatctgacaacagagattaccagatggcaaaaggcaaatgtgagaatcttaccaacagaaaccaagactacttggcatcaccagaacccagtactcccattacagtgatagtgcaacacaccagaaaagcaagatgtggatttgaaatcatatctcatgatgttggtagaggattttaaggacataaataactcccttaaagaaatgcaggagaacacaggtaa

SEQ ID NO: 2978 - DNA, 1000 bp, mus musculus
gcaattaaaaacaatggatttatgaaattcttggacaaatggatgtatctggatgatatcatctttagtgaggtaacccagtcacaaaagaacacacatgatatgcactcactgataagtggatattagcccagaaacttagaatacccaagatacaatttgcaaaacacaaaaaaatcaagaagagtgaaaaccaatgggtggatacttcattcctccttagaatatggaacaaaatacccatgaaaggagttacagagacaaagtttggagccacgacgaaaggatggactacccaggtattaccccacctggggatccatcctataatcagccaccaaacccagacactattgcatatgccagcaagattttgctgaagggaccctgatatacctgtctcgtatgaggctatgccagtgcctggcaaatacagaagtgtatgctcacagtcagctattggatggaacatggggcccccaatggaggagctagagaaagtaccctgaaggggtctgcaaccctatagatggaacaacaatatgaactaaccagtacccccagagctcgtgtctctagctgcatatgtcgcagaagatggactagtcgggcatcactggtaagagaggccccttggtattgcaaactttatatgccccaatacaggggaatgccaggaccaagaagtgggagtgggtgggtaggggagcaggcccgggggagggtatagggaatgttcgggatagcatttgaaatgtatataaagagaatatctaattttaaaaaaagaaaaaagcaagaaaaagacttcaatgatttttatagctaaaatctacactatgaatatagtacatttgtttatacatctatttactattaaaacatttaaattgtttcttgcttttatgagctatgaacttgtatgcagttatttgtttgattgtttattcaattatttggggagagttgtaccaacaaacggaactgctgagtcatatag

SEQ ID NO: 2979 - DNA, 1000 bp, mus musculus
catagtggagcatgtgtccttcttaccagttggggcatcttctggatatatgcccaggagaggtattgctggatcctccggtagtactatgtccaattttctgaggaaccgccagactgatttccagagtggtgccgctgcagccgcttctccccctcctcctctctctctctttgctaccttcagatctagatggagaactctcagctcctctccaacaccatgtctggctacatgccgccaagcttcttggcatgctgataatggactaaacctctgaaattgtaagccagctccaattaaatgttttaagagttgccttggtcctggtgtctcatcacagctgtaaaacagtgactaagacaattaccctggtgaccactattctattaatatccttttctatgaatttgactacttcagatattcatcttaaagaaaccattcactaaatcatttttggtgagttaatttattttactacagtatctgcaaagtttatccacatcgtgacagctgtaaattatccctctttttgaaagggtaaataagacatttctatatatttatgccaaatttatctatttttccactggtagatgcttgagatatttctacctttttactgttgtaaataaaagcttttatgactaaagatatacagatttctcttgaagatcctattttcaatcttcctgggtaaatatccacaaatagtattgctagattatataattttttacaaatattttaaggaatcaccataatattttctatagtaacgatatcattttatattctaacaaagagtgctgaaaatataagatctaagagtctttggttgtggtgtcaagggttttttaagtagaagcacatgtcatttgcaaataacagtaatttgattttacttcttttcctatttatatccatttatttttttctcttgtattattgctctaaagcttcatacactatattttctaagagttgtaaaagtagg

SEQ ID NO: 2980 - DNA, 1200 bp, mus musculus
ggtttcttcattgtttgtatttccatttttagatcttggattgttttgttcaattccatctcccgtttagttttgttttcctgtaattctttaagggattttagtgtttcttctttaatgacttctacctgtagcagtctttgctgttagatctttaaggactcctacctgtttagcagtgttctcctgtaattccttgagggatttttgtgtttcctctttaagggcttctacctgtttagcagtgttctgtatttctttaagtgagttattaatgcccttcttaaaacttctactactaccatcatgagatatgagtttaaatccacatcttgtttttcgggtgtgttggtgtatccaggactcgctgtggtgggcgtactgggttctgatgatgcctagtgttcttggtttctgttagtaagattcttacatttgcctttcgccatctggttatctctgatgttaatgttcaagctgtctctggctggagcttgatcttcctgtgattctgttagcctctgtcagcactcctgggagtccaattctcacctgagtcccagtggtcagagcactctctgcaggcaagctctcctctttcaggacagatgtccagaagtctggagctctgatccacctcctgagtcctggggtcagagccctccctgtaggccaactctcctctggcaaggaaggtgcccaggggtctgggtctctgctctgcctcctggctgaggatgaaggccggacgggaccctgtccaagaagctctattgcttctgttgcccacgtgctctcagcgtcatggagagtgctctgggaccctagacaccctggaccaggttcacgcagaaggtggtggggctggccctgacctgaacggatcccagcctctagtccggtggggttcctttatccctgttcttgttggcacaagaccctcctctattctttggagctgatgttgtgttccactcacccgttttttccgaggtgatcccaaggttctgaagcatggagagtactctggagcccttagtggcctccactgggttcaggcagaagatggcaggtgtggccctaaccagaacggatgaaaattgctcttttaaggtctataaaaatatgttgcaatttttatgggaattgcattgaatctatagattgcttttggtaagatggctatttttcactatgtta

SEQ ID NO: 2981 - DNA, 1200 bp, mus musculus
aatcttctgcacctaagattctctcttccatctcttgcattctgttgctatgactcctgatttctttcctagcttttctccctttgtgattttttaaaaaattttttctacttccatttttagatcatgtatggttttgttcaattttcttttacctgtttggatgttttcctataattcttttagggatttttgtgtttcctctttaagggcttctagctgtttatctgtgttctcctttatttctttctttctttctttctttctttctttattatttatttatttatttatttatttatttatgtccctcttaatgtcctccatcattgtcataaagagtctttagatacatatcttgcttttctggtgtgatggtgtatccaggacttgctatggtgggagagttgggttctgatgatgccaagtaaccttagtttctgttgtttaagttcttatgcttgcctcccaccatctgattctctcacgtgctccctgcactccatatatctagttggaacctgtccgtcctgcaatcccagttgagtcagaactcctcagagtccagctttctctgtgatcctgtgattcatggatcctgtgatcctgagattctgggtatgtcagagttcttggcagtcaagcttcctctgagaccctgagatcctggtgtgtccaggcatgttagagtgcctggaaatcgtacctcctctaggggggcgaggtatgtccattgagtttgaaaccaagatagaccagtgctgactataaggaacctgagtcactggtcggatgggtcttgtgtctctgctcttgctggtcccaggcactccctgtgatgctggaacagatgctgtgttctactcaccagtgatcctaagatcctgggtgtgctagggttcctggggagtcgagagttctctggggctcatggaactatccaccgagtttgcctccaaggtggccctgtgctggcaccccattaactcttctttgaaagtctggtagagttctgtattaagacgactggtctagccctagttttatttgtttgtttgtttggtgattggtaggttggttgggttttggctgttgttattgttttgttttgtttttgttttattaggagacttgtagtggctgcttctatttcactatgggtgagagacctgtttaaagtgattatctgatcttgattta

SEQ ID NO: 2982 - DNA, 1400 bp, mus musculus
aataagaaaaacacactaaatctacacctagcaaaaagaaggaaatggtagatgttaaaacaaaggaatccataaacatagtcaagaaaaccaaaagctgtttctttatggaagccaagaaactagttcgatctctaactagactgaagagagatgaaagaagatataactaaaatcacaaatgtaggtggagccatacaaacaaaatagagtaagaaaatagtataaacagtcatgttaacaaattggatgatctcgataaaatcaaaaggcttagaaaatatcagagagggaagttagagacatccagcacaatcctgactcccctgagattaaaacaacaaaacaacaagtacctggctgcaggtagaggtggggtgaagggaaaacatgcatgacaacatcagtaaccaacagacacagagatcagagatcaggtcaaatccagaaacagcagcccttacatttgtgaaagaaacaaacagaaaaaggtaacatggtgaacccctgagtgcagcaacatggatagacggaacatgaagaaccccagcagagccctgagtggaagaaagacgtttaacctcagcgagtatcccagggacagaatttggtaccctgaagaaactgaagtttgaacaggagatctgtgatccacgtagtcaaactcacagtgactccataaacttcctagcgtggacattggtgcggcaatgagctatctgaagaccagttcaggcaccaaaccttaccactggggaggatgggaagctcttgagattcacagaagccctctccactccactaattaagcgacggaccaccggattgggggcaggaaattggctatgataacatagattcgtggacacaactccatgaagtaggagatgcagactactgcgcgggggttggggctcattacccttgggaaactgtagtccaacctcttgagacaagttgtgtgagtgtgaacagcacaactggtgcaggcaggatcacccagtacccctgcccctcccccaccccaccacagcataaattgctttaacttgatcacttgatgttctcagaggtacagaacatttagagaaagtgggccactgaggagcatttctcacaaccacccacacttcttgtgggaaacgcacatacaactggggagtccacagacctggacagtgggggagcggagggtggtacgagggcaactttgcactttctcaattgctggacctgtgtacagagactaatggagcgagttaagccagcagaggacattgtcttagcttgcatgccctggcaagcaaggaagggcagggccagcccctatacagccctttctggttctacctgtcaggacctgagaaagggcctcataacacccaccacacaactactga

SEQ ID NO: 2983 - DNA, 1000 bp, mus musculus
caggccagcctttccctcctgccctaaacagggtgactgaacagagtgtggcctgtgtgtcattcgttagagtcagctacaggcagttgacagcctcatgtgctttttaaggactgagcgactgaaaactatgctcagtctagaggacagcaagggaatgcaggtgggtgccagggagggacagggtgacttggcattgagaacactgctttgccatttcttggaatgtgtggtcttccactccactgacaccataatcatggactgtttgatggaaagccttcccatggtttcttcacccccacatgcataagaggcttggtggtatagcctagtggtagagctctttcctagcatgctcagggccccaagttcccacactggcaccaaaagaaaaaagcagaaaaatcacacatctaagagcattaagtggaggaagacactgtctcttcagttttacatatggaaaaactgaggcatggaatgactgagcactttctctgaggatttcatttctcgctgcaggagatgggtccatctgatgattgtctatgtgtacccagggctgcctagagttgggggtaaactcatgtcacctcaacagctcatgcccctagctccatgttagtaacagaatgttctactttttgtcccaggaattctggaatttatcagcttggctgtggggctgatcagcatcaggggagtggactctggcctgtacctaggaatgaatgagcgaggagagctctatggatcggtaagttccaacctttctatttatcagaggctatgaccaccaatgtttggacagcctgaagcaaaggataaaattgtttatcaagcacttgagagcccttttatgactgtaaaggaccggagtcttcttgttccaggctgttcagggccttgctccattatactgcttcacttgttcagccctccatccaaacaaggttttctgggatatgtttgctttcacattttccattagaggtcc

SEQ ID NO: 2984 - DNA, 1000 bp, mus musculus
ttgacgctaccaattggaaggcagtgggaatagcggagggtacatacacaattaagacagtccctcccctcctccaaatctaatggctgccaatagttcagacgtaaaagtaggggtctgtgatccctctctgcttcctcgactgactggtgatagcactggtctgccgtgcactcaatgcatgtaactacagaggttaatagttacagcagtggtatcgagtgtagtgaatggtgtttcattcccctttaccttttcccaactctttacattggtccaggtccctcttctaccattttctgcattttaggcagccacaagtctcttcctcgaccactattcactgtagaggaggacagactaatttttcagtaccatttcatcttcagtgtggctgaaatctgtgaacatgaccaagatgaatgcacacatgtgcaggctgattctacacttgctgttgtaggttactccaaaggatcactaacacagaattatttcttcattttattttgttttgcttttgaacagggtttcatgtatccccaagctttccttgaatttactatgtagccgagggtggctctgaatttctgatccttctgattccatctgggattacagccatgtgccaccatacccggatttcaaggcaatgttgtgaggctaataaaacaactttgccaactaaacaccaaagctgaaacatacaagcttcaaaataactggcagggtattttcagttgggtgggcgttacaggaggaggcataccatttacttacaaaatgtgtaccctgtaaggggattcagctgtgagaaaataatctaaagaattcaacaaaatacagaaggctcaaagccttgtattctgtccctgagcaggaaaaaaacaaaacaaaacaaaacaaaacaaaacaaaaaaaaaaagctgcaggcctcaagcaagactagcatatcgctagggcttctattctacatagtcttgaacttggttttaggttt

SEQ ID NO: 2985 - DNA, 1200 bp, mus musculus
aggactttttctgtgagttccaggccagcttggtctacatagagagttcctggtcagccaggactaaatagagaggccgtgtctcaactcccccacaaaaattccaaaaaaaaaaaccaataaaggtaaaaccaattaatgtaggtaataggagacagaatgtgaaaaatttgaagggactgtaattggaagtgagacactagatccaatcctctggagttttagcaccattttgatgctggtgccttatgtaaggtcggtgtctcagctctcctttgtagagtccgaaacctttgtccaaagagttaacctccctgcttagtaaatactactttatggaagccatcaagcttgaaactacatttcccaaagaccttcctatttcctcgcaggaactaggatgacaatttctataggtcaacccctaaatctcgcgacatctcaccaattctcatttgggctccctgctgaaagccattttgtttttcaggacgctttgcaagggtagctggggtgaatttgcaccaaggcagcagcatagtcgccgcagttccatcttcgtctccgcgatgttgcccttagccaaaaacgcactaagccgtctccaaggtgagcagataatgtgggcgagttctttacaacacccgggatccggctgtcctcgtgctcttctgccctcttcctccgccccaaatcctgcgggttttaattctaggtgcatggtcccctgcgtggtctccagtcactgggaagggaagctagccataacagaggtagctgtgacagtggctttatcatcctgtccttgtgttcctaacctcgttatgcattctctttcttcagagacctatgatttccaggaagaacgctttggcggacaccttgctcttttagcgatgatctaaattttagctctgggagtgtatttacgtagaagaactgatctcctacaataacggtggtaggaaactaaatctaccgcatctggattcatagcaaggggttgaaaaccttaagcctggcagctttgaagaagtcatctgtagattattaacggaatattaactatagcgaaaacaatcatggtcatttttttttcctgctttaaagttaggcaagtacgtggaaacttgagactagcagtatatatggaaaatacactggactggaaagaaaaaaattcatttttgtaattgcttt

SEQ ID NO: 2986 - DNA, 1200 bp, mus musculus
aatatccacataaaagcgtatacatgtacactcaaagccctatatttataacctgccaaattaaagatgggagaatgatctgaatagacaaatctcaaaagaaataggaaaaacaacaatatcaaccaaccagaactcacagagctcccagagactaacccatcaaccaaggaatacacatggctccagctgcatgtgtagcaaaggatggccttgtcaggcctcaatgggaggagaggtccttggtcctatgaaggctccatagatgccctagtgtaggagaatgtgagggcaggaaggtgggaatgggtaggtggattagaggaacaccctcatagaagcaggaggagggaggatgggatagggggtttccaggaagggggaaaccaggaagcagatttacatttgaaatgtaaataaagaaaatatccaataaaaaataaaattaaataaaatgaccaatatgataatttgtcaaggaaactcaaataaaaatacaatgagatattttactctagttatagtatctattagaagaataacaaaagaagtaacaagtcttactcagacggatgcagatacccacagtcaaacagtaaatggagtttggggactcttgtggaagaataggaggaaggattatggtccctaaggagatagtaactccacaggaagaccaatagagtcaactaacctggacccttggggctctcagaaactgaaccaccaaccaaaaagatacatggggtgggcctaggcttctccacacatatgtagcagatgtgcagcttggctttcatgtaggttctgaacaactggaatggggttatcccaaaagctgttgcctgtgggtgggatatgctcttctagctgggctgccttgtttggtctcagtgggaaagtatatgcttagccttgaagagacttgatacaccagggtgggggagtacccagtgggacccaaccactcagagaaggggaaggagtataggggaaataagtgtgggaaggagtgactgagagaggggaagtgagtgggatgtaaaataaataagtaaaataataataataataataataataataacagttttttgaataaaaaccataaaggttatttgacctactataaaaaataagaagtaagaaatctcagtcaaggtgcagaaaaagggaagagtttattattactatattttt

SEQ ID NO: 2987 - DNA, 1200 bp, mus musculus
ttctatttcttctgaattatccagttttatttctccatctgaaagatagctttggatgatatagtgttcttagttcacagttgtttacttttagatcttgaaacatttcattacatactcctggcttttatggttgttgactaaaagtctgaggtaaatatgatatttctttcaatgggatatgtaggggtgatagtagtctaatcttgcttcctagtatctcaccagaataacaattcagaaaagtgctgatttctgtagatcttgctgtacccaagagggaggagatgttgactcaagtcattttaaaacaacattctctccctggtttatatttctgtgtttgcctcacagaaactgaaatatcatgactgactggtaaaacatgttccagtgaaagaaaaattgtaaatagagaggcacgtattaaaaaattataggaagagtgcattgggtaaccatgcctatggattttgcaggaccagagatcacctagtatgcagatctcaggccagtggtcccagaggtcagtacaggttctgaatgttggccctagtgtccccagggtctcctgagagactggatctttcattccagaggtatctgttgtcaaagtctgtgtgaggttttgaagtctgaggtactaaattctgtatttttgtggtcctagaggttagtttggttctgtagttataacaccataataaaaaggcttaactgggtcaaaaatttattattcagtatctagaatgttcatagattctatgggtgaccaagattttgactccatcttgcagcttagtgtcgagaaccacccttagtcctgttggcacattgcctagactggatcacttcagcaactcattggtaatcaacaccatgtcttaccagtgctctcagctagacagcacatcagtattcctctaagaatcatagaaaccagaatcttccaattgtctctaaaaaaagaaaaagaagttgtcaaaacacacctacttcaacagatgtgtaaaatatgacaaagcaacacaaaacatatggcacaagcaccacatacaattcagcaccaactaatcagctcatttataagggaatccaaaatatcacagaaatagccaaaatgtctgaaaacaaaacttaggttctttgtgttagaagcaattagtgatcatgtagaagaacaaaaagatgctctaatta

SEQ ID NO: 2988 - DNA, 1000 bp, mus musculus
ttaattaagtcattgaagagttacattcttttcaagagacatggtatcttgccttttcatgcttcttgtatttctgtattacaacatgcaatatgcttgtttgaataaattccagttttatatggtgaactttttttttttttgagacagggtttctctgtatagccctggctatcctggaactcactttgtagaccaggctggcctcgaactcagaaatccgcctgcctctgcctcccgagtgctgggattaaaggcatgcgccaccacgcccggctggtgaacttcttattaaatagctctctgttgaggactcaataaccagtaatacttggagaattaaaagcaaactacagtaacagcacaaatatcaagctgtataaaactcagaaataaacttaaataaaatcatgaacatatcaccaatttaccacaaactcgcaaacataaagactaatgtaagcccttcctgccagtcttttctgctgggacagactgctagttagtctgctcccctgaagacatcacatcctgaggcttcccaagagatccactacactcagggcaactgacaccacagcctgaaggcatcccaggagtttctctgaacacagggaaacagaaaccacagtttgtagacctccttggaggatggcttcacattggacaacagcttgactgctcctttgaaaacacaacagtctgaaggccttccaggagatcagctgcagccaaggcaactgatcagcagcttctctgcacctctcaggaaacaacagttggaaggacccacaggaggtctgctatagccagagccacaggcctaccaggagacctgaagcaatccagggacaaaagaagcagactccagagtcactcagcccagcaaacaccagagataaccagatggtgaaaggcaaatacaaaacataagcaacagaagccaatatatgtggccattatcagaatccagttctctcaccacagcaaaccttgaata

SEQ ID NO: 2989 - DNA, 1000 bp, mus musculus
tttcaggtctagacaatatttctgcattgaaaaaataaacacagggctctgaccctaggactcagtggagatcaccattttctctcaggtgactctctaaggcaggtccactcaggagcacacaggccacagaagcagcagagcatctgggacagggtcctgtgggcctacatctgcagccaggaggtgcagctgatcctcagttctctgtgcacctttcctgccagaggagagcttgcttccaaggagtgcttggactctgggactcagaggagatcacctttttctctcaggtgactctctaaggtgagttcactcaggagcacacaggccacagaagcaacagaggagctgggacagggtcctactggcttacatctaaacgctgggggtgggactgttctgtagccctgtatgcactggtcttgccaggagagagctggtctccaaggagtgctgacaaaagtgttcagacccacagggcggacaagcacaagccacagagagcaagaccaactaacaccagagactaccagatggcaaaaggcaaatgcaagaatcttaccaacagaaaccaagacaacttggcatcatcagaacacaggactcccaccacaggaagtcctggatgtcccaacacactggaaaagcaaaatttggatttaaaattatatctcatgatgctggtagaggattttaagaaggacattaataactcccttaaagaaatacaggaaaatacaggtaaacaggtagaagcccttaaagaggaaacaaaaaaatctcttaaagaattacaggaaaatgcatccaaataggtgaaggaattgaacaaaaccattgaggatataaaaatgcaagtagaaacaataaaaaaaatcataaggggaggtaattctggagacagaaaactaggaaagaaatcgggagctatagatgcaagcataacaaacagaacacaagagatagaagagagaatctcagatacagaatattccat

SEQ ID NO: 2990 - DNA, 1000 bp, mus musculus
ggaaggaggttctatgtatagtgacctgaataggaggatttcagaaccccattcatctagggacactggacaggggtggtagaggtaagtaacgtcggggaggcaattggacctattatgtattataaattgtcctgagttgttttctgttccatgtaagatgcataaatgtctcatttagacatcctgtcaaaacaatattgtcttcttctgaaaaaaatattttaaaattaagaatgcattataaagtaataaatttgtgtgatgtttgtctattgtaaatctggaataaaaaacttaaacagtggtaaagttgaaaagtattaaataaataggccattgtcattcactgaagtctaggtaatagccattttctcaaggaaaaactcatttatcaaaacgtctcatagagtactcttttctggacatttgtgttcctcaagaatatgtttgaacatatgtgattttacatgagtgtatgtaagttgaagaagaattttaaaattatctaactatcccttagccaccatttgaatgtttttttatagcaacaccttgtgcttagatcaaataataggagagaacagttagaaagctcacgaatcaatgatttgtttatacaactcttgtaaagtctaattactcccaaagtaaaacgtgagcttccattaaagagagacagtatagcaaagtactggcaaagtactgtttgtcataaaacctgtcaaaattcaccataattaaaattctaagctgtgtatgtgtcctttaatgaaaatccttctctctatgtctctatatctgtctctctatagccatctctgccatttcttcttgtcctcctctttccctccacctcttctattctccactcactccatctttctccaaatactatgttctttatataacacttactttagtagttgttatttttttcctgctacatgtaacagcttttgatttccaaacattaggttaagtttgtcttaagaattac

SEQ ID NO: 2991 - DNA, 1600 bp, mus musculus
gtcttttccttgtgtcctggatttcctggatgctttgatttaggatctttttgcattttgcattttctttgttgtgcccatgctctctatggaatcttctctacctgaggttctctcttccatctcctgtattctgttgctgatgcttgcatctatgtttccagatttctttcctagggtttctagctccagcgttgcctcacgttggtttttttgttttgttttgttttttttgttgttgttgttttttgggtttttttgttgttttggtttggttttttttttgttttgttttgttttattgtttctacttccctttttaggtcttgtatggttttgttcaattccatcacctttttggttgtgttttcctgtttttctttaaggacatgtacctctttatcagtgttctcctgtatttcattaagtgagttattaaagtccttcttgatgtcctctaccatcatcatgagatatgattttaattccggttctagcttttcgggtgtgttggggtatccaggactagctgaggtggtagtgctggttctgatgatgctgagtggttttgctttctgttagtaagattcttatgtttgcctttaaccatgtggtaatttctggagttagttgttatagttgtttctggttagagcttgttcctcccatgaatctgttagcctctatcaaccgacctgggagactagatctctcctgagttttagtggtcagagtactctctgcaggcaagctctcctcttgcagggaaggtgcacagatatctggcgttcagacctgcctcctggcagaagatgaaggcctgaaacagggcctgtaccagaagctgtgtatcttttgtagttggcactctcacctacacagtctagtctctgagagatcctggaccagagatggctcccccaggtgctctggcaaagccctcctgggtggggtggacacttctcctctggcagataaggtgcccagatgtctggagcttgaaacggggactgccccagaagctgtgtggcttctgcctgtcccagaagctgttagcttctgtagtccacactctcacctgtgcagattctacataaatttaaattatgtgtttgaatgtgtacatgtgtgtatgggtgcccactagttctgaagagtttatcagatttccaaagctggagccacagacaattatgatcaattcattttgggtgctggaacaaaattccaatcttctacaatagtacatgcttttaactgctaagcagtctctcaagccctacaccctcacatcgtaattcttataataattaatctaaacagttactcaacttggctatcaggtgttgtacaccttgttgatccagcatcttgacttcctcttgcccctgcctactgttcacttactttcatctatgataatgattctatcaagactgtttagacaatctcaacttggctatcaagtgttgtagaccttgttgatccagcatcttgacttcctcttgcccctacctactgttcacttactttcatctatgataatgattctatcaagactgtttagatgatttttatttatgtgtcttcaactttaatc

SEQ ID NO: 2992 - DNA, 1200 bp, mus musculus
tttttattctgagatgttattgctttttgtcttttctatagtatttttatcttttatgcccataattagaaggctaggtcttttcttgctgtccccatgttctcttaatgtacttttaaattatcattaacaaagctttgcctagttatccaaaccctctgcattgtctttcttcctgactctctgttttccccataatccatgaatttgttgatgctgttcaccagagtttttatttttttttcttttttttcttttttttcaatttttattaggtttttagctcatttacatttcaccagagtttttaaatagctttttgcatttttcatatccaaccacattatagttggatttttcttcagaaattcaaattcttattcaattcaatctttatatcttagattaattcccatatctcatccaggttttctgttctctttgagtgtgtttatgttttcattgagttgtttgaacatgactatcaagtttaactttaattatatgcctggaaatttttccaggtcattctcatagaaggccactgtttggagatttgtactatttggaagagatattgatattttgatttttatattttctttatatgtggtatttgtgcatcagaaattagttgggtgagaggaagctttggacaaaacctgagttttatgtgataatataggagctaggattatgaaaaatgtataactttgtaggccagtggctggagattgaggaccccttacctgctggtgccagaagttaggggttggtagaattgagggctaagagtgcaacagacatatgatgcagttttttatacatgttagtatatgtgtagatgcatgtgtgaatgtatatgaagagaaggcatgtgcatggtatggtgctcatatggaggtcagaatatgactttggatgtttgattatctcctttccaccatagagcctgggaataaatcttatcttacccagctttcaaagcaaggtcttctgtcttaccagcccaatatcccattaaattaagtcaggtgaatttcaattagcaagaagaatgttcctggataatattgaaaataattatttgaaaaatatccatctctagaagtagcccaaatgacataaaacaaaggaagaaaatcattcaacaaaattgacttaaactgaataaaaataacaagaatctgagccttaccc

SEQ ID NO: 2993 - DNA, 1000 bp, mus musculus
aatatataaaataaatgcttatattctaaatttatatttcatatatgaaaggaaacaatgaaatatatttctgaatctgacttatcttaactattatctccagtgtggtgcattgagctatgcacagacagccatttgagggtagatattgaacccagtggtgataattcacctacatgggattgaaggagttctctcatgtctcctggaccctggctcctgtggaagttactgctcccctcagcccccacaagagaagcatggttagtagtcatgtaggcaatgtcccaaacttctgaccttcaggctagactcctccccagttacctagcaacagtaaagatcataagaggggctgtttggcccctcctcactctcttgcccttactcttcttactctcctctcttttctcctctcactcctttcctctctctccctcttcctctctagcctttcttctctctctctctctctctctctctctctctctctctctctctctctctcttcccctttctctcctcttggccattgccagtctctctctcccttttctaccttcttttctttctccctgcctttctacaataaagctctaaaaccatagactgtctctgttcatcaaggcctgctgcacagactttcacctgtgtgggaacctctctccctaagccctttctcctataacctcagggagcagggtgttgccccggggccccctagtttcgggggctgcccctgaagcctcatccctcaccccctgttgcatggggtcagtggcttagatgcccacccggggccaagttgaaattgtctggcagccctcccatgtctgcctgcccagagcataggaggaactctggcctggagtgagatatacttccccttcccctccttctcctatacccctttttgttcccacactccagttgcattcatttccttgaaaatatgatttaatttttatcagaatgaatcttcatatacattatacattat

SEQ ID NO: 2994 - DNA, 1000 bp, mus musculus
tttgttttctttagaattttggttttattcctttcagtatgttttcttttactattattataattttctgttagcataatttttcttacctaacctgattatcctgtgtgtgtgtgtgtgtgtgtgagagagagagagagagagagagagagagagagagagagagagagagagagaaattaattcactgagaattggtatgaagatagttttgaattaattatctggtaattcatttatctccgtactttaatgcaggggaggggggaggggggaagagaggagtgggagagaacccgcatcccgccagagttcccgtgctctgggcagacagatggacgcaggaggactgcacatactttccacatggccccaggtgggcgggtgtctggctgtgttaagccactggttctcagcctctggcatcctatgctggaaaaggcggaggagctgagaacagaatagaggccccagggcagcacacggccccagggatgaaaggaggagagggcagggagagaggtggcactgaatggttcccagtgggcgagagtccttggtcaggtccatggctggagcacaggatggccttctggcgggaggttaaacacagctcattagcccatcgttcaagcatgacaggccttaatgatcagagacagtctatggttttagagctttattgtagaaaggcagggagaaagaaagaaggtagaaagagagaggctggccatggccacatggagagagggggaacagagagagaaaaggagagctagagagtaagaaaggtgagagcttaagagagctaggaggagccaaacatcccctcttagctgggctatcaggctcttgccccgtaactgtggggaggagcatacctgactacagtcaggtaactggagtctagccagaatgccagaagcttgggacattgcatgactgatagtcacagaattatggacaggcacctgattctgggaacatggctcgactttcc

SEQ ID NO: 2995 - DNA, 1200 bp, mus musculus
gcttacacctatgtctcctgatcactttccaaagttttctaactccaggattgtctccctctgtgatttctttattgtttatatttccattattagatcttggatggttttgttcaatttattcacctgttataatgtgttctcctgtatttctttaatggatttatgtgttttctttttaagggcttctactcttttacttgtgttctcctgtatttctttaagggagttatttatgtccttcttaaagtcctctatcaccatcacgagaagtgatttttggtccgaatcttgattttctggtgtggtggcatatctagaacttgaaatggggagagaattgggttctgatgatgccaagtaacctttgtttctgttgcttctgttcttatgcttgcctactgccatctgattatctctagtgatacctgacctcactatatctgactggagcctgtccttcctatgatcctggttgtgtcagaactcctgatcaaagttcagctgtctctgtgatcctgagatcccaggtgtgtcagagttcctgggaataaagttgcctctgggaccttgagatcctgttgtgaccaagctcctgggatcctgtgatcctaggatcctggatttgttagagggcctgggattgagtcttcctctgagtattttgggacttactgtagagtttgggcccaatgtctgctcaggactctggcccagactggaaggaacctgtatcactggtcaggcagggttcctacctccctgggtctcactggtcccagttactcatggtggtgttgggacagatgttatgtccacctcttgaagcagcttcttaaggagttctgatcctgtgtctggaactcagtgaccagtacagtcatagcaaaatcattctgtagtccaactcccaataatggtcagcagcagctctgaatggaagttcaaggatctagcaatttctcagtcacacaaggcaagccggcaaagaagagagagtcaaccttttctaatcttatgtgaagacgttttgtggtttctattcttgagttcctagtgttggtgagagtacaggcttcatgttgtagtaagatgagatgtgacagttccacctagtttttatctcttgtcttgcaatttctggtacactatgtctttattctctgcagcctggcagctatgttcttgacatttttacta

SEQ ID NO: 2996 - DNA, 1000 bp, mus musculus
taaaacaagatgatgatatgggtaagaagatagtgtcttatatctgggtctgatgacctgagttcaactcctggaacccacatggttaaaaaagaaaaccaattactgcaaattgtcctctgacttccatatatgcactgtggcatgtgcatgtccatatgtagccttccccagcctgaagtgagcttgtgcagaccttgttgccactgaggtggggccaccagtgatgtagctttctgacttggctggtttcttttgttgtatcaactgctgctgtgcttcactgatatcctgctgcctgatgagacacctttgagacaatccaccacattgctggagtcttcgggctggatccagatgcctggatggactggcagggggatgggcctatcccctatataagcttagactctaagtaaactttaaggtgccttgaacagagtacatttgtcttgacgtctttatttctctccccgtctagtctctttcagccgcagcctgcctttcaggagtacccagttcctgtaggctgcgggcagcttacaacttacatccatacacatatacacacaaataaaataaaataaaataaaataaaataaaatcaggaaaaggaatacatgtggacaaatatacgttattattgattatagaaaaaatcaaaatggttgatgttcaattgacatatacaacaagtagcaagaatagtcactatgttcagatggaaaaatacatacatgtatacaaacatacaccacatataggcatgtatgtacatatatgatcaatacagatatttaaaaacaagttgtaattaaatttgaacatcagacaaactattttgtttttccattaatttatttacttactcactttacatcccaatagctaacacaatctctccccacgtcccctcctcttctctgagaagggtggacgcccccccagccccgagtatcaccccacccactataaaatttttaagtgcctatacatccta

SEQ ID NO: 2997 - DNA, 1400 bp, mus musculus
gaaatgattgacaacatcttctcaatgacattatctcaaccctgggacacctcctagggatagaaaatgtgaggcataggcagaagcagcaatgatccctttacacactgctttatttgagtttcacttgaactgtatccttccctgcaattctgtagtagctctcatgtttttcctttcacaaagcaccctgtgattcttgcaatatctaaatcttccttattgcattgggttagttaacctaattttctgagactacagccttattatgaatagtttggggctaaaacaccattcataaatgttttccattggtgcaggtaactgaatgttcttcaacctctaaggacactaagtacatggtttcctaggccacattcacattagggcacaggtgtccacccggccggggagggctttgctgagcatcttcgggagacatcttggatcccagactccaccgagactactctgcacaggtgagagtgtgaactacagaaactaacagcttccaagacaggcgggagccacagagatactgaggcaaccacgtttttggactccagatatccgggcatcttccctgccagaggataggtgtatgcccgtcccgggagggctttccctgagcatcttcaggagacatcttggatcccggactccaccaagactactctgcacaggtaagagtgtggactacagaagctaacagcttctggggacaggtcctgcctgtttcaggccttcatcttctgccagcaggcaattcagaacaccagatatctatgcaccttccctgaaagaggaaagcctgcctagagagagtgctctgaccactgaaactcaggagagagctattctccccagtctgctggtggagaataacagaatcatgagaggaacaagctctaaccagagacaactataacaactgactccaggctttaccagatggcaaaaggcacaagtaagaatcttactaacaaaaaacaagaccactcaccattatcagaacccagtactcccacctcagccagtacagggcaccccaacacacccaaaaacctggacccggatttaaaagcatatctcatgatgatggcagaagatatcaagaaggactttaataactcacttaaagaaatacaggagaacactgctaaagagttgcaagtccttatagaaaaacagaaaaacacatccaaacagatgatggaaatgaataaaaccatactagacctaaaaagcaaagtagacacaataaagaaaacccaaagtgaggcaatgctggagatagaaaacctaggaaagaaatctataaccatagatgcaagcatcagcaacagaatacaagagatggaagagagaatctaagttgcagaagattctatagagaacat

SEQ ID NO: 2998 - DNA, 1000 bp, mus musculus
tggacatagtactaagggaggatcccacaatacctctcctgggcatatatctagaagatgctccaactggtaagaaggacacatgctctactatgttcatagcagccttatttataatagccagaagctggaaagaacccagatgcccctcaacagaggaatggatacagaaattgtggtacatttacacaatggagtactactcagctattaaaaagtatgaatttatgaaattcctaggcaaatggatggacctggagagcatcatcctgagtgaggtaacacaatcacaaaagaactcaaatgatatatactcactgataagtggatgctcacagtcagctattggatggatcaaaggccccccaatggaggagatagagaaagtaaccaaggagctaaagagatctgcaaccctgtaggtgcaacaacattatgaactaaccagtaccccagagctcttgactctagctgcatatgtatcaaaagatggcctagtaagccatcactggaaagagaggcccattggacatacaaactttatatgccccagtacagtggaacgccagggccaaaaagtgggaatgggtttgtaggggagtgggggggacggtatgggggacttttgggatagcattggaaatgtaattgaggaaaatacgtaataaaaaatatattaaaaaaaaaagaagtaacatcctgtatggataatgtgatggtttgaataggcttggcccagggaaaggcactattaggtcaggccttattggagtaggtgtgtcactgtggtcttgggctttaagatcctagtcctagctccctggaagccaatcttcttctgtctgcctttggatgaagatgtagaactctcacctcctcttgcaccatttctgcctggatccttctgggcttccaccttgatgataatggactgaacctttgcaccagtaagctacccccaattaaacgatgtctttttaagagttgccttggttgtggt

SEQ ID NO: 2999 - DNA, 1200 bp, mus musculus
ttcaagccccattttcattgctgcttagatattttaggatgaagtctactttttttttagttggatattttatttatttacatttcaagtgttattccctttctccgtttcttttctgcaaaccccctattccaacccccttaccctatttctatgagggtgctctcccacccacccactcctgcctcactgtcctagcattcctctacactggggcatcaagcctacacaggaccaagggtatccccttccactgatgccagataaggccccttcagctccttcactgcttcccctaactcctccattggttccctgtgttcaggctgatgtttggttgctagcattacatctgcatctgtattggtcaggatctgacagagcctctcaggagacagctaaatcaggctcctatcagcaactacttcttggcatcagcaatagtgtctgggtttggtgactgtatatgggatggatccccaggtagggcagattctggatggccttttcttcagtctctgttccacagaagcatccactctttgctcttcctcttgagcttcttgtggtctatgaattgtatcttgggtattccgaactttttcccctaatatccacttatctgtgatgaggaagaatggagaaatgagcaattctttatctggtcactataaaactaatttactagtgagccaataatgtttttaaacatgtgactcctttaaaggcattgggaagtaatagacaagtcaaaggactaagagcttctgtttccctcttgaatggagtaggaattgaaaaaataattcttgctttgtaaaagaatgttaattcctaacagaggtaattcagcctggacactgtgcaggatgtcacaaactctatgactatttagtatgtgtaaatgtgtgtctttgaaccacagatttttttggaaaaaaaataattgcctagcaaagatatggatagactgaatcttccatgtacatattgaaaggaagagggtctccatatgctccctaattctactccttttgagatgtcaacatttgtgaacatactggaaggatttttgcataagtaataccaggagttcaactacccaagaagccaaataacctcctggaaatgaaatcttagggaagcaaataatgcagaattcagggtgtgttcaacgataaataggtcagttccattaaa

SEQ ID NO: 3000 - DNA, 1000 bp, mus musculus
agatttttcctcttgtgattctgttagcctctatcagaagagctgggagactagatctctctgctgaatttcagtggtcagagcactctatgcaggcaagatctcctcttacagggaaggttcacagatatctggcgttcggacctccctcctggcagaagatgaaggcccaaaacaggacctgtcctagaagctgtgtgtattctgcctgtcccagaagctgttagcttctgtaatccacactctcacctgtgcagactacactcctcggagtcccggaaccaatatgtctgccactaatgctcaggtaaagccctctagggccgggcggacacctatcctctggccaggaaggtgcccagatgtctggggcctgaaaagggggctgcctcagaagcgctgtggctcccgcctttcccagaagttgttaggttctgtagtccacactcttacctgtgcagactactctaggcagagtccctgaaccaagatgtctgccaaggccttgcttttcgccatctggatatccctggtgtttgttggtctgggtaactttctggagtctgcttcttttgtccctgggttgcttcaggtctcccagtaggtctgtgcccctggctgtttgagaccacctgtggggcctttcaattaggggctcttcacagggtcagagaagctgcttatctgtttccctgacagcagtagatctcctgggaggacttcagactcttggatcttcagtggaatagtcaaggtgttgtccaagtggtccaagtacaacttatcctcaactgctctgagtgcagagggtcttcaactgattcactgcactgaatgcagtgtgttctcaattgctgtgtgcatcgggttctctaggatggatcaagatatgagattttatcgaaaggacgcagatgtagctgtctcttgtgagactatgccggggcctagcaaacacagaagtggatgctcacagtcagctaatggatggatcacaggg

SEQ ID NO: 3001 - DNA, 1000 bp, mus musculus
agtgatttaccattatgaaggcttcttctggcggtgctggttttttggtgatgatccacaaacttcagtttggagatattggtttagtgagtataagatattttgtgatgtgtgtattaaaagtaagtcctgagacaaaaggatggaccatcaagagactgccatatccagggatccatcataattagcctccaaacgatgacaccattgcatacactagcaagcacttggtgcaaggaccatgatatagccgtctcttgagagactaggccggggcctaacaaacacagaagtggatgcttacagtcaactattggatggatcacagggcccccaatggaggagctagagaaaatatccaaggagctaaagagatctgcaaccccgtacttgcaacattatgaactaaccagtaccccggagctcttgaatctagatgcatatgtatcactggaaagagaggcccactggacaggcaaactttatatgccccagtacaggggaacaccagggccaaaaatggggatgggtgggtaggggagtgggggggggagggtttgggagacttttgggatagcattggaaatgtaattgaggaaaatacgtaataaaaaaataagagaaaaaaagagtaagtccttatctcagcttcaaaattaatctcttacatagaaattgaaggagatgctttacagtaacaatatatgtatataataaaactctcagatttggaaggcaatactatttttttttgtttgttttaatgtgtatatggtttgccccgttcatttatggccctggactttaacccatcatcactttatacatgctaagcaaacacttaacaactgccttagtcgaggtttctattcctgcacaaacatcatgaccaagaagcaagttggggaggaaagggtttatttggcttacacttccatactgctgttcatcaccaaaggaagtcagcactgaaactcaagcagatcagaaagcaggagct

SEQ ID NO: 3002 - DNA, 1800 bp, mus musculus
ccatgagagggagagcagtcaggcaaagatcaaaaacttccttcttccatatattttatataagctaccagtagaacatgcagtcaaaattaatggtggaacattaatccaggatctgaatttgaattaaaggggtatcttgcaaccacaagagatcaagtgtataagtaagtcttcttaactacagatgatagctgtctcttgtgagactaggccggggcctagcaaacacagaagtggatactcacagtcagctattgaatggagcacagggcacccaatggaggagctagagaaagtatgcaaggagctaaagagatctgcaaccctgtaggtgcaacaacattatgaactaaccagtacctcggagctcttgactctagctgcatatgtatcaaaagatggcctagttggcaatcactggaaagagaggcctattggacacgcaaactttatatgccccagtacagaggaaagccagggccaaaaaaaaaaaaaaaaaaaaaaaaaaaaagatgggaatgggtgtgtagggaagtgggggggggggcgagggtatgggggacttttgggatagcattctaaatgtaattgaggaaaatacgtaataataaaaaatattaaaaaaaagaaggaaccggaaaaaaaaagaatgctcaatatccctgattagatataaaaacatttcaacgtggaaaaaaaaaagaataaaatttcctccaggaatacccagtcacatgggttttagtttagtccagacatagtcaaggtaacagccaagaatagctatcactgccacagcctctgggggagccatcttggtttcaggattctgcctaaactagtctgcacaggggagagtgtggactacagaagccaacagcttctgggacaggcagaagccacagagcttctggggcagactgtgtttcaggctccagacatatgggcaccttccctgctgaggagaggtgcctgtcccgcccaggagggctttaccacagcatctgggggagccatcttgggttctcaaattctgccaagactggtctgagcaggtgagagtgtggactgtagaagccaacagattctggaacaggcagaagccacagagcttctgagacagaccgcatttcgagccaaagacatctgggcaacttccctgccagtggagaggtgtccgctccgccgaggagggctttaccacagcatctgggggagacatcttggttcctggatcccgcctagactactctgcacaggtgagagtgtggactacagaagctacacagattctggaacaagccctgtttcaggccttcatcttctgccaggagacaggtccaaatactagatatctgtccaccttccctgcaagaggagagcttgcctgcagagagtgctctaaccactgaaactcaggagagagctagtcttccaggtctgccgatagaggctaacagaatcacaagaggaacaagctgtaacagagacaactataacaactaactctagagattaccagattgtgaaaggcaaatgtaagaatcttactaacaaaaacaaagaccactcaccatcagcagaacccagcactcccacctcaggcagacctgggtacctcaacacaaccaaaaagctagacccagatttaaaagcatatctcatgatgatggtagaggacatcaagaaggactttaataactcacttaaagaaatacaggcgaacacagctaaagaggtataagtccttaaagaaaaacaggaaaccacaaccaaacaggtagaagtccttaaaga

SEQ ID NO: 3003 - DNA, 1200 bp, mus musculus
gatactggttgacacaggccaggctcacctcttcaacatcagctgtgagtaatgcatagattcaaaagcagaggatgtggagcaaggaagggtcaataatgttaaacttaaaaataaataaagaaagaactacagtaaatattgcctcatcattgtctcatcttacatcattacttgcattttttggaaaattactttgcttctttcctaggcttgtttatgaatagatatgtgtggggctgtgtgtatagaggaagagggggagggagagagcccatgtctggctagagttcctgtactctgggcaggaagacatggggggactgcctggtgctttccactcagcccggggtgggcatctggctgtatgaagatactgatcacacacggcgggggatggacaagaggcagcccccaataccaggttctcagtctctggcatcccatgctggatatggcagaggaggtgagaacagaatagaggtcctgaggatacaggaagagggcagaaggagagaggttcccacacaagtgggagtccttagtctgggccttgatgaacagagacagtctatggttttagagctttattgtagaaagtcagtgggaaagagagaagataaaagaaaaagaaaggccagccatggccaagaggagaaaaagggaaagggaaagagagaatgagagttagagagtaagaaaggtaaaggcttagagaaaaagaggtaaaagcttagagagtaagagagagcaagagggagagagcaacatgggactaagcagaccctcttatagtgggcttgttatcttgctgttgctaggtaactgggaggagtctagcctaaaggccagaagcttgggacattgtctatgtctatgtgactactagccacacttttcctgtgggggctttgggggcggtaactttgacaggagccaggggtccaggagacatgagggaacaccttctgccccatgtaggtgaaaattatcaccaccgggttcactgagactccacctttcaactcgaatggagacaaagctgtctgtggatagctatctgtgcatatacacagatatgtgtaaatgatctaaatcatgtaatgtctacttaactgaaatatctacagtttcttttcttattaagtacctttctaaacatacacacaaagacattaaatttgtcacatagtgaatatt

SEQ ID NO: 3004 - DNA, 1200 bp, mus musculus
tgagattctcttttctatatcttgtattctgttggtgatgcttgcatctatggttcctgattactttcctaggttctctgtctagagatttgtctccatttatgattcctttattgtttctacttccaattttagatcctggatggttttgttcaattccttcacctatttggctgtgtttttctgtatttcttaattgtgttctcctgtaattctttaatgaatttttgtgtttcttctttaagggctgctacctgtttacctatgttgtcctgtatttccttaaaagagttatttatgtccttcttaaaatcccctatcagcatcatgggatatgattttaaatccacatcttgcttttctggtgtgttgggtaaccaagacttgttgtgttgggagtactaggttctgatggtgccatgttgccttggtttctgttggtaatattcttaagtttgcctttcaccatctggtaatctctggtattaatgttcttgctgtctctggtttgagcttgttccacttatgggtctgtaagcctctgtcagcactcctgggatatcagctctctcctggcaagatcagtgcacagaggactgctgaacagccccacctgggtgcagatggaggcagtaagggccatgtctcagctgctctgcagcctctgtggcctatatgttcctgtctggtcttgccttagaaagtcacctgagagatctcccctgagccccggggtcagagcactccctggagacatgtgctcgcctggtaggaacagtgcacagagggctatggaacagccccacctcctgggtgcagatgaaggcaagaaggaccctgcccctatatatacatattcctatttaccatatattacctttctatagtctcttcctgcttcttttgaattccttcgttttcccagccagtttctctttgtgtaattttatttttaaataatccagtcaatttaatttagcatttattgaatcaacttcaaatatgggattttgctgaagtacaacttgagtggctataccattgaaaaaataaaatacttcctccttacagcaaggagtaatctttagtgttatcaaaaagaagggtggggccatatgaagttatctttcatctatatgaaatatacacaggcccaatcttgtgcagaacttgtgtaagtagcacatactgctataactt

SEQ ID NO: 3005 - DNA, 1000 bp, mus musculus
agaggaaaaacttagacactgattagttttctagggtagttaaagggtttgctcaagcaatcacaagtcaggagggagggagggacctaggaggaaaaatggttggagagggagtagaggggacaggggtacctgatctggtattgggtaagggaaaaggactgaagctctgagggacagcagaaagaatggaaacagacaacctctgaaaatacgaggttgggggaaccctccagaatgtaccagagccctgggaggtgagaggctctcaggactcaaagggagggaccttaaattaaatgccttacatttaacttacagaacccacctagaacaggaacacagggcatcaaatgagggatggggttgtcatcccacagtcaaaactctaacccataattgttcctatctgaaagagctacagggatggaaaaggataggagtctgaggaaaagaaggtccaacaacaggcccaaagtaggttccagctcaaggggtggtcccaagttctgacaatactactgaggctatggagcactcacaaaaagggacctatcatgactgcctcccaaagacccaacaagcagctgaaagaatcagatacagatatttgcacccaaccaatggacagaagcaggtgacccctgttgttgaattaatgaaggttgttagacactgagaagaagggcaaacctgtaggaggtccagcagtctcaattaatctggaccccagagatctctgaaacactggatcaccaaacagagagcatgcaccagctgatataaggccaccaacacacatgagtagaggacttctgagtctctgcattcaaagatgatacaccaaaccctcaagagactgtgtatcccagggagtttagaaatcaggtggggtgggggatggggacatctacttggagttaggggtggggaaggaggtatgtgatgtggaacagttgcaaggtggatcaggggaggaataaaatatggagtgtaaaga

SEQ ID NO: 3006 - DNA, 1000 bp, mus musculus
catattttacttatttgcccatatgtatgaagacaattcatttgattatacattttagcatttcagttggtataggaattcttatatatatttgaaactattttatttataatacccaggagtcaagtttttgaagcaaataattattactctaatttttgtggaattttcattattattaagaacatttcacagcactgtctttgaagccacaaagccaataactttctcatttttatatgtcttaataattttaactagatgtaatacccaataaaagggagggagaggctgtagagaccatatccagaagttaggcaaggccccagtttaaggaaaggggccacccactcatctccaaaattttaaaacagaatagttcctgtcttaaagaaataatgggacaaagaatggaacactgactgaaggaaaaagcataaagactgccccacctggggatccatcccatattcagacaccaaacccatacactattgctgatgccaagaagggttgctgacaggagcatgatatagctgtctcctgagatgccctgccagaacctgatcagtacagatgtggacctgatcaatacagatgtggatgcttgcagcctaccattggactgagcacagagaccccaatggaggagttacgggaaggactgaaggagctgaaggggtttgcaaccccactggaagaacaacattatcaacttaccagaccccaagaactcccagggactaaaccacaatccaaagaggatccatggctctacttgcatatgtagcagagaatgtccttatctgacatcaatgggaggggaggctcttggccttgggaaggctccatgccccagtgtagggaaatgccaagacatggaagtgagagtgggtgtgtgggtgggggagcaccctcagagaagcaaggggagggggatgtgatacagggtttgtgaaagtgaaaccctgaaaggagataacagttgaattgtaagtta

SEQ ID NO: 3007 - DNA, 1800 bp, mus musculus
ataagctttctgtatgtttaaaggcatctcttttttaggttgaaaatgttttcttctatgattttgttcgtaatattttctggtccttgtacctggaactcttcaccttcttttatttctattattctttggttaggtattttcattgtacctcagattttctgtatgattgtgtctgaatatttttttttttttagatttaacattttctttgtctgatctatcaatttcttctattgtattttctattcatgagattctttcttccatctcctgtattctattggtgatactttcatctgttgtttctgttttcttctctaggttttccatctccaggattccaccagtttgtgatttctttatttcttttgtttccattttcaggtcttgatgacttttatttatttccttcacctgcttaattattttttcctgtatatctttatattaattcattttctctttaagaacctctacctgtttgattgcattttcctgtatttctttaaggaatttatttgtttcctcttttaaggcctttataatctttataagaccagttttaaggtcattttgttgtatttcaggtaggttaacatatctagagcttgctgtagtaggagagctgggtctggtggtgccatatttctctggcttttgttgactgtattcttattctggcctttggccatgtatgtggttgtccctagtgttggcaggcctggtatttcatatggcagcaggactctgtggtaaaagtagatatggtagtcactgatagcagcaagtctctgcaatttcaggtacagctggctgctcccaaggacaacaggcttccggtgatgcaagcagagctggtcatccctaatagatccaggcctctcatctatggtgatagatgcctcctaggatgtaggcagagctgatagtcccttatgcttgcaggcatcatggatataagatagaggatggaccagaaaatggagcaccaagcagacagggcagttctgctagtcttggcaaggaaccagtgtgcagggtcttggagcttggggatttcacttggttgtcctgggtgacagtggatttctggggaatcaagcagagctgtggctggtagaaaaaatttaatatctgtacatctgacagtcaattaatatccatgatatagtaaaaataaaatcaaagaaaaaagactcagagaaacaaatcatccttttaaaaacatgtattatgcattgaaacatcatctttcaatataagacttgaaaatgcttaagaactaccttaaaaggtgttcaatatatttaccagttgtgatagtttttatatgcttgacccagggagtggcactattaggagatgtggccttgttggagtaagtgtgtcactctgggcatgggctctaggacccttgtcctagctgcctgggagccagtcttctcctagatgccttctgaacatgatgtagaaatctcagctcctccagcccaatgtttgcctagatgataatagattgaacctctgaacctgttagccgctccctattaaatgttgcccttataaaagttgcctttgtcatggtgcctctacacagcactaaaatcctaagacaccaagcaattagggaaactcaaattgaaatggctattagactttacttcacttctgtcagaatggctaagatcatcaatacaaatgataagaaattctgataagaattgctcagtgtctgttgttatatcttttcatttcttattttgtttatttgtatactgtctctctctcttttggttg

SEQ ID NO: 3008 - DNA, 1200 bp, mus musculus
tccaaaggcctgccgtgcagtgtgggcaaaaaaggcatccagagacctgcctgtcaccacatggcatgggtgcaccgaagacacaaagaagcctctctgctgctatggaatgcagcatgggaggagcaaggccttcagagatctgtcggctgccacaccaaatggattggctgaggagggcatgcacagacatgcccaccttgtggcctgtccacatacagggtgcactggttggttttgtgtggcaacttgacacaggctggagttactacagaaaaaaggagcttcagttgagtaaatacctccatgagattcagctgtaaggcattttctcaatcagtgatcaagaggggagggccccttgtaggtggtaacatccctgggctggtggtagtcttgggttctataagaaagcaagatgagcaaggcaggagaagtaagccagtaagtaacatccctccatgacctctgcatcacctcctgcttcctgatctgcttgagttccagtcctgacttcctttggtgatcaacagcagtgtgggaagtataagctgaataaacacttttttcccaacttgcttcttggtcatgatgattgtgcaggaatagaaatcctgactagacacagagccactataatgttcaaatatatagtggacagatgagagagaaagagtggaacagtctaaaaattatgaagagagatggcattggagacttgagaggaatagccttttctaagtagtcagcccagccactataagccatggtgaagtcttagccttagcctgtgctgcttctgaggaccatgtctgggtccttgtccatgcaacatcagatggtctgtttctatgtccatggttcatattaccactggtgaccaggcagacaccactggtctgagcagttgtctgggtccaggtattgtccaagggctgtggagaactggcctcacacctcacaggctgtgacattccattctacctctccctggctatagcacttaggagagctgatgttgtcctctgctggctaaggcactggttcaggcaagtttggcactgctggagagctcacactagtgatgtggatacttatgagctagcaggcctacaaattcagggaatacccaggcccaaatccagggctttgaattagcccacccccaaatctacctcatcgatgaaccgttggatcatg

SEQ ID NO: 3009 - DNA, 1000 bp, mus musculus
ccttagagaaataacaagctcaaggaagaccatggaaaaagtaaaaggtaaaaagcggtcaggtcacagttacaactggccataaaatcagtccttgaacagacacctatcatacccctcctgcttcagtactatcccactctctactcctcttttctgtgaatattcacattattcctatactttatataaacctaatgttttctggactcagggtcgcttgccagcattcaggcagtgtgtgttaggtgggcgaaatgagttcttttgtgagttgcagcaggctttgcaaatcttggggtcatttgggtttcccttggagtcagggcacaacatgggtactattattattgttgttgttgtattgcttcctaatgaagtcaaggagagtagcaggaaggtgacataaatattacctctattagaacatccaaactaataaaattcaaaatcatttcacatcgagaattaatttcctagccaactatttcaatatcttcctctcaatgagggatctaatgatcaatgaagccacttaattcctaaacactccgcttttttattatagaagtgttgactttcataagaagctttggaatgatccagactatataatcaagttgaatcaaataattatttcatcctgaagactaataagacaaataacgtttcattcttgatattcttacgaactttttttcctgggttcattttcatcaacgatattacattttctgaaagataatccctgagtagaagcaattgagagagaactgcccagggatgtttgttgttagatttaggatgctttgatctgactacagttcccacagagggcaatcaagactgacttgtgggtgaatgtttgctgagaccttggatattatttgctttttagatcattgtgactactgcttctaggtttcttggaacttgctagttgataataactgaaaatttatgagtgttcagtgtcaagaatccaatctaactggtctta

SEQ ID NO: 3010 - DNA, 1200 bp, mus musculus
atttatggttcctaatttctttcctaggatttctatctccagagttgtctccctttgtgatttctcattgtttctacttccatttttaggtcttggatgggtttgttcaattctttcatctgtttggtcgtgttttcctgtaactctttaagggatatttgtgtttcctctttaatggcttctagctgtttacctgtgtttttctgtatttctttaagggagttatttatttccttcttaaagtcctccatcatcatcatgagatgtgactttagatccatatcttgcttttctggtgtgatggtgtatacaggacttgctatggtggggagattggttctgatgatgccaagtaaccttggtttctgttgcttctgttcttatgcttgcctcctgccatctgagtatctcaagtgcttgctgccctcaatatatctgattggagcctgtccttcctataatcattgttgattcaggactcctcagagtccagctctctctgtgatcctgtgatcctggtctcctgtgaacctgagattctgggtgtgtcagagttcttcgcaatcaagcttcctctgagaccctgagatcctgatgtgaccaagctcctggtatcctgggatcctggaatcctaagatcctgggtgtgttacaactcctggaagtggtgcctcttctgggaactgtggggctgtctggttggtgtgtttgaaaccaaggcataccagcattgatcagaaggatccagagccactggtcatacagggctcctgtgtccttgctcctgctgtcacaagcctgtcactattggtttggaacagatgttgtgttcccctcaccagtgatcctaaaatcctggccatgctagggtgcctgcagcatgtagagtcctctggggaccttgggacagtctgcagagttttcacccaaggtagcctggagctggcgccaaccagaagggacctgcacccctggtcatgtgggtttcctgagtccctgctgctggcacaggccagtcatgattggtttgaaacagatgttgtgtaccactcaccagtgatcttaaaatcctgagtgtggtagggcacctgtagcgtgaagagtcctctggggaccttgggaaagtagatttctttttagctgttagagtttttcagactaatttctacaatgactgctccagtttgcaatccctccaac

SEQ ID NO: 3011 - DNA, 1200 bp, mus musculus
aagcatggactgtgagttattcttcagaggaacataagaggcttcccaaaacaatattagtttaacaagaaggcccaagtgaggatgctccaatcccacttagaaaggggaacaaaataatcatgggaggcagagggaaggaggaaccagaatggtagaggggagaagaaagtgggggaagggtcaagtatggtgaaagacaagagagaatcccagagggagagcagaatcaatgaaaatatgcagctgtggagcagggtagaggcacagaggaaacttcaagaatgtcctagagaccaggaatattaaagggtcccaggactgagtggagaggaccttagctgaaatgtctaacactgggaagatggaaccttaagagaacacctccggtagatagacaggaccaccagtggagagatggggcaacccactaaccttcaaaatttttgacccagaattgttcctatctaaagaaaatgcagggacaaaaatggagcagaggctgaaggaaaggccatccagagaccaggccagcttgggattcatcccatgcacaggcaccaaaccctgacactactactgataccatgttgtgcttgcatagagtagcctagcatggctgtcctctgagaggctctaccagcagctgactgaaacagatgcagatatttacagtcaactattggactaaggttggtgaaagagtccttatggaagaataaggactgaaggagctgaaggagattgcaatcccataggaagaacaacaatcaactaacctggacccatcagaactcccaaaggctaagtgatcaaacaaagagcatacatgggctggtctgcgcctcctcccacatacacatacttatgtagcagaggactgccttgtctggcctcagtaggagaggatgagaccaatagtgtagagacttgatgccccagggaaggggggcattgtggggcatgggtgagaggtatatgtagtaaggtgtgggtgggtgggtgggtgcctcaggggttgggtgggggagcaccctgtcagagtcaaaagggatggggcaggggggtgaagaactctaggaggggtgactgggaaatggggcaacatttggaatgtaaataaaacaattatttataaaaagaaaaaaaggaagaaaagtcagaaatagatgtacagtaagattcaacaatcttattatt

SEQ ID NO: 3012 - DNA, 1400 bp, mus musculus
atatctatatatacatctacatctatatctatatctatctatatattcctcagtcctgtgcttttactagactcaatttctgggggtgataagtatttagcctattttcaatattgttaattttgctctcaccctttggaaacttctaatattttattgaattaaccatgtgccttcttaactgatattttgggatataagcttaagttatctcttgcatatcaatccagtgaccaaagttcctgaaagattctccatcatctccattaaaatgtccaaatctcttagctctgaatgtaaaggttttgccatttgccttcatcttaaccttcaccatgcattgtgacatattctagcaaaattgctgcacgtgttattgcctctttcccttctcagacatccttgtgtggcttagtatttttcttctctcttttaaattttattttctctttcctcaattctactagcacaaaaggaccttgaagtattggcgaagattgaatggcatcggagttgagctgctcagtcttctgcaaaggaagggaagcttgcaatttctcttcagagttttgtgtttttttcttctggaattgtctaattgtccacatgtttgttcctgggttttaaattactatagcatagtattagaattttttaaacaactgaaaatattttagtgatttggggattgtaacacactatatccttttcttttttttgtttttgtttgtttgtttgtttgttttttcgagacagggtttctctttatagccctggctgtcctggaactcactctgtagaccaggctggcctcaaactcagaaatatgcctgcctctgcctcccgagtgctgggattaaaggcgtgtgctaccatgcccagcaacaattatatcctcttcttaataaattgtccatctaaaaagttgacattacagtctctaccaccattataatgtatattttctgagtatttccagagctagagaaagggtacacttaaacctccacactgactcttctactgtgtgacaaattactcacattcgatgacctgggtcagaggttaaaatatgtggttacatcatttaagtgaaaaaacaaagttgactgacccatcttggccccacttctgggagggggtgtgaaatatgaaacaacagtctttgatcaccagatcacagaccaccccacagacagttcactatggttctgatttctaaattttgtcatatacaaggtaatatttgataaatgattatagaaagagctgcatcatcttgcagtattgtctgcctgcttctacaaatattatcatctaactaattagaaaagattatacatatatatgtattatacatatatatggatcattaagaagctactaaaaattcagtactc

SEQ ID NO: 3013 - DNA, 1400 bp, mus musculus
atgtatttagaacatagtccaaatcgatggcatccattccttacttatttaaagagccttcccttatagaaaaaaaaataattcgaaatggtgtagagctgagatgaaaggatggaccatctagagactgccatatccggggatccatcccataatcagcctccaaacgctgacaccattgcatacactagcaagattttgctgaaaggacccagatatagctgtctcttgtgagactatggcagggcctagcaaacacagaagtggatgctcacagtcagctattggatggatcacagggcccccaatggaggagctagagaaagtaaccaaggagctaaagggatctgcaaccctataagtggaacaacaatatgaactaaccagtaccccccagagctcatgtctctagctgcatatgtatcagaagatggcctagttggccatcagtggaaagagaggcccattggtcatgcaaactttatctgcctcagtacagggaaaccccagggccaagaagtgggagtgggtgggggacttttgggatagcattggaaatgtaaatgaaataaatacctaatttaaaaaaaagaaatggtgtagaacaatataaactaaccagtacccaccagagctcgtgtctctagctgcatatgaatcagaagatggcctagttggccatcactggaaagagaggcccattggtcatgcaaactttatatgcctcagtacaggggaacgccagggccaagaagtgggagtgggtgggtaggggagtgggggggagggtatgggggacttttgggatagcattggaaatgtaaacgaagaaaataccaaataaataaataaataaataaataaataaataaataaataaataaatggtgtagaatcttccagaaattaaaacaaaaatgcttgttgggacctgtaagggatatgaaagtatgtaaaaaataaaattatttttaaatttcaatgctctgtggattaagagaaaagaatttttaaatagcatatcatcacaaaacaagagatgttactataaatgaaacacattagcagtatttactttgaacactaagtacttactaatataaatgttattataggtgccttcttaatatggattaagatatatcaatattttaggaattaagtaatcttagggattcagtacaaatcactgaaaaactgttttttctaaattgtgtccttgttagatcactaccttgatatgccttccatcttatcacaaagtgataaatatagatttttaagaccaatgatttgaaggatgattcttttgtataaacaatacataactataaaaggtaggaaagatgaaattttaagctctatcttctctatataaagattctgtagataaagtggat

SEQ ID NO: 3014 - DNA, 1200 bp, mus musculus
cctaaaatatagtaaataaaggcaatcttaatgaaattgccaaataatagagaaagaaacctaactggccatatcttgtcaacaaattaagtttctggtcttcggtactttactagagttgttggccaaatgagtaccatgggaattctcaaacaaactcagattgttgccataactctaggttgctctcaagtgacagcaatgtctcattgttgaagacaactcctttttttcccctttttctttttgggtttttcaagacagggtttctccgtatagccctgactgtcctgggactcactctgtagaccaggctggccttgaactcagaaatctgcctgcctctgcctcccaagtgctggaattaaaggcatgcgccaccactgcctggctaaagacaactcatacacaattcattgaacatggagaagccaggtgcctacatagagccttcacccctatgtgctaaaagccttggtatttgaagaaactttgcaggctaccaaaagttaaatgtaaaactaatcctgacacaaaccctttgatctacaatatggttctgcctgaaaaatatggtaatatgagggtagcataaagctaattacctctgtgacctaaggcccactccatgagatgaaacccataactgatactccttaagtgaccaagaatctgtggatagcctagagtcccagatgaaagctaaaaattactgttctaaataaataacatagtaataaaatgatccttactggcatttccctatactcatagatcagtgccttgctcagcatcatcagagaagcttcctcctgcaacagatgggaacaaatacagagacacaccccctcttagctagacctgcagaaaaagatagagaagcagagacagaaagagatggagacaaagacacagagacagagacaaaaatagagaggagaccttggaacactcggctctaaattggatgtctccatcaaattcttcccctgaggacttagggaaccctgtaagacgaagaagcacaaaaagtctaagagcaggggagataaaggactctaagaatataagacccactaaatcaacataatcaaagttaatatgaacttacacacatcctgaggcaggatggacagggcctgcatgggtctatactatttcatgtgcatatatattatgactttcagtttagtgtttata

SEQ ID NO: 3015 - DNA, 1000 bp, mus musculus
ggggatatctcgagtttcttctggtctgaacactagcagtatgtgggttaaaaatggggccccacatctggcccagggctcaggcctctgggaaaggcaggatgcggccggctggcaatctttggggtttgagaagctgcaggaccaagatctaggagtgtggaaggtgcagtctggagtccctgcagaactgctggaattgcctcggggtccccgggcctgcacagaggccaaggatgacaggttctcgggctctctgatatcccagatgcctctatatgcctcagaagagctaagaacagagtagggggcctgcgggtaggctctagcccagggccaaggggaaaagggcaggaggaaagaaagagctccagctggttaccaccaggaggagagtcttccttcgccttgatcggcgggctgtgtggctgggagtgcaggccgccttcctgagaggaagacttgcaccattactccagcatggtgggtccagatgagaagaggcagtccatggttttaagtcatttattgtagaaaggcagagagagggagaagagtagagaagtagaggctggccatggccacacggaaagaggagagaagggaatggggagagagcaagagggcaagagtaaaagaggcaggagccagagactaagatagcaaggaggagccaagcagctccttttataatgggctgtatctacctggctgttgccaggtaacagtggggaggatcatgcctggctagttccaggtaactgggagtggagtccagacagcctgcatgactgaaggccacagaattatgagctggtacgtcatgtcaggagcctaatgtggcaaacttcctttgatcccttgcagattaatctgatgggtctcggggtttaaatctagctcgaccagaaaacaggttgcctttcacgatcccacaagagcacactcaattcttatgagatgaatttgaagaagacacagtagtgaaataatcagtcaa

SEQ ID NO: 3016 - DNA, 1200 bp, mus musculus
tttttgagcttttgattctagagaaagactactttgctctggaagaggactttcaatatagcatactgtccgttcccttactgaacttacatgttataccacaaaccaacagacagtatcaaatattttctctaaaccttaatgtattcaacactccttaaggcacattttaaaagaatattgttgagctcatttccacttctcgaatatcctcattcagtaagtcttcctttagggtcaaagtattttcatgttaaaaataactatataactctcctgcaggtgttccactgttaaaaatctcttaaatagaaactatttctgattatacctggtatagttcaagtatcttgtttcatcatactctcttactggaaaaaaaacaaagcatactttggaaaaaaaaacaactggaataaaatatactcacttttgatgttttttttaagaaagaattattttttcttttcattataagtgtaaatttaaatatatgaaagctccactataaaatatcattttgtatgtataatagtctgttttaggccaactccaaattgaactaaaactatttcacaaatgtgacacactacatatgtttttcaactttatcatgaaagatatagaaatttgttgataattttacattttatttatagttttacttactcattttgtgtcctgttcactgcccccctctgggacaaccccttccacaatcctcccatccccttgtcctctgagtgtggtgggagggggttctccctatctattcccccctaccctgacacttcaagtctccatgcttgggcacttcctctctcactgaagccagacaaggcagcccagctagaaatccatattgcacaaacaagcagcagcttaagaacttctgtgctggttatgttttccaaaatacctaatttcgagcacataaaaaatgctcacgtagcaggcatgtttttaatgacagactttgataacttcaaaataaatataaagatgagaatagacatcagctacagttttgttttgagtatattatatgaatttaaagttaagtaaatggagcaatgctggaatttagctgtatacttcacactcataattactggaatcctacatgaaacattttgatgcatgctggaaacagctcagttcctagtatgctgacattgaatcatgttggaaacaggactt

SEQ ID NO: 3017 - DNA, 1000 bp, mus musculus
tgtttccattaggatgccccccccccaccagacttctaaactccctggttaggtgcatcatctctgattgaaaacagacccagcagtcctctactgtatatgtgttgggggcctcatatcagctggtgtatgctgcctggttggtggtccagtgtttgggagatctcaggggtccagattaattgagactgctcgtcctcctacaagaccgcccttcttagcttctttcagccttccctaattcaacatgagtcagctgcttctgtccattagtcgggtgcaaatatctgcatctgactctttcagctgctttttgggtctttcagagggcagtcatgatagatctctttttgtgagcactccatagcctcagtgatagtgtcaggccttggggcctccccttgagctggattccactttgtttctgtcactgggccttcttttcctcaggctcctctccatttccatccctgtaattctctcagacagaaacaattatgggtcagaggtgtgactgtgggatggcaaccccctccctcacttgatgtccttcctgtcttcctgctgcaggtgggctctataagttccctctccctactgtcaggtatttcatctaaggtccctccctttgagtcctgagagtctctcacctctcatgtctctgatgcattctggagggtcccccaacctcctatctcctgaggttgcctgtttccaccctttctgctggccttcagggcttctgtccttttcagtcacccaaatccagatctccctgaccactctccctcccaggtccctcccttcctccccacatgtgattgctttcttctccctcccaagtgggactgagacatcctcacttggacattttagcttgttgacctttttgagttctgtgaactgtatcttgggtattctgtactttttttttttctaatacccagttattagtgagtatataccatgcatgtccttaaaaaaaatacacacaaaaagt

SEQ ID NO: 3018 - DNA, 1600 bp, mus musculus
gggcatgcctatattcagtctggctcccccagttagcagttgagtggtattagtcaaattaatctctctaaattaattaataaattaacctccttatctgtcaaatgtgaataatgaaggcgtgcattgcttaatggcagggataagttctggtgactgtgccattagatgatttcacacttgtggaaaccccactgtgtgtacacaaactagttagcataggtcagcgggcagtgtggcttatttcatcaacgtaatcccaaacatgtgtggcatattgagctacatcttttcaggtacataattaacttgtcaaggttactactaagtcatattaccaaatctaggaatcagttgtcaatctcaagtacatgaaatccatcaataaccatgaatacagattaaactgccccattcccccttggcctctaaggtatcacttcctcttggttcttcttcatatctctgtcttaatcttaacctgaaaagattacaatattccaaacagatgtgagctgggaattgaaccggggttctctgaaagagcagtgctcttaactgcggagccatctctccagccattattgcatattcttgaacattagtagttcatcaataaccctgtatgaatacccagtctctgccagaagatcctgcagtcacctaggactgacactcagctcggatgcttcttccttgcctgaacttcctaggatgccaaaaacttttattcaaaacaaaaaagtctgagctaggggctgcaactaggggctggagctaggggctggatggtgtggtcatgctagccttgcatttaagatgcttctgcctccttgttcctgagatatgggcacacaggatggttcttatacaacccttccatagcacaatcacaccatactgacaagacccactttcatagcagttcccccactggacaatgactgctgtgaggctttgggttgccctcatgtgttcattagttgttttcaaagtttgacagagccggaattatttagaaagaggaactctcaactgagaaattgcctccatctgactggcctgcaggtacttacctggctttacataatgctgccttgctccatggttttaaatgctatctagtctggaactgtaataaaccagttgagacgtcttgggaactgtactgacacagttctagctgactacccaatatttctactcatatgttgagtaagtaattcagattccacacatctaaaatttaacattttatcctgtctcagtaactgtcagctccattcttctagtttctcaagttaaacagtcagtctctttaggaaattctgtttattttaccttcagaattattcatagtatagttctttcttatagttctcacagctgtcaaatgaagccctcagcatatcaggaactaatgcattggcttcgtatctgctacccttacttctatgtttgttcctcaatggtctctcttacttgggcaaaagttatcttattaagcacagctatgtcacacatctacttaaaaaatgcctttcaacttaaactaaaaggctagatcttaactgtgactctaaaccagcctgctgtcctc

SEQ ID NO: 3019 - DNA, 1600 bp, mus musculus
attgccattattcaggtcaactccacgcgcttggacctgtccctgatcaaaggattacccaattggatctcctcagcattttccttctttaaaaaatgggtgggattgatattatttggagatacactttgctgtggattagtgttgcttctctggttggtctgtaagcttaaggcccaaactaggagagacaaggtggttattgcccaggcacttgcagctctagaacatggtgcttcccctgatatatggttatctatgcttaagcaataggtcgctggccattcagctcttgcaccccacaaggctagtctcattgcacgggatagagtgagtgtgcttcagcagcccgagagagttgcacggctaagcactgcagtagaagggctctgctgcatatatgagcctattctagggagacatgtcatctttcaagaaggttgagtgtccaagtgtccttctccccaggaaaaacgacacaggagcaggtcagggttgctctgggtaaaagcctgtgagcctaagagctaatcctgtacatggctcctttacctgcacactggggatttgacctctatctccactctcattaatatgggtggcctattgctcttattaaaagaaaagggggatctgagaggagccgccctcacatttgccattataagatggcgctgacagctgtgttctaagtagtaaacataatctgcgcatgtgccaagggtagttctccactccatgtgctctgccttccccgtgacgacaactcggccgatgggctgcagccaatcagggagtgacacctcctaggcggaggataattctccttaaaaggtacggggttttgccattctttttttttttccattttttattaggtatttagctcatttacatttccaaaccaaaagtcccccatacccacccacccgcactcccctacacacccactccccctttttggccctggcgttcccctgtactggggcatacaaagtttacgtgtccaatgggcctctctttccagtgatggccaattaggccatcttttgatacatatgcagctagagtcaagagctccggggtactggttagttcataatgttgttccacctatagggttgcagatccctttagctccttgggttctttctctagctcctccattgggagccctgtgatccatccattagctgactgtgagcatccacttttgtatttgctaggccccggcatagtctcagaagagatacctacatctgggtcctttcaataaaatcttgctagggtatgcaatggtgtcagcttttggatgctgattatggggtggatccctggatatggcagtctctacatggtccatcctttcatctcagctccaaactttgtctctgtaactccttccatgggtgttttgttcccaattctaaggaggggcatagtgtccacacttcagtcttcattcttcttgagtttcatgtgtttagcaaattgtaccttatatcttgggaatcctaggtttggggctaatatccacttatcagtgagtacatattttgtgagttcctttgtgaatgtgttacctcactcaggatgatgc

SEQ ID NO: 3020 - DNA, 1400 bp, mus musculus
tattctggagactgccccctatcctgcacgtcatctcctgcagctggttccaggctccaatgatgaattggcgggaatgaactttcccccctcttttataaagcgtgtccgccattaaaaatttgaaccttgagcagactagttgtcttggttccattatttctcaacctgcctaggctccctcttttctttcatttctaagatgccttccaggctcgaacccggacatgtgagctgctggccggcctgaacaatttggcaaaccaatgcggggcctggggagaaggttggtatgggctaagctagatcagcactaaacctgagcactggattcaattaggttcagcagtgagttattgggaactaggaactcaacaggcaggcagtcggccgcagcttccagaagctgcttttttaggtgagataaataaaagggtataataaaagggattttataatcaggcggatggctgtagttggaaactgcattaggtgggaggaaagtagattttgaaactctcccagggacagagagaaaattggggaatccccacttgtgtgcatgccagctggtgtcttttttctgagtgtctgtcttatgtttctggaaacgaacatgtgctcgttgtgttggtttgttttctatgttttgtcccatgtctctgaaacatggtgcagtctgagtttggtttctctggtgtttatagacaatggggttttctgaaatgcgcactttgtatttgcacctgtccctttaggctgtaaggaccagaggactgtggtcagcagatgtgctaggaagatggtcaactcaccaggggatgccatggggagtagagagagacagagatgtctggcagtctccggagatcagtcagagggaccaagttttgtttatgaaatggaagcttactcttctaattcttttgcctgctcgtggaagatgagaaagggttgcatgtgtctggatctgttggtttctgttttgtgtgttttgtgtatgtgtttagagctatgtgaaaatttagagaagtgctagtgtgactggaaaagccctgctgggagctgattgcaaacgcagctcctaaagggcagacagccttttgcttgtaacagaaatttagcttaaaattggtaactcagagttagagtcattctaaacaacacatggcaggaacgaacccaggaaaacaggactttaaagatacttcataatagggataagctttgggccaggactctggcagagtgctcagattgagaaatgtttgcgtttgggtggacgtggagctcagctcagagcagcctcagggaggtttgtctggcatttcttttgtttcttcaaaccatgactggggaagttcctgggacctcacctctccctgccttcagggaagctt

SEQ ID NO: 3021 - DNA, 1000 bp, mus musculus
accttaatgagaataattcaatttttaaaatttggtactaatactcacaagacattctcagttgtcaaatttgttaaatttacaaattgtaaattcaaattaagagatggtaagataagctcaggaaatcatacgtcctagataattgtggtttgaaagaaaatggccttcataggttcgtagggaatgtcactattaggaggtgtggccttgctgaagtaggtgtagcattattggaagaagtgtgtcactgagagtgagctttgagctctcagatgctctagctaggtccaacatggcattctctcttcctgctacctgctcgtctggatgcagaactctcagctctttctccagcactatgtttgcctctccagcactagttcaccatgctaaaactctgaagctgaaagccagtcacagttaaatgttttccactataagagttgccatggtcgtggtgtttcttcacaataataaaatcctaaaacaataatatatgaaaatatctaattaagtaaaatactccttatatacaaaatactattatgatgacttactttctccttataaatcaatatcatttcaaatagttaagtaatctttctctattataaacagttctgtgaaaatttctataaactcaagatcattgctgcattttcaatatgttatatctctgcatatattttgcatcaagtaggttattagttatcattttattgatatataaataactaaaactttatcttctgtgattgacctaattctgaatttctaaagaaaatttattatgtaaattatcaaggcaaaatagtccctttgccatgataacttcttggtctttctctctttcttgagccagggtctcactttgtagccttgatttgcctcaagtttaaggtagtcctcctgtgttgggataataggtatgaagcaaccatgcatccaatattcaaaaacactgaagtctaaaaacactgaagagtctcattagctg

SEQ ID NO: 3022 - DNA, 1000 bp, mus musculus
ctctatttctttaagtgagttattaaagtccttctttatgtcctctaccatcatcatgagatatgtttttaaatccgggtctaatttttcaggtgtgttggggtgggagtactgcgttctgatgatggtgagtggtcttgatttctgttagtaggattcttatgtttgcctttcgccatctggtaatctctggagttagttgttatagttgtctctggttagagcttgttcctcaggtgattatgttagcctctatcagcagacctgggagactagctctctccttagtttcagtggtcagagtactctctgcaagcaagctctcctcttgcagggaaggtgcccagatatctggtgttcaaacctgcctcctggcagaagttgtgttccacttaccagaggtaccaaggtcctgtgggggatcctgtgggggtccttgcgggtgtcaggagactctgtgggaaaggaaccctggtgctcacatggactggaagggacctgcaaccctgatcaggccgggccctctgcctccccaatcaatgcaagtctcaggtcccatgggactggaccggagcagatgctgtgttctactcaccagaggtcccaagatcccacggagggtcctgtggggggtccccacgggtgtccggagactccacaggcaaggaaccccggtgctggcgtggactggcagggacccgtgtccctgatctggccgggcattctgcttccctaattaatgcagtcttaggttctgcgtgattggattggagcagacactgtgttccactcaccagaggtcataagatcccgtggtggatcctgtgggagtccttgggggtgtccagagactctgaggcaaggaagcccagtgctggcatggcccagaaggcacatttctatttttaatgtagcagccttttgcattggacaattgaatggagaaagtgcaaagcaaacacatgggtgatttttttctatattgtttgtagtttaggag

SEQ ID NO: 3023 - DNA, 1000 bp, mus musculus
ttgtagatccacattagagcagatggttgctaagggatagctttctctctcatatcaatgtaaaaattctctctctcaaagtattcaaggagctaaagaggtctgcaaccctatgggtggaacaacgatatgaactaaccagtacccccagagctcatgtctctagctgcatatatagcaaaagatcgcctagtcggccatcaatggaaagagaggccccttggtcttgcaaactttatatgtcccagtacaggggaatgccaggtccaagaagtgggagtgggtgggtatgggaacaggccggggggagggtataggggacttttgggatagcttttgaaatgtaaatgaagaaaatatctaaaaaataaatttaaaaatgttaaaagaaaaaaagattatttctctctatatctatctatctatctatctatctatctatctatctatctatctatctatccatgccagtttttaactagacagtgagaccagagaagctagtctgaacatatgagaggaaattagatacttcagagcatgatcaagtggagcaacagcaatgatgccacacaactaaaccacagctttggatggaaatgttggaaaaataaaaagcaggatgcttttcacggtggtcctctggagggagactgtgtagaagggggctccatgaaggcaggggagagttttgctgtagagggaatgaggcttctgccctgccacctgagaaggcagacaggcacacttcagtaaccagcaattcattgggttgccaatgaacagcttccctggctggctgtacaagggagtgtgagctgacgcaccacacacactttcttgacacagtcccatttgagtgtttgaggaagtccttggatctagtctggtgttttcacaaagcaaccaaagcaatttctggctgatatttcatcacctaatcagtgatttcttgctttatgctttggaaatttaagtctttgatctagtgtaaatattt

SEQ ID NO: 3024 - DNA, 1000 bp, mus musculus
cttggagcagacatcttggtcctctaactcatacagtttttccaccaccttttccaccacgtttcctgagctttactatgagttgtgttgtggatgcatcagctggagctgggcactggcacagtccattgttctctgcattttgaccccttgtgactttctacaatggtttctatttgctacaaagaagcctctttggtgaggggtgacagccccgtttatctgtgggtataaagataagttagaaattatactggtttaaactaaggtcaagagaaaaaaatcactaggctagggagatggctcagttgagagcacttgctactcttgtagagaaatagtttgtttcccaacattgcatagtgactcacagccatttgtaactcaaattccatagcaactgatgcccttttctgaaatctattgtcaccaggcacacatgtagtacatttacgaacatgcaggcaagatactcatacgtgaaaattaaatctaaagaagaaaagcagagcaaaaaggaaacaattgagagcaaatgcttgaaaagatatggggaaggaagaacctttaatcactgctgtggggattacaaactgatgcagtctttttggaaatcagtctgaaaagttaaatataaatctaccatgttatatactttcaaaaagcttttcaagataatctgtcaacgatcaggctactgggagtttgtttgtttgttaaattggatattttctttatttacacttcaaatgttatcccctttcccagtctccccctggagcccccctataccattctccctcccctgcttctataagagtattcccgcactcacacacccacccactccctctgctctgccctcgcaatcccctacactggggcattgagccttcacaggaccaacggtctcccctcccattgatagcagacaaggccatcctctgctacatatgcagctggagccatgggtttctccatgtgtactctttgattggtg

SEQ ID NO: 3025 - DNA, 1000 bp, mus musculus
gaataatcagaataaagaacgaagattcccagctcaaatgacctgaaaatgtcttcaacaaactcatagaagagctttcaggcctgtgccagctctgagccaccttgtgcacaaactcagtggacagtcccacggtccccagaggactctccacaccataggcaccctagcatgcccaggatcttaggatcatgggtgagtggaacacaacatgtgttccaaaacaatcctgaggggcctgtgccagcaggaacagggacacaggaaaccagcctgaccagagacacgggttctgtccaatctgtgccaactctgggccaccttgggcacaaacttagcagacatcccactatccccagaggactctccacacctcaggcaccctagcacgccccgaatcttaggatcactggtgagtggaacacaacatctgtcccaacacacctgggagtgcctgaggccagcagaagcagggacacaggaggcctgcctgaccagcagcttgggttccttctggtctgcactggtctaccttggtttcaaacacagcagatagcctcatggtccccagaggaggtaccacttccaggtactctaacacacccaggatcttaggattccaggatcccaggagcttggtcacaccaggatctcagggtcccagaggaagcttgactgccaagaactttgacacaccccgaatctcagattaacaggatcccagaatcacaggatcacagagaaagccggactctgaggaattttgactgaaccgggattacaggaaggataggctccaattagctatattgaggacattgggcacttgagataatcagatggcaggaggcaaccataagaacagaagcaacagaaaccaaagttactttgcatcatcagaaccaaaccctcccaccatagaaagtcctggatacaccataatgccagaaaagtaagatatggatctaaagtcacttctcatgatgatgaaggaggactt

SEQ ID NO: 3026 - DNA, 1000 bp, mus musculus
ttgatgcccagcccactgtgggtggtattatactcaggaatgtggttctgtgttttataagaatttgcattggccagtgaagcgggtaagacaattgcagatcttcacctctctctgtgttccttcaagtccaatcccccaagtttatcctcagctcagtggcaaacttcctgccttagttagcatttccattgctatgaagagatgccatgaccaaggcaactcttataaaggacaacattttaactggcgttggcttatagtttcagagactcagtccattatcatcaaggcaggaagcatggcagcatccaggcagatatggtgctgaagaaggagctgagagttctccatcttgatctgaagtcagcaaagaaaaagaatgactcacgagcagctaggagggtctcaaagaccatcccacagtgacatacttccttcaacaaggccacacctactccaacaaggccacacctcctaatagtgctactccctgggccaaagatatttaaacacttctgggcccaaatctgttcaaaccattactttccaagtttacctttacctctcatccccatctccagtagatcacacagatattcccttccaaacttcctttccattactcattactttattccagccccgaactcttgtaagcactctttgcgaaatggtaggccactcaggtctggggaagaagggagcacaactgctgatcttcacctattcttactcttctccaaatcaatccaactccccagtctcatctccagctctgtagcagaccacatgctgcagcatccccctccaattcctgcaagcagatcttctcctcctacccacctccccacacatactgttatcccagaccctaagtgaagcaggctttctctgggaacctgtgaggcaagcccatcagagaagcaagtaggttggccagcttcagatctttactcttcctctgctccctattccccagtctcatactcagctttgt

SEQ ID NO: 3027 - DNA, 1000 bp, mus musculus
aacaaaacaaaacaaaaacctaacatctaaagtcaaagttatttcaacacaaaaccagaaacaactactcataaaatttgttttggaaaactgctatcactcacaaggtatttaggaacacatggggtttccactaagcagtacacagaaagacacagctgattgagacagtctacctggactctttcgtttttctgctttctatatgtgtaatgcgaaggcagtttctctctcaggcctcagtgtcctgatgactacgcaggggagtagtgttaggtcatctgcccaagcagtgctaagtcttaggaagccaacccctacttaaaaccatatttaaaaatgatagcagggggactggagagatggctcagcagttaagaggtcttctggagtttctgagttcaaatctcacatggtggctcacaaccatctgtgatgagatctgatgccctcttctggttgagtctgaagacagctacagtgtacttagatataataataaataaatctttaaaaaatgataatagacgtttcaaccaaaaatggatagcattaatacctgaatattaaccatgaataagtaaatggctattgagaaaggttctgaagttagaatgcactgaaggtggaattaggtcgaattcactacctacaagcccacaaagctgttccaaagatttttaagggattttgcatcataggctagtcaacaaagtgtgttttgttgtataagcaaagaaatcataatttatatgtataggggctgatgtggctcataacttatctttcacatgtagtcataaagccagctgtaatttatgtaagatagcacaaataagaatacatggctgtgtccataaaagggaaagggtcagaaaacatatttcctttatagtgccaaatggggaactgagtttgacatatatcacacaatttagttccaaaatgcaaccttgaaaaacttgacccaacttgcactttcagagaaagatttcaggtc

SEQ ID NO: 3028 - DNA, 1200 bp, mus musculus
ttctctagaggaatagaatttgatagaatgaatacatatttgtagggaaatttattaaattgtcttttatgcagactgcagaagcaacatagcttctgggacaggcccattttgagccatgatcttcagccacaaagcagatctgaactccagccccctgtgctccttcccaaccagagaagagatggctgccagggacagctctaaccactggagcaggtgagagagcaatcttgtatcctgggtcaccttagagcccagtctgcacaggaaagcctgctgactgcagaagcaacatagtttctgtttcgggccttcatcttcagccaggaagcagatctgaactccagacatctgcgctcctctcctgtcagaaggtaggtggcctgcagagagtactctgaccactgagactcaggagagagttggactcccaggagtgctgacatagaatcacatagagtgctaacagaatcacaggaggaacaagctcaaccagagacagctacaacaactaacaccagagattaccagatggcgaaaggcaaacataagaatattactaacagagaccaagtccactcaccattatcagaacccagcactcccacctcagcgagtcctggataccccagcacaccagaaaagcaagactcggacttaaaatcatatctcatgatggtggtagaggatttcaagaagggcattaataactcacgtaaagaaatacagtagggagacgaaaggatggacaatctagagactgccacacctggggatccatcccataatcagcctccaaacgctgacaccattgcatacgccagcaagattttactgaaaggaccctgatatagctgtctcttgtgagactatgctggtgcctggcaaacacagaagtggatgcccacagtcagctttggatggatcacagggcccccaatggaggagctagagaaagtacccaaggagctaaaggggtctgcaaccctataggtggaacaacaatatgaactaagcagtacccgcagagctcacatctctagctgcatatgtagcagaagatgacctagccggccatcattgggaagagaggccccttggtctagcaaactttatatgcctcagtacaggggaacaccagggccaagaagtgggggtgggtgggtaggggagtggaaggggagggtatgggggact

SEQ ID NO: 3029 - DNA, 1200 bp, mus musculus
attaaagtccttcttgatgtcctctaccatcatcatgagatatgcttttaaatccgggtctattttttcaggtgtgttgaggtgcccaggactgggtggggtgggagtgttgcattctgaagatggtcagtgttcttggtttctgttagtaagattcttacgtttgcctttcgccatctgataatctctggagttagttgttgtagttgtctcttgttagatcttgtttctcagatgtttattttagcctctatcagcagatctgggagactagctctctcctgagtttcagtgctcagagtactctctgcatgtaggctctcctcttgcagggaaggtgcccagatatctggtgtttgaaactgcctcctggcagaagttgtgatccactcacagaggtcttaagatcccgtggagggtcctgtgtataccttacggttgtctgcagactccaagcccaaggtacccttgtgcagcgtgggccggaagtgacttgcgcccctgcttccctaactaatgcagtctcaggtcccacgcgattcgattggagcagaagctgtgttcctctcaccagaggtcttaagatcccttggggggtgttgtgggtagcttgcgggtgtcagccaactctgtgccctagctacactggtgctggctggaccagaagggcgatacttaacttcttttaacttagatttcacttccagacctaaataatatacaagagaattagcagtatgatcaagaacaaaaagtattttatattactttgaatgctttgcatgacatgaatatgttagcctttataattcttcaataacagaataattgatgcagcattacatatatataattacaagctatttaaaagaagatgaccaagttagccatcatcgggaagagaggcacattggtcttgcaaactttatatgccccagtacaggggaacgccagggccaagaagtgggagtgggtggtcaggggagtgggggagagggtatgggggacttttgggatagcattggaaatgtaaatgaagaaaatacctaataaataaaaaaagaataaagaaaaaaagaagaatgttgtagtttaaaaaaaaaagcaaaaaccataatctaaccacagaccaaatagtcctgctgaattgaattctaatgttcccagtactatgactgaaatatcattaaggcacctttc

SEQ ID NO: 3030 - DNA, 1000 bp, mus musculus
tacaatttgcaaaacacatgaaactcaagaaggaggaagaccaaagtgtggatacttcgttccttcttagaatgggaagcaaaatacccatggaaggagttacagagacaaagttcggagctgagacggaaggaaggaccatccagagactgccccacccagggatccatcccatatacaaccacaaaacccagacactattgcatatgccagaaagagtttgctgacaggaccctgatatagctctctcttgtgaggctaagacagtgcctggcaaatacagaagtggatgctcacagccatctatttgattaaacacaaggtccccaatgaaggaactagagaaagtacccaaggagctaaaagaatatgcaaccctataggagggacagcccagagctgtgtctctagttgcatatgtagcagaggatggcctagtcggccatcaatgggaggagaggcccttggtcttgtgaaaatcatatgccccagtacagtggaatgccagggccaggaagtgggagtgggtaggttggggagcagggtgcagggagggtataggggacttttgggatagcatttgaaatgtaaatgaagaaaaatatctaataaaatagtactattcttgtcatgtatggtgactgtcttacacctttaatcccactttagggaggcagaggcaggcaggtctgtataaagaatttcaggcatacatagtaagaccttgtctcaaagaaataaacacccaaaaccaaaagacaacaacaaaaacagcttaacattcttgaaaatgtcactttaaaaaaatgctacagtattgatttgtgtatcatttttttaattattaggtatttatttcatttacatttccaatgctatcccaaaagtcccccacaccctcccatacccactccccccacacaaccactcctacctcttggccctggtgttcccctgtactgaggcatataaggtctgcacgaccaatgggcctctcttt

SEQ ID NO: 3031 - DNA, 1000 bp, mus musculus; identical to SEQ ID NO: 3030

SEQ ID NO: 3032 - DNA, 1000 bp, mus musculus
ttatagttgatcctacaaagaagtgcaacagtagcactttaatatttttaatattcttgtttcttttccatacaaaagtaaaaacagtctccaggattgttttccactgcctcagagttaccattaatcaatcaccctttctattatttattactgtcagaggaacttgaggttctctcttttcttttgcttgcccttaatattatttgaaataaaaaagcccatatcagtaaatagtttacattatattcaaaaatcaaacatgacatctaaatgaattcaactttggcaagtaggtttatgtaacaaaaatgccttgtgtttatgttagtgactccccaagataattaagccatatttgctttgctattcctcaaatattctaaaaatgatgcttttctagtagcttttagttatacatcatcaggactgaagaatcagtttttaaaaagtgaatgaagatgagcgaatacaaagatagtctgtgaagtgtataatatgccattgaaatttttattaatatataaacacatatgcgtagtatatgcatatgtatagtaaaggaagtgttcagtaaaacaaaaggaggaggtctgtaaaaacagaaactgttggaagtatgtttttgcagtctgcttaaggaactgacaaaacaagctttttttgagataaagatgaaaaatgtccataggggcagatgttgccatttgccctcctgttgggactgacagatcagtgctgaagcaacatcagggcaaagaggcatcagcttcagtaatggagagttgtctaggggaaagattgctctatcacagtgatgggctcctgcatgttataaatcgaagattgttctttcctgccactgagatgagcagctctttcgccttttcagaatgaaatgttggaagagacaaggaacggatgaaaacaaaaaaagtgggagaaagttttatctcttcaacataaatctccactggaaacagacaggatagtgccaatc

SEQ ID NO: 3033 - DNA, 1000 bp, mus musculus; identical to SEQ ID NO: 3032

SEQ ID NO: 3034 - DNA, 1400 bp, mus musculus
gagagagagagagagaaagaaagaaagaaagaaagaaagaaagaaagaaagaaagaaagaaagaaagaaagaaaaatatatgcttttatttcattgaacatatgtttatggaataatttcttctgtagtaaaacattacaagataatataacactaaaatacattttgagaattataattttctcaaattccacctagatatattccctagtgatctttgaatgaagatgttagatcatactttagtttcatgtaattgaacttatgatattatcatactgtatatattttatatgttttgttaatttttagtttttatccactttacatcctgatcacactcctcactcctcctttcccagttcccccttatacaaatccccagctatagctccctttcttttccttcagagaacagggagccctccttgtctactacccaactctgggacatctagtctcagcaggactaggcacctcctttcctactgaggcccaaccataaagtccaagtagagtaagggtatctaatctcatgtaacagaacctgagacaggccctgctccactttttaggggaaccacatgaagacctaactacaagtttgctacaaatatgtaggggacctatgttcagacactgcaagctccttagttagtggccctgtctctgtgagtgcacatggacccaggttagttgactctgcatcttcttgtggtgaccttgacccctttgacttgctcacttttatccccttctcttctacaagactccctgagctccctgtgatgtttgactgtggaactctgcatctgcctccatcttactcttctgtgatcaatatcttagtccccagacaagagtattcatacaagtaactttttttcttgtaatatacaagagtgaaaaagaaaaacaatctcttttgcatctcttgatctatgtaacttgcaatttactggaagatgtctactctcttctccacagattataaagtctttcaaaaggaccgatgtggaaacaggcctgagcgtgctttaaactagtagattacaaggaagtaataaaataattctgatgaaatcttgtagtattcactcctgaaatggtggtcaaatctttagtttgcttgattgttttccatcttggtatattgtgacaaagtattttttgaatatcacctgccatccaaatccccatgaaattaattccacaaaaaaacccccagacatttgaataatcaactcaaggcagaagaattatgactggttttgattgcatggtgtcattttcattttctaattacatcattgggatgaatattgctcatttttaatgatgcattgtatttttgcacttaagtttagaatctaagaatcagtcataaagatatgtctcat

SEQ ID NO: 3035 - DNA, 1400 bp, mus musculus; identical to SEQ ID NO: 3034

SEQ ID NO: 3036 - DNA, 1200 bp, mus musculus
tttacattttacatcttttttccctttttttctttatctaatttttttaaagtccagattttatactcctcctggtctaccatctgactgttccatatctcttacctccttcccccatctcaacgaggatgtctcaagcctcccaacccccaccctgccagacctccccactccttgtggcctcaaggctcttgaggtttaggtgcatcttctccaaatgagtccagatcccgcagtcctctgctgtatctgtgtccagggccttggacacatttatgctacctttttggtggctcagtgtctgagatatctctggggtccaggttaattgagactgctggtcttcctatggggtcgctctcttcctcaggttccagcttttccctaattcaaccacaggggtcagcagcttccttccattggctgggtgtaagtatctgtatctgactcagctgcttgttgggtctttcagggagcagtcatgataggcccgtgtttgcaagcactccgtagcctctgtattatcgtcagctcttggggcctccccttgagctggatcccaatttgggcctgtcgctggacctcgggtacttccttttcctcgggtacttctccatttttgtccctgcagtttctttcagacaggaacaattatgggtcagagttttgactgtgggatggcaaccccatccctcacttgatgccctttctcttggaggtgggctctataacttccctttacccactaaagggcattgagtgaggtaactcagactcaaaaggacatagatggtatgtactcgtttataagttgatattagaccaaaaaaaaaaagtacaaaatagttaggatacaataaacagagctcaaaaaggttaacaagctaaagagcccaagtgagaatgtctcagtcccacttgggacagagaagaaagcaattgcaggaagggggagagagggtgggagggacctgggtaggaaaggagacagggagcggaagaggggaacatgatcaggaattggctgggggaacaggacgatagtcttgagggcagaaagaatggaaatagtcaacctcaggaggtaggatgtgggaggaccctcgagaatgtaccagagacctggaaagtgagagactctcagtacacaatgggagggaccttagatgaaatgccctacagtttggatcttaagaaaaa

SEQ ID NO: 3037 - DNA, 1200 bp, mus musculus; identical to SEQ ID NO: 3036

SEQ ID NO: 3038 - DNA, 1000 bp, mus musculus
ggggaggtcccaaggcctgacactcttactgaggctatggtgtgttcacaaaaataggacctatcatgactgccctccgagagatgcaacaaagagttgaaagagtcagatgcagatatttacacccaaccaatggacagaaactactgaaccctgtggttgaattatggaaggctgaaagaagctgaggagatgggcgaccctgtagaaggaccaaaagtctcaatcaatctggacccctgaggactctcaaacactggactatggggctgtgtaccagaggctttccatggaaatctgtggcctggcctggtgggagagttccagtgaagggaagtgagtgcagacagggatggcaagtcacttctgctgctgcagttggctccacctccatctctgctgtgccttccaggttactcagttactccacactgccctgcactgaatcggattgcactgggctgatgagagaccaactgagtgaagagtgaggaggcacttcaggcagcatttttcaagagcagacctcttcctaagtgttacagctcttaggacataaggctcagaccatggagtagttctcgcataaatttcatccttccagataagattcttatatacagttttgaggtgggtaagggtttgaaaacaagtacttctcattggtcttgtttgagagctttggagaaaccttatttgctgtgggaaggcttggtgctgctcctacacgactgatgtccacatacccctggaggggggggggtgtgggaggctgtagctgtcacaggagcctggggctcaggaggtatggcccaacacatgccaaataagcacctactgggtcactggggttccagacatttgcttgaccagggaccaggctgtctgagcacagcctaccgctccacactggaccaccaaacagacaacatacaccaactgatatgaggctcccaacatacatacagtagaggactttcgggtctgtgttcattcagag

SEQ ID NO: 3039 - DNA, 1000 bp, mus musculus
aaaagtcccctctacccttccccggctctgctccccaacccacccactcccacctcctggccctggttttccctgtactggggcatataatccttgcaagaccaagggcctctcctcccaatgatggctgactaggccatcctcttctacatatgcagctagaaacatgagctctgggggtactggctagttcatattaagttcaggacacttttaagtaatattgtaaatgacttccaagaatggatttctttacttaacatgactttaattatccattcttttttttcaggttatatgatatagtctttttttcatatctcaaactctataaccccttccaatccccacctcccaaagccctccccccccttatgcagctccttaccttgcatattccttcttggatcatcaagactctgtagggttaggtacatcctctcatagtgctgccagaaaaggcagcctcaagtgctggggaggtcagtccagtccatgtatgtgctttgctttctggctctgtttctgagtgctgccaagggtccaggtgagttgactctgtttgtcttcctgtagagttcccatttccttcaggaccctcaattcttcctcctgttctcccataagagtcctcaagctacatccactctttggctgtatgtatctgagtcagctgctggttggagcctcttagaagacagcatgctcctttctaacaagcattagagtggcactaatagtgtccaggattggtgtttgccaatgggatgggtctcaagatgggccggttattggatagtctcctccagtctctgctccatctttgtccctgtatttcttttagacaggacaaagtttgtgttgaaagttttgtagatgggttggtgtccttatctctccactgagggtcttacctggctaaaggaggtggcctcttctggtttcctgcccccactgctaggcttctacactaaagtcatcacattgactgctaggagct

SEQ ID NO: 3040 - DNA, 1000 bp, mus musculus
ggtctctaaatttgggatcctacattttgggggctcgtcctggattttgggggcacccagaaccccaagaataccccttggaggtatgtctgtgtgagtttggtgtgtctgagtgcggcgccactgaatctgtgtctcggtttcccagttctagtattctggcagctgccgctgagatccgtgaggatccagtgtgtgtgcgcggaaggagacatcctgagcccgcaaagctgcagccctggggagacgttcctagggcgatcctagaggaggaagtgcccagggttagagacagtcgggaagacctggctgtcctttggcagagtgagggagataaggtactttttctgccagagcgggagtggacgtggaatcccaccccgtcagaggcagcgtttggctggttgtacaagtccaggcagggacgagtgtgcttgaacgttctggtgtcccttgtctctgttttcgttttgtctctgtttctgtttcttgtcatgggacagactgtctcaactccgttatccttgactgaggaccattggacggacgttagggcaagaggacaaaacttatcaatagtagttaaaaagaaaccctggcagtcctactgcaccttggaatggcccaccttcagagtgggatggcctccgggagggacgtttcatctccccaccattagggccgtaaaggccatggtctttcaggaaggctccggatagtatccagatcagtagccttatatcacagtgtgggaagatttagcgcgatttctgcctgcctgggttcgcccatttctcccgcccccacgtccaggtaccaaggtcttgacggttcaagagaatgctgagaaggagaaattaaagctactacttgaaggagccagtgagaaatccaccccttcgcaaccagcagccgtttttaaaatctatccagaaatagaggaacctcccgaatggcccaattctctacctccaccttatcccccagtccttcaacatgt

SEQ ID NO: 3041 - DNA, 1200 bp, mus musculus
aggatccaagtgaggatgttttaatcccatttgggaagaagaagaaagccatcacaaggggcctgaagcgggaggggtctggatgggagaggctataggttggggacgggggaaacaggactgaagccctgagagccagcagaaagaatggaaacagacaacctcgggaggtaggaggtggatggaccctctagaatatacaggagtcctggttggtgagagactttcagaacttgaagtgagggaccttggatgaagtactgtacagtggaggggtgacttgtagagtccctctccagaaggacaggacaagtggaggttgcccttccacagttaaaagctctgacccagaatttttcctgtctgaaggaaatttttcttgtctgaagggacaaaaatggagaagagactgagcaaaaggaggtactgagaccagcccaaattgagatccagctcaaggggaggtccagagtcctgacactgttactgatgatatagtgtacttgcagcctagcatggctgccctctgagagacccaacagctgcttaaaagagtcagatgcagataacagcacccaaccaatggacagaagctgtggaaccctgtgattgaattgggaaaaatctgaaagaagttgagaaggagggcagctccatgggaaaaccaactttcctggaactctgagatctctcagacactgagacacaaaccaggtagcatacaccacctgatgtgaggaccttgacacataaatagcaaaggactgccttgtctggccccagtgagagaaaatgtacctaactcttgagagacttgaggccccagggagtagggaggcctgatggagtttggggtagggatgggaacatcccccttggagctggctggagttgtagaggtagggagtacgggatggggagcagtttggggataaaccaggaggggaatgaagtctggacagtaaagaaaaaaaatgactaaagaataaatgaatctatcaatcagttaatcaaccaaagagtcttttggctataagctctgaacaattaaatctggaatttgatagctcagtttctgttttgaggcctcaatattaacttccaacttgtctatatacaaccttgatggtgtataaggattcccctcccccatatcctggctgtcattatctgttttcttgataatagcatgaagaaaag

SEQ ID NO: 3042 - DNA, 1000 bp, mus musculus
tggcacatagtatttcataagcttccttaagagacttttataaatagtaagtttaaataaatttactttttaatagggcaacaatgtccatataagaaaaatgacggcttcccagccagaggacaggggtccgcctggcctgggaggtttttgcctcaggatctgtgggagccatcttggctccgggactctgcagaaagttgtctgcacagacgagagtgtggaccacagaagctaacagcttctggaacaggcgagagccacagagtttctgaggcagctccgtttttggactctagacatccggccaccttcccggccagagaacaggggcccgcccagcctgggaggctaggattttgactcaggagcagcgggagccaccttggatcccagactcagcagaaagcagcctgcacaggtgaaagtgtggactacagaagctatcaccttctgggacaggcaagagctagagagcttctgaggcagcgtcattttcgggcttcagacatctggccaccttcccggccagaggtcaggtgtctgcccggccagggaggccctagcctcaggatcggcgggagccattttggttctggaactccgcagaaagtagtatgcacaggtgagagtatggactactgaaattaacagcttctgggacaggcgaaagcaacacagcttctgggaaaggttctgttttgtcccttcatcttcggccaggaggaggtcaaaacgccagataactgtgcaccttccctgtaagaggtgagcttgcttgaagagactgctctgaccactgaaactcagacgagagaaatagtcccccaggtctgctgatagagggtaacagaatcaccagaggaacaatctctaaacagagacaactataacaactaactccagggattaccagatggcgaaaggtaaacgtaagaatcttactaacagcaaccaagaccactcaccatcatgagaacccagcactcccactttgccc

SEQ ID NO: 3043 - DNA, 1400 bp, mus musculus
atgaatttatgaaattcctagccaaatggatggacctggagggcatcatcctgagtgaggtaacacattcacaaagaaactcacacaatatgtactcactgataagtggatattagccccaaacctcggattcccaagatataagatacaatttgctaaacacatgaaactcaagaaaaatgaagactgaagtgtggccactatgcccctccttagaagtgggaacaaaacacccatggaaggagttacagagacaaagtttggagctgagatgaaaggatggaccatgtagagactgccatatccagggatccaccccataatcagcatccaaacgctgacaccattgcatacactagcaagattttattgaaaggacccagatgtagctgtctcttgtgagactatgccggggcctagcaaacacagaagtggatgctcacagtcagctaatggatggatcacagggctcccaatggaggagctagataaagaacccaagtagctaaagggatctgcaaccctataggtggaacaacattatgaactaaccggtacccgggatctcttgactctagctgcatatgtatcaaaagatggcctagtcagccatcactggaaagagaggcccattggacacgcaaactttatatgccccagtacaggggaatgccagggccaaaaaggggaagtgggtgggtaggggagtggaggtgagtgggtatgggggacttttggtatagcattggaaatgtaaatgagctaaatacctaaatgtaaattatgaactaataaaaaatgggaaaaaaaaacaaaaacaaaaacaaaacaaacaaacaaacaaacaaaaaaaaagactcagaaataatacattgtccaacaaattaccaaggtaacaatgataacatataaataaggagagggcctggtgcataaccatgcaggccccatgcttgctgctccactctctgtaagccaatatgagtcctgcttatttgattcagtggtccatattctccttgtgtctcccatgcctctggcttgtgcattctttcctcccccacttccatgagatgaaatttacttttccatcttttattcttatttttgaatacattgtcctttcattttaatttggcatgaatactttggagagatattctttagcttacaaatctttgtctcattttaacataatgtacctattgaaattctggccacttagaatgagttgaaatgtatgctttcatttttagttatactcaggtgttggaacagacatttgtgagtttcttcatcaaatgtatggtaaattttgctagcgagagaccagtacttctgggtactttgtggaaggaattttagccaaaataatttatttaaatcatactagtcgattt

SEQ ID NO: 3044 - DNA, 1600 bp, mus musculus
tatctgggtcagggacatgaggaagtacataatttaagattacagaaaaaaaaaaagattacagctatgcattagcttcggttgtaaaagctgattactagggaaaactaaggtaagtaaggtttattgctacagttttctgttcaaagcaagttaaacaaacagtttgagtaaacagcaggctaacattattaagtgccctaatgtatattattgactttggctgtgaggtcagcaaaaattccagtctcttagaatgtaacaaatattttcacaatatttcatcattatacaattttaatactgctttggtttataaagctactatagatttacaagaattcccaaattatctggtgtataaatcgttgttaatttagtgatatcatagattaatggaggattgcaactccatagcccaaagtattcctgatgttttcctcaggtttttattttataaagttgaagctacaaattgtttcagatatatcccataagaattggtatacatcttggttcccagaaccctcggagactagtctgctcaggtgagagtgtggatacagaagctgacagtttctgggattggcggaggccacacagcttctggggcagaccccatttcgggcaccttccctgccagaggggaggtgtccacttcacccgggaaggctttgctggagcacctgagggagccatctctggtccaggatctctcagagactagactgtgtaggtgagagtgccgactacagaagctgcacagcttctctgacaggcaaaagtggcacggcttctgggacaggccctgtttcaggccttcatcttctgccagaaggcaggtccgaaggccagatatctgtgctccttccctgcaagtggagagcttgtgggcagagagtaatactctcaccactgaaactcaggaaagttctagtctcccaggtctgctgatagaggctaacagagtcacaggaggaacaagctctaaccagaaacaactataacaactaactccagagattaccagatggctaaaggcaaacgtaagaatcttactaacagaaaccaagaccactgaccatcatcagaaaccagcactcccacctcagccagtcctggataccccaacacaaccgaaaagctagcctgggatttaaaagcatatctcaagatgatgggtgaggacatcaagagggactttaataactcacttaaagaaatacaggagaacactgctaaagagttataagtccttaaagaaaaatgggaaaacacaaccaaacaggtgatggaattgaacaaaatcatactagacctaaaaagggaagtagaaaaaataaagaaaacccaaaatgagacaacgctggagatagaaaccctaggaaagaaatctggaatcatagatgcaagcatcagcagcagaatacaagagatggaagagagaatctcaggtgcagaagattccatagagaacatcatctgcacaacaatcaaagaaaatgcaaaatgcaaaaagatcctaactgaaaacatccaggaaatccaggacacaatgagaagaccaaacctacggataataggagtgaatgagaatgaa

SEQ ID NO: 3045 - DNA, 1200 bp, mus musculus
gattgtttgagtgacatgcacttgaaattgcagcactcaataagtttggattagtaggattaccagttcaagtccactagacgttttgacataaaacattcctcctacctcatagtgaataataaataatctattctgaaccaaatatgtgtggggcactgactgtgggcaaataaagggggagggggtagatgacccacatcccaccagagctcgggggcgcaggacactgagtgggcagacatgggagttggactgtgtgcactctccatgcctcaaggtgggtgtctggctgtgggaaggcacagaactccagtcagtgggggtgaggagggagcagtctggagtccctgggcctcacagaggccagaatcaacaagttctagctcttgggcatcgcaggaggttgctgtacaccatggaagagctgagaacagatgggggccccaaggggagtgttggttcagttagccccatagcgaaaggtagaaggggcagaaggagagagcactgggtagttcctgtgagggcaagggtccttggtatggtctggcggctggaaatgctaggaggcctcctggcgagaggttagatttatggatcattagagggaagcctgctccattgctccagcatggtggatcccgatgagcagagatggcccatggtttttaggcatttgttgtagaaaggcagagagaggaagaaaagtaatgaagtagatggtggccatggccacgtggagagagaggggaggtagagggagataggtgggagagaggtgagtgtaagagacaaaaaagagaggcgagagctaaagagaaagaggagggggcaagcagccccttttatagtgggctgggctaccttgctgttgccaggtaactgtgggacagggcatacctggttgtagccagataactgcggggttcgtgtccatccagaataccaggagcttggggacactgcctacgtggctgatggtcacaaaattatggtgttgaaggctcatgctatcagaaccctaatgtctgggagtgaagcataaagctctgttctttgtagaattttctactaggtcttcggagtaagccttgctcaaccagaacacagactgcctttccaggtccaacaaatatgaatcctttataacactactctaaaaccaaactcaaatatgaaaaagattccatgaatttt

SEQ ID NO: 3046 - DNA, 1000 bp, mus musculus
ttgtatgagaaaacagctgtgtttgaaagtgacaactaattaaggggcagacatagtcacaattcagagaaagatttgacagaaaaaaagataaaaaacaattatcctcaggagcacagcacaggaaagagaggctatttagaacattgctagagagaagtgggggtatttgacaattttactgagacagtttgacagagtcaggttgcagagagaatcagctagacacgggtgattgtagggtttgtaggctatgtccaatcagccactagttatggccactttgggaggctgaacgctggaaatttgactgcacttactcctctccaacgccacggcgggtgctgtgtcatagggaagcaccaagtcaccgctccaggggtgggaaattgcaggctgactccttaactacctattgatgtacattggttttattaactacaataatcacaagttgtcctctggtgccccacccccacccctggtacttcaagtctctgcaaggctaggtgcttcctctcctattaagaccagacaaggcaacccaggtagaagaacacatcccaagtacaggcaacaggttttgggataacctccctcccagctgtttggaagccacatgaagaccaagttgcacatgtgcagggaggcctaggtagctcgtgtatgttctctgattgttgtttcagactctaagaggcccaagggtccaggttagttgactctgttgttgttcttcctgtggagttcctgtgcctttggggagcacaattcttcctcctattcttccttgagagtccctaagctccatttactgtttggctgtgtgtttctgtgtctgtctgagtcagctggtgggtggagcctctcagaggacaacttgctcctgtttgtatagttcaggagtctgacggaagtgggggagagatggtgggatcacagaggtccttctgggatagcaggttgctcagagtatcttgttcagaacatccattcttta

SEQ ID NO: 3047 - DNA, 1000 bp, mus musculus
ggacccagatgtagctgtctcttgtgagactatgccggggcctagcaaacacagaagttgatgctcacagtcagctaatggatggatcacagggctcccaatggaggagctagagaaagtagccaaggagctaaagggatctgcaaccctataggtggaacaacattatgaactaaccagtaccacagagctcttgactctagctgcatatgtatcaaaatatggcctagtcggccatccctggaaagagaagcccattggacacgcaaactttttatgccccagtacaggggaacgccagggccaaaaagggggagtgggtggttaggggagtggagttgggtgggtatgggggacttttggtatagcattggaaatgtaaatgagctaaatacctaataaaaaatggaaaaaaaatgaaatttgagttggaaatttcatggggattgcattgaatctgtagattgcttttggcaagatatccatttttactatattgaacctactcctccaagaggagtagactgcaggaaaaaatcaaactcaggggtgaaatcaaccaagcggaaaaaagaagaactatacaaagaattaaccaaatgaggagttggttctttgagaaaatcaacatgatagataagccctttgctagacactctagagggcacagggacaaaatcctggttagcaaaatcagaaatgaaaagggagacataacaacagatcctgaaaaaatccaaaacaccatcagattcttctacaaaaggctatactcaacaaaactggaaaacctggacgaaatggacaaatttctagacagataccaggtaccaaagttgagtcaggatcaagttgaccatctaaacagtcccatatcacctaaagaaatagaagcagtcattaatagtcctcccagccaaaaaaagcccaggaccagaagggtttagtgcagagttctatcagaccttcaaagaagatctaattccagttctgcacaaac

SEQ ID NO: 3048 - DNA, 1400 bp, mus musculus
tcaaacttctaactaaaataattagaagccaacaactgagaaagactaacaacaattgagatgaaaatgtcaataaaaagccttaaatcgatgaaaattctaggaccagatgtattctcaggggaattttaccaggcattaaaagatagagacaactcttcttaataaaaatagcaacagacacagaattctaaaactccttctatatagtatcacctaaatacccagaccagatgaagaaacaacaataacaacaacaacaagctataagacaatatgcctgatgaacagagaataaacaataataaataatacttaaactaaaaagtaataaaaaaaagacaggcattaaagatgttatacatcatcatcaagactgttttgtccctgatattgaactcatgtgctaataaaaaatgtcttaaaaattacagggatggaaatggagaggagcctgaggaaaggtaggtccaccaaccggaccaaagagggatccagctcaaggggaggtcccaagacctgacactattactgaggctacggagtgctcataaaaagagacctttcatgactgccctctgaaagacataacaagcagctgagtcagatgcagatatttgtccaaccaatagacagaagcagctgaccctgtggttgaattagggaaggttgaaataagctgaggagaaggacaatcctgtaggaggaccagcagtctcaattaatctgggctcctgagatctctcaaacactggaccaccaaacagatagcatacaccagctgattcgaggacaccaacacacatagagtagaggactgctgggtctctcttcattcagagatgatgaacctagccctaaagtgactggaggccccagggagtttagaggtcagatgggatggggcgtgggggcatccacagggagacagggatatggggaggaggtgtgggatgtgtatcagttagagagtagatggaggtacagggaatggattatggagcgtacaaataaattaatttaaaaataaataaataaaagcatttttacattaaaaatgaacaaaaatgcactaaagatataatataaatattgttaaaagtgtggagaagtcagaatccttatattcattgatgatttaaaaataaatggtcgactcgagccccgggccaccttgccagcggagtcgcctgacacccgcaagggcccacacaggattccccacaggatcctaagacctccggtgagtggaacacagcactggccccaatccaatcgcgcggaacctgagactgaggtacatagggaagcagactacccgggcctgcactggggcacaagccccttctgctccacttgagccccgggctaccttgccagcggagtcgcctgacacccgc

SEQ ID NO: 3049 - DNA, 1200 bp, mus musculus
tggatattagccaaatagtacagaaagtccaggatataccccataaagtctaagaagttaaaaaacagaagaaaggcccttgtaaggttgcttaaatcccacttagagggaggaaaatagtaatgggaagcaaaggaagggagagtcctagatggggtagggaagagggagggtaaaatggggcaggatcaggtttggaggagacgggaaaaaagttcagagggccaagagaatgaatggaaatatgcagctaccagggttattgggttggggggggctttagaaagttccagagacctgggatgggagaggcttgctcccaggacacaatgtgggatcttttttgaaatgcccaagagtgggtagatggaacacacagtagtcagacaggaatcccagtggacggttgggttcaccaaaccatgtacaattctattgacccaaaattgttcctgtctaaaaaaaatgcagggacaaaaaggagcagagcctgaaggaatggtggaccactgactggtccaaattgggatccatccaagggggcagcaccaatccctgacaaaattactgatgttatgttgtgctttcagacaggagaataacatggctgtcctctgaaaggctctaccagaagctgactaagacatgcatatactcacacccaagccttagacctaggtggaagatgactatagaagagttagagaaagattgaaggaactgaaggagatggcaactccttaagaagagcaacagtgtcaactaacgtggacacctgggagctcaaatagactgagtcctcaaacaaagaacatatgcaggctagtctgaggccccagcacatatatatagcagagggttggcttttcacaggcctcagttgcagaggatgagcctaatcctgtagagacttgatggccagggtgggaggaaaccctctcagaggcaaagaggaggaaggtagggagaagaactcagcaaggggagacttggggtgtgtgtgcaacatttgggttgaaaataaataaaattattaattaatataaaagagttatattagatttcactatgggatgtgtgcaacatttgggttggaaataaataaaattattaattaatataaaagaattatattagatttcactatttaactataatttttgagtgcattaaaatatatgaattttagtattttttcca

SEQ ID NO: 3050 - DNA, 1600 bp, mus musculus
tgaccttcactgactttgcaacctcacttgttgccttggaagcctctcctgttaatccactaacagcaaggaaaatactcccaacctacaataccatcatcctgaaaaccacacttgtttttgagctccagcttgacaagaaaaaagaatccttaacatcccactaccacctccccaacacacacacacacacacacacacacacacacacacacacacacacacacactgctctactccacaaagcttgcagtattaaaaggacccaatacactgttggtgaccttcacaacaactgttctggtgtgtttttttgtttttgtttttttgtttgtttgtttgttttttgttttgttttgtttttgttttgttttgttttgttttttgagacagggtttctctgtgtagcccgggctgtcctggaactccctctgtagcctggttgtcctggaactccctctgtagaccaggttgtcctggaactcagaaatctgcctgccatttgggattaaaggcatgcactaccttgccaggctctgtttttttttttttttttttttttttttttttgtttgtttgtttgcttgtttttgtttttgattttttttaactcagaaaacctgcagtgtaaaaggctggaacattctgaactgcctatctccttctgccttcataactgcccctggtattatgaggcctacaggataagggacttcagcactacacttttccagcagaagacactaccccaatggctttggcatctctttttctcttctgcttcatgtggcctgcttggtaatcaaataagaagcagcccacctctcccagtcccctaactacctgctcacacacacagaacaaaccacaataggaaccatgctctatatgacccacgttggaaggtatcctaaatgctgtgcccttcatcctaccacctcctcacatcccctatttatctcttctacttacatctcaccatcccacgtgggagacatcgctcagcaaacaaaagcatagagtgcttttgcagatgacctgagcttatatcccactgtacatgctgtgtggctggcagcagcctataaactacatatagctccagggcatctgatacccacacaatctaagtaaattggaaacagaaatgtatatttggaaaaaggagatgatgactggattggaaaacaggatctctatttgaaggtgatgtgattctttatattaagagaatctaaaaattccaattactctgagagcagatccacactttaacataaagtgtgaaattataaaattaacagaaaagtcagtagactgtctatatattagtaacaaacatattgaataagagatcattggaatgatcccatttataatagacaccaaagctaaataaataaacaaaatgactggcaaaaacataaccaaggaaacaaaagacttctacaataataatattaatacaattaagaaagaaattgaaaaaaatcctaaaagttactcatagataagaatcaatagtctgaaaatgggcaagttatcaaagacaaaattcaaatttgatgcaatccaatttaaaactctaaggccactttac

SEQ ID NO: 3051 - DNA, 1200 bp, mus musculus
ctgcatacctagctcaaatacttttcttttctttttaacatataattttctttaaaaaattttttattggttattttgtttatttccatttccagtttcccttctgaaaaccctgataaagctgtctcctgagaggctctaccagagtcttacaatacagaagtagaagcttggagccaaccactggactgagcacagggaccccaatggaggatttaggggaaggactgaaggagcagaaggggtttgcaacaacataggaagctccatagtagaagacttcccagtctgtcttcattcacagatgatgcacctaaccctcaagagacttgaggccccagggagtttagaggtcaggtggggtgggggcgtgggagcaaccacatggagatggggtagggtggagaggaggtgtgggatgtggagcagttggagggtgggagtgggcagggaatggaatatgaagtgtaaaatacaaattaaaaataaaattaaaataattattcaatcattttttacagtcctgattttatacccttctggtctcttgaggggtctcttccaccgtgtctaaaagaagatgtgtgaccctccaccttacaagatttcctcacaccctgaggccccatgtttcttgagagttaggttcatcttctgactgagtctaaaccctgggagtcctctgctgtttatgtgttggcagactcatatcacctggtgtattctgcctggttggtggccccagtgtctgagagatctcatgggtccaggttagttgaaactgctggtcctcctacagggtcactctcattcccagcttctcccagcttttccgtaattcaaccacaggggtcagcagccaggttggtgccttagtgtgaacccaatgtgtgcctgtctctggaactcctattcaaaacagtagggcatttcatctaagtgtccactttgaatcctcacagtctcacacctcccaggtctctggtacattatggacagtcctgccacctcctacctcctgaggttgcctgttcccattctttctgctgcactgcccccttccccgagcttcactcctgttcctcccacccaacacgtgatcatgttcctgtcttcccttccctgtccccttttaaacctaggtccctcccttcctcctgactcccgtgattgcttccttcttcctcccaaatgggattg

SEQ ID NO: 3052 - DNA, 1000 bp, mus musculus
tgttttcctgtttttctttaaggacttgtaactctttagcagtgttctcctgtatttctttaagtgagttattaaagttcatcttgatgtcctgtaccatcatcgtgagatatgcttttaaatccgggtctggctttttggttgtgttggggtgcccaggactaggtggggtggtagtgctgcgttctgatgatggtgagtggtcttgatttctgttagtaggattcttacgtttttcttttgccatctggtattctctggagctatgcaggatacactcggcggggtcctggaaccaagatgtctgtgcagggtacacttggcagggtcctggaactaagatatctgctgccaatgctcaggcaaagcgctcctgcgccgtgcatgtccctatcctctggccgggaaaaaggtcaaatgcctatgcaggatacacttggtgggatcctggaaccaagatgcccgctgctgatgctcaggcaaaatgctttcaagccaggcagatccctatcctctagccgagaaaatggctagctgcctatgcaggatacactcggcggagtccctgaactgaaatgtctgctgcagatgctcaggcaaagcgctcccgcgctgggcagattgcaatcctcagaattcttaagatcgcgtggctggtgttgtagctggaggtagtcagccgactctgcgccctagctaccccggtgctgcttggaccagaaggggcttgtgcccctactcagactgggttttctgcttccctgactagtgcagtctcaagtcccgctcaattggattggagcagatgctgtgttccactcaccagaagtcttaagatcccttggcaggtgttgtgggtagctggcagtaatcagccgactgtgtgccctagctacccctgtgctgctcggaccggaagggccagttctatttctttcatctacctctatgtcattgtacagtaccatgcagtttttaccacaattgctctgtagcacag

SEQ ID NO: 3053 - DNA, 1000 bp, mus musculus
tagatatgcttttaaatctgagtctagctttttgggtgtgttggggtgcccaggactaggtggggtggtagtgctgcgttctgatgatggtgagtggtcttgatttctgttagtaggattcttacgtttgtcttttgccatctggtaatctctgaagctctttgttatagttgtctcaggttagagcttgttcctcaggtgattaagttagcctctatcagcagacctgggagatgagctctctccttagtttcagtggtcagagtaccctctgcaggcatgctctcctcttgcagggaaggtgcccagatatctggtgttctaacttgcctcctggcagaagttgtgttccactcaccagaggtcttagcatcccgtgggggatcctgtgtgggtctttgtgggtgtccttagactcctcgggcaaggtaccccggtgctggagtggatcggaagggacttgtgcccctaatcaggccgggttatctgcttccctagttaatgcagtctcaggtcccgtgcgattggattagagcagacactctgttccactcaccagaggtcttaagatcccgtgggggatcctgtgtgggtccttgcaggtgtctggagacccctccggcaaggcaccccagtgctggagtggactggaagggacttgtgcccctgatcaggctgggttatctgcttcccttgttaattcagtctcaggtcccactcaattggattggagtagatgctgtgttccactcaccagaggtcttaagatcccttgggggatctcgtgtgggtctttgcggggtctggagactccacgggcaaggcaccctggtgttggaatggaactgaaggattgttttgattttatatttgttgttttgtttgagataccaagtgaaagagacatagatagatagataaacactacctcagagtaaaatgctggaaaacaatttttccaagcaaatcccccccacatgccccactcccccccaaaaaa

SEQ ID NO: 3054 - DNA, 1200 bp, mus musculus
tcctatcacatcctgcctctatgagagtgctccttcacccacccacccacccactcccacctcaccaccctagcattcccctacactggagcatcaagcctccataggaccaaaggactcccttcccattgatgccagataatgcaatcttatgctaaatatgcatgtggagacatgagtctctccatgtgtactctttggttggtagtttagtcctgctctagtggagcaggggaagttccatttagttgatattgttgttcttcctatggggttgtagtctccttcagctccttcagttcttctcctaactcttccaatggggttccttgggttcagtccaatggttggctgtgagcattcacatctgtattgctcaggctctgacacaaactctcaggggacagttataccaggctcctgtcagcaagcacttcttggcattagcaatagtgtctgagtttggtgtctgcagataagatggatccttaagtggggtggtctctggatgacctttccttcagcgtctgcttcactctttttccctgtattttctttagacatgcacagtcccggtttaaaaattttgagatgggtgtgtggccctatccctcaactgtggtctgtgcctatccattgtatatgttctctgcaggttctatctcccctttgttggatatttttgctaatgttatcctcattgtgtcctgagaacctcttgcatctctggtatctgagaatttttagtggtttgccaccacttccacatcccccactgctacatacttctattcaatttcctgaccctccgtacttctttcacatctcatcccacacatgatcctggccccccttttcccttccccttctctctctcaaccaggttcctccctccctctaactcctataattattttctcccccttctaagtagaactaaagcagcctcactttggtcttctttcttcctgagcattttatggtctgtggattgtattctgggtattttgagctttggggtaaatatccatttatcagtgagtgcataccatgtgtgttcttttgtgactgggttatctcacacagaatgatattttctagttccatacatttgcctttgaatttcatgaagtcattgtttttattacactccattgtgtaaatgtacaacttttttttttaatccattcctccattgag

SEQ ID NO: 3055 - DNA, 1600 bp, mus musculus
gtttcctggatgttttgagttaggatctttttgcattttgtattttctttgattgttgtgttgatgttttctatggcatcttctgcatgtgagattctctcttcgatctcttgtattttgttgctgatgctggcatctattgttccagttttctttcctagggtttctatctccagcgttgcctcactttgggttttctttattgtgtctacttcttttttttaggtctagtatggttttgctcatttccatcttctgtttggatatgtttttttctgtttttctataaggacttgcaactcctttgctgtgttctcctgtatttctttaaatgagttattaaggaccttcttggtgtcttctaccatcatcatgagatatgccttttaatctgggtctaggttttcaggtgtgttggggtgccctggactggttgaggtgggagtactgggttctgatgattgtgagtcatcttggtttttgttagtaagattcttaagtctgcctttcaccatctggtaaactctggagtcagttgttatagttgtataaggttacagcttgttcctctcgtgattctgttattctctaccagcagacctgggagactagctctctcctgagtttcagtggtcagagcactctctgtaggcaggctctcctctttcagggaaggtgcacagatatctcgtgttcagacttgcctcctggcagaagatgaaggcccgaaacaggacctgtcccaaaagctgttagcttctgtagtccacactctcacctgtgcagacttgtctcagtggagtccgggagccaagatgtctcctgcagatgctcaggcaaaatctccagggctggtcggacacctatcctctggcagggaatgtgcccgaatgtctggggcccgaaaagggggctacctcagatgtcctgtggctcccgactgtcccagaagctgttagcttctgtagtccacactctcacctgtgcagagtagtctctgtggagtctgggatccaagatgtctcccgtagatgctcaggcaaagccctcccgggctcttagctaattttctactgttatggttacagaacaaatagcaaggaatcttatgctcataccaaacattttattcttttcataactttccacataaataaattagcaagttattggatagaccattttcatgaggtaattatcctgaatttgatagaaatgtcaatttgaagttgtgcttattgtaatatcattcagctagatttttcaaggcatcctttttccattgttagctgtctatcttgactgttctctcaaaactaggctaggattgttcattggagcctgtacatatgtccctttagcttgtgtttccacatagcttgaaagctgcacagcattgagacttcttagatgttagatcagagttccaaatatgagactacaggtaagagaaaagctaaattactctctatgtatcatagactctgcctttcattaggaagagaatcaaagtgtctgtagacttgctttaataattttgtatcttctgttattatatactctatttcaattggtttcaaatgatgaaagcatatattgc

SEQ ID NO: 3056 - DNA, 1200 bp, mus musculus
ggacatccagagttttgcaggcaaatggatggactagaaaatatcatccagagtcaggtaactcagacccaaaaagacatgcatggtatgtactcactaataagtacatattagccaaaaagaaaacaaaaatagtacagaataccaaagatgcagtccacagaactcaaaaagctcaacaagttgaagtgcccaagtgagtacacctcagtcccacttgggagagaaagagcaatcactagtcaggagggatatgggagggaaagtggacagggtaggaaggagttggtgggagtggggaaattgatctggtattattgggtgagggaaaatgactgaagccctaaaggccagaaaaaaagaatggaaacaggcaacctcaggaaataggaggtttggcggacaccccaaaatgcaccagagacttgggaggtgagagacaggaaggcctggctgtaggagagggaacttaaagaccccacctccagccagaaaactgaacttcaaatgagggtgaggtttgccatcccacagtcccatctctgatcagtaattgctcctgtctgaaaggattacagggatagaaatggagaggagcttgaggaaaagaaggtcaagtaacaaactcaaaatgggatccagatcaaggggtggtcccaaggcctgacgctattactaagcctatggcgtgctcacaaaaagggacctatcatgactgccctccaaaagacccaacaagcagctgcaagagtcagatgcagatatttgcacccaaccaatggacagaagctgctaacccctgttgttgaattagggaaggctgaaagaagccaaggagaaaggtgatcctctaggaggaccagcagtctcaattaatctgaaccccccaagatctctcaaacactggacccccaaacagacagcatataccagcttatatgaggctgccaagaaatatacagtagagatctttcagatctgtgctcattcagagatgatgcatgtaaacctcaagagactgaaggcctcagggaattgagaggtcaggtggggtgggggtggaggcatccatatgggaaagggtgggttggggagaaggtgtgaaatatggagcagactgagggtggatggagggggcggggaatggaatatgtataaaaataaattaaaaataaaataatttttttaaaaaagaaaaaa

SEQ ID NO: 3057 - DNA, 1000 bp, mus musculus
attagacagagtgtggaatgcccacaatacaactcacagataatatgaaactcaagaggaaggaagaccaaagagtgtatgtttcagtcctacttagaaggtagaacaatataatcaagaaaagtaggtgggagggtcttgggaagaagagaggagggaaaggggggaaaagaggggcagaatcatgtgtgggaggagaggaaattgttgtacagcgggtcagaaaattgaacagagtcatgtagcaatgggggatggaggactgggggtagcaaccagaacatctcagatgccaggaaagcaagagactcccaggacaccacggggatcacattagttgaaataccacacaaaggggagggagaacctgtggcgaacatatacagaggttagatatgccccccaaagttgaagaatggggccacccacccatctccaaaactttaactcagaattttcctgtctaaaggaattacagggaaaataatggaacaaagactgaaggaaaggccacccagagactgtcatacctgggaatctatcccacatgcagacaccaaacccagacactattgctattgccaagaagtacttgccgacaggagtctgatacagatgtcttctgagaggctcttccagatcctgagaaatacagatgcagatacttacagctaaccatctgactgaacacagggaccccaatagaggagtttgaggaagaagtaaaggagctgaaggggccttatctggcatcaagggagggaaggcccttggccctgtgaaggcttgatgccccagtgaagaggaatgctaagccagtgaggtggaagtgggtgggtgggtctaggagcaccttcatagaagcagggtaaagggtgatgggacacttggtttgcagaggagaaaacggcaaagagcaaaatatttgaatgaaaacaaataaaatatcaaaaaaatagcaacaaaatagcatataaactgcctgtggaagttgatattt

SEQ ID NO: 3058 - DNA, 1200 bp, mus musculus
gttctctatggaatgttctgcacctgagattctctcttccatttcttgtattctgttgctgatgcttgcatctatggttccagatctctttcctagggtttctatctccagcgttgcctcgctttgggttttctttactgtgtctacttccctttttagttctagtatggttttgttcatttccattacctgtttggatgtgttttcctgtttttctttaaggacttcaacctgtttggctgtgttttcctgcttttctttaagggcctgtaactctttagcagtgctctcctgtaattctttaagtgacttatgaaagtccttcttgatgtcctctatcatcatcatgaaaaatgtttttaaatctgggtctagattttcggttgtgttgggttgcccaggactaggtggggtgggagtgctgcgttctgaagatggtgagtggtcttgatttctgttagtaggattcttatgtttgcctttcgccatctggtaatctctgaagctagctgttatagttgtctctgttaagaggttgtacttcaggtgactctgtttgcctctataagcttttacatttcaaatgctatcccctttcctagtttcctctctgaaattaccctataccttccccctgccctgctctccaatccacccactcctgcttcctggccctggtattcccctgtactggaacatataatcttcacaagaccaagggcttctccccaattgatggccaagtagaccatcctctgctacacatgtatcagacacaagctctgaggggtactggttagttcatattgttgttcatcctatagggttgcagacccttttaactccttgggtatctcttgtgaggctatgccagtgcctggaaaatatagaagtatatgctcatagtcatctattggatggaacacagggccccccaatgaaggagctagataaagtatataatgttgtttttagttattcttaccatttattttaaagcctggaattgtcatatttcttttgtatatctgggatttttgtttgtttgtttgtttgtttgcttccacatgaatatttggatagattttccattttgtgtaaagtgagatggggttttgattgttattacaatgagtttttaaatgcttcctacaaatatagtcattttcacaatgttattctaccaatcaatgatgacca

SEQ ID NO: 3059 - DNA, 1600 bp, mus musculus
tttacactttgtattttctttgaccaatatgtcaatatcttctgtagtattttctatgcctgatattatctcttcgatctcatgtattctgttgacaatacttgcatttgtagctcctgatctctttcctaggttttctgtctccagagttggctgcagttatgatttcttcattgtttctattttcattgttaggtcgtggaatgttttgttcaattccttcacctgtttgattgtattttcctctatctctttaagaaattttcttttctttctttctttctttttcttcttttctttctttctttctttctttctttctttctttctttcttttttctctttctctctctttctttcttcctctctctctctctctctctctctctctctctctctctctctttcttttctttcctctttaagggatttacctgtttttctaaatttctttaatggagctatttattttctctttaaaggcctctatcatcttcctgagttgggattccaggacagaatcttgcacttcagatatgtttaggtatccagggcttactgtgataaaagaactaagttgtgatagtgcccaattacaatggcttctgtttcttatgtgattgcacttgccttttgacatctggttatctccgttgttaactccccttgttgtcttggatcagaccaggcctccttgggaccaggtacagccttgtgacctaggttagaacaggccttctaggaggcaggcagtgcttgctgtttttgattagagcaggcatcctgtgtccctggttaggacagaccttcaagaagacaggctggctgaggggtccagagagagcggtggcagtaagcattccaatctgcccagggtgtaggtataggtgcaaactgaaaggatggtagtctaaatcttcatttttaaagcagcagttaacatacattataatccaaattcttctaagaaacctcaaagtacatttgaaaaaaaattccttcacaattcattaagaaaacttgtttttcttcatgtgcatcatgggagttttacaattcaatggaatagtgtctttgagactatttatcataatgttcctaatcatcatgattaggagcaaaaatatggacatgtttgtgtgtgtgtgtgtgtgtgtgtgtgtgtgtgtgttccagaatagaagaggtatcactgattcactgatgttctttttatggcacagtatctttttatccactatttttttgttgttgtttattcaattttagcttgatcgtggtccctctccctcctctccttctagtcctatccttacatctttcccctgatcctcttctctctttatgcccagggaagtggaggccatttttagggaagcaatatattttctgatgcttggaggcaatcaccaaacttagaaatagaaagtagaatttgcaaaaaaaatagaagaaaattaaaataaatatgaaaataagagtaattacaaataaggaagaaaaaggtttggtctgaagacatttacatgtgttatgaagcattaacatctacttaaaataaagcataaagctagtattaacttcacttaatacaaattat

SEQ ID NO: 3060 - DNA, 1000 bp, mus musculus
ataaaaaacacaagagattagaaataaaaaaaaaatgagatcttcctgagcccagtcgaggctgctaagggctccagagggctcttcacactgcaggaccttgggatcacctcgggatcatggttaagtggaacacaacatcacctccaaagaatccctgaggctcttgtgctggaaggaacagggacaaaggaaccacacccaaccagaagctggggtctgttctggtcgggaccacccctgccatcttccttctgagcccagcaaaggtcactaagggctccagagtgctctccatttcacaggacctcaggatcacctcgggttcatgggtgaaaggaacacagcatcagcttcaaataattgttgagggtcttgtgccagcaggaacagggaagaaggaaccccacctgaccagaggctgggatccattcaggttgggaccagcccctacatcttctgtgtgaacccagtcaagggaatctagggaaccagaggactctccacactgcaagacccctagcacacccaggacctcctgatcacctgagagcacatgggcgatggaagcaacagatcttcttagtcagggtcccatagagccttcatcctcagccaggaggcagagctgagacccagactgagcaccttccttgccagaggacagttggcctaaagggagggctctgacaccaggactcaggaagcagatcagagctccagactgctggacacctcccctgcaagaagagagcttgcctacagagagtgctctgaccactggaactcaggtgagacttggactccaaggagtgctgacagaggctaacagaatcacaggaggatcaagctccagccagaggcaacttgaacattaacaccagagatttccagatagtgaaaggcaaacctaagtatcttactaacacaagtgccttctggttgcaccttgggcaagtagtctgcggacagccccaaggtccccacaggactctccacg

SEQ ID NO: 3061 - DNA, 1400 bp, mus musculus
ttatttgatttccaaaataaagatacatgagcctctttacataagccaagatgtgtgtcctactcattcaaaaatgtcaaaagtgttgttctttattatttaggatccctctttgaatcgtctatttctaataatttattatatgggatgttaaataaaatgtttctgatggattgtccatattttaaaataattggttattttgtgtgggggggaattggttattttatttatttacatttcaaaagttatccccgttcccaatttcccctctctaaatcccctatcccattcccttccccacctcctgcttctatgagggtgctcccccacccagtctagcattacagccctagtattcccctaaactagagcattaagcttctacagaagcaagggactcccttcccactgatgccagataaagcaatcttctgctacatatgcagttggagttatgggtccctccatgtgtattctttggttgatggtttcattcctgggagctagggtgtgtgtgtgtgggggggtctggtttattgatattcttgttcttcctatggggttgcaaaccacttcagctccttcagtccttcccctaactcctccattggggtccccgtgctcagtcagatggttgattgcaagcatctacatctgtattgttcaggttctatctcccctttattgagtatttcagctaatgtcatctctgttgggtcctgggagactcttgcttacctggcatttgggactttctagtggctacccctagatccccatcccccactgctgcacaactgtgttcaattttctgaccctctgtacttctttcctgtatcctcctacacctgatccggagccacattttccctccccctcctctctcccttctaggaccctccctccctcttcttcctttgattatttttccccttctaagtaggactgaaaagtccatacttcatatttttttaaatgctttttactttcaaaattttactttggtgtttttgagtgttctcttacatgtccatacactgaatgcatccagtgaccacagaggccagaaaaggatatcatgtcccctggaattggagttagagattattgtgggcagccatggagattcttaaaatccaacttgggtcctatgcagctcctaaccacaaaaccaactccccagccttatttatttatttttttatcattttgaaaaagagaatttcttgggagtgcattccatatacttccaaatttgttagcaatctattcatcacatattcttttcaatgtcttcagcacctcgttcattttttcatttttatttcaaagagttagtgtttattctttatttcttttctgcagctatcttggtaaaagttctcagttgatgttga

SEQ ID NO: 3062 - DNA, 1600 bp, mus musculus
ctcacaagagacagctatatctgggtcctttcagcaaaatcttgctagtgtatgcaatggtgtcagcatttggtagctgattatgggatggatcatttttaatactatcatattataaaacatgcattcactaatcttttaaaaatacaacatgccagcatctcctatttggtgaagagtgagccatcagctggtcaggaggcccttcagacaagccacttgttcacaaaggcagatggaaccttgctggacctaggctagtgcagcagctagaaactatcccagcctcctgagagctgtgcctttttcacctctcttgaagttgggattgtgagggcctgcctaaatttctcggagaaacagaccacacttagtcttaatctcttcccttctccctgttttactttgcttagtttttagcagcagtataccccatctttatatatcctaagaaacacgaatcctaggtttctattaaccaaataaccaaataaccagaagatgtgaggagctctgactgtaatttcctgaagtttaccaggttgtgaggacagatggggttcttggatgttgactgccttggagttcctgtcccagaggaaggcagagaccactctggcttttctagagagcccctgatgcttaccaggcttccacacctctcctgagtggcttcacccatcctttgctgtgcaagtggagtgagagatttgctttttttaggggactgttttcctaggctctgtctcctgcctccctctggcttactatactccaggagacccagcaacctcatgtatcaccctgaggtattgcaaggaaaggaacatgacagcttcattgaatttgtggtttgccaacttgtaccccacctgtctgtgagatcccataattgctgcaggatactacagtaagggatgttatgaggatgagggatttgttgttccccacagtgcactgagcaggggagggaggagggaggagccatgctgctaacattctggcattcccccctcctagaataaatcagggcatttgaagggtagagcagtctcagcttaggttgcttgtaagataaatctggagaagcacggttgttccattgaacaatatttgagacaaaagcctattgtaaataactgctttttttcttttgtcaaattgtttttgtttttatgtttaaaaaatacaacacacgatcagttctaaattacaatgttaacttataactattaaaataattttctaacatcaagttaaataatctagatttttgaaaaaaatatttataggatgggatgtattttactatgaaacaaataaatgtaaattctgaccataaaaaggaatctttatgaacaaaatggatagtatggtctgtaattggtactttaactgttgaggtttaaagacaagactgtgttgcaattttggtatgtcgagaatcaacttagaaaataatttccttagaatcattataattggtttagggtaataaagttatttcttacatgatattttaacaaatcagtctcctgaatttatattgatctgacagagctgagcatcaatgatgcatatggtttaacaacttgtattt

SEQ ID NO: 3063 - DNA, 1200 bp, mus musculus
accaatgcagagatggaaacaagggtattaacctcaaacactaagcctatacagacttcctctgtcttaatgtttgcttgctgtgaagagacaccatgaccatatcaagtcttttttttccctcatttaaatgtttattggatatttcattgatttacatttcaactcgtatgcccatttctggttttcccgctgcaaacgccctatcctatcctcccttcacctgcttctagaagtgtcttccacccacccatttcaaccacaccaccctggaattcccctatatttgagcaccagtccttcaaaaggaccaagggcctctcctccaattgatgccagattaaggtcatcctctgctacatatgcagctggagccatgggtccctccatgtgtattcttttgttggtggtttagtcactgggagctcgggggtggggtggggtctggttggttgatattgttgtacttcctatgaggttgcaaaccccttcagctccttcagtcctttctctagctccttcattggggtcccggtgctcaatccaatggttggctgctagcatctgcatctgtatatgtcaggctctggcaaagcctctcaggatacaactatatcaggctcctgtcaataagctcttcttggcatctacaatagggtctgggtttggtgtctgtatatgggatggatactcaggtgggacaatctatggatggcctttccttccatctctgctccacattttgtccccatatttcctttaggcaggagacattctgggttaaaaaattcggagatgagtgggtggccccatccctcaaccttgcctaatgtctggatatggtctctacaggttcttctgcccatttgttccatatttcagctaatatcatccttgttgggtcctgggactttctggtggctacctccagttccctatcccccactgctacacacctgtgttcaatttcctgaccctctttctatcattcctgtctcctcccatacctgatcctgtccacttttttccactccccctcctctcttcctcccaaggaaagtatttaattggatcttgcttacaatttgagaggtttatttcattgccataatggaaaatatcatagctatagtaattaaaaacagtatcatgttggcataaaagtagaagaacagaccaaggcaacagcatagaaagtta

SEQ ID NO: 3064 - DNA, 1000 bp, mus musculus
ccaagatctgatcccccccccccacacacacacacggaagaggaaattctcacatataccagattctgtaggcaaaaactttactccccaagtttaattggtacacaggcaaataagtctgtgattggacagtagatagaggtaggtaggttttcacttacatagctcggggtcacaggtagagagaaaaaagaggaaaaagccagataaaggtggacactttgatgagacgaggtggaccacaagcaaatgtccaggaaagacaaaaagtaacaagggacatatgaatggggtataagttaaatagaatagctacacaacttgcccaatctagctttatagtttgtaaatagaatacctgggttgtgtgtcttttttatggggtagctagaatttataattccatttacaatactcttattttgttggatattttctctaattacatttcaaatattatgtcctttacatgcccccccccccggaaaatgccctcctcatatcccctcccccctccccctgctcaccaacccacacactcctgcttcctgaccctggaattcccctacactggggaatagagccttcacgggacaaagggcttctcctcccattaatgtccaactaggccatcctctgctgcatatgcagttggagccatgagtcccaccatgtgtgctctttgggtgctggcttacctggcagttagcatgtagaagaagacaaattcttatctccttgtacaaagctaaagtccaagtggatcaaggaccttcacataaaaccagatacactgaaacttatagaagagaaagtggggaagagcctcgaacatatgagcacaggagaataattcctgaacagaacaccaatggcttttgatgtaatatcaagaatagacaaattggacctcataagattgcaaagcttctgtaaggcaaagaacactgtcaagaagacaaaaaggccactgacagattggaaaaagatcttcactaat

SEQ ID NO: 3065 - DNA, 1000 bp, mus musculus
gaatagtatcacgacagaaaatcttgtccaactggagacacacataactcctagcttgcacctgcacacaggagcagatcctgtgctccatctccacttaccagcccacacccaaagacatcttgaccctcaggagttatgacatacccaggaccacaagtaaggcccaaaaacccactgcaatacctgacctaactgggacatcccatgggcccagagaaagcaagaagaacccctagctagagacacatgttccttccagtttgcattagtgtccaggagcagatcctgtgctctgctttcccacaccaaccacatccagagagagcttgacccaaaagggttctgacacctgcaccaaagatctgcgctccagacccccactggtacctagagacatcctgaccgaaggaggtccaacataaccaggctccagtcagagaaagcaagacaattaacatcagagataaccagatggcaagagacaaacacaagcaacagaaaccaatgctagtttgcaacatcagaacccagttttcccaccatagcaaatgctggatattgcaataccactgaaaaccaagattcagatataaaatctcatctcatggtgatgatagagtgttgttgccggccagtggctcacatgtctgggttctagtctgggaaggcatcttggaatctgcaagagaagggcgtggtggtggtgggggaactaggcggcacaataaagatggaaccaagacaaccagtctgatcaaggttcgattttactatttccgacactcagttatgaagcaggggaaggggccctttccctccaaatcatcctggagtaaagtagcaggtgaccacatgtttgactccagaacagcaaggtggcaggcagctgcagtgggagtggcagaacagtacaatagggctgcaagctccaccctgactctctcttctgaaacctgagcaaacaggtttcaggctagggaggttacaatagaggatt

SEQ ID NO: 3066 - DNA, 1400 bp, mus musculus
cttgtacagagctcaagtccaagtagatcaaggacctgaacataaaaccaaatacactgtttctaagagaagagaaaactggcaagagccttgaacacatgggcacagagaaagtttcctggacaggaaaaaaaatggttcatactctaagatcaacaataaagtaatgagacctcataaaggcaaaggacactgtcagtggaacaaaacagcaaccaaaagattggggaaaaaaaaatcttttccaatcctacatccattagagggctaatatccaaaatatccagagaaatcaggaaggtagactccagattaacaaatagccctatttaaatggggtacaaacctaaacaaagaattatcaactaaggaacactgaatggtgaagaagcacctaatgcaacatttaatatccttagtcattggggaaatgcaaatcaagatgacactgaaattccatctcacaccagtcagaacagctcagctaaaaaactcaggtgacagcagatactggtgaggaagtggagaatgagaaacacccacacatttcaaatattatccccgtttccccttcagaaaccccctatcccatcctgcttctataaggtgttccccctaacacccactcccacctccctgccctggcattccccactacggggggcaacaagccttcacagaaccaagggtctctcttcccattgatgcccaacaagaccgtcttcagttacgtatgtgtccctccttgtgtactctttggttggtagtttatcctcagggagatttggggcctctggtttgttgatattgttagttctatggggttgcaaacccttttagctccttcagtcccttctcaaactcctccattggggaccccatgctcatttcaatagttggctgcaagcatctgcctgtgtcaggctttggcagagcctctcaggagacagctctataaggttactgtcagcatgcccttctgggcatccacaatagtgtcttggtttggtgattgtatataaggtggatgcccagatggggcaatctcttcagtttctttctttccttcagtttctgttacataatttgtctccatatttcctcctgtattttgttcccccttctaaaaaggaccaaagcattcacattttggtcttccatcttcttgaggttcatgtggtctgtgaattgtatcttaggtattctgagctttagggctaattaagtacttatcagtgagtgcataccatgagttttcttttgtgactgggttacttcactcaggatgatattttctagttccatccatttgcttaagaatttcatgaagtaattgttttcatagctgagtagtactctactgtgtaaatgtaccacattttatctatccatttctctgt

SEQ ID NO: 3067 - DNA, 1200 bp, mus musculus
gaaagtatgtaatctgatttttgactttgatttcatggggtgttacaactgagagattgcctggcgtctctgaagagactttggactttgcagcagttacaatactgaatatctagtggtacatttgaagttggttttaaggcattttgcattatatgcctaaaagtctatggggggccagatcatggaatgtgataacctccatatgttcatgtgtggggccatgaaaggcagcctgttttggttgaaggaggcttgctctggagacccagtagagacccattaggaaactctacatgggacagaacagtgagccatgttcccagagacagatgcctgacaccacagagcccccaactccataattctgtgactataagttactcagacaatgtcccaagcttctggcattctggctagtctccatccccacagttacctgactatagacaggtatgctcttccccatagttacctagtgacatcaaggtagcccagcccactataaaaggggctgcttggcccatcttctctttaagccctcacatttcgtactctcatctctagccctccttcgctctctcccttcccctctctttccctgtggccatggccaacctctctacctctttctaccttttctctttccccctgcctttctacaataaagctctaaaaccatagatggtctctgttcatcaacacctgcttaaatgatgagataagcttttccctaaagagctgcttctatcctctccatggaagaagaccttcctgagttccagccacagactggaccaaggactcttgaccctgtggaaaccacccagcgtcccctctctccctgccctctcctcttttcggccctggggattaccaagtcatctccgggtaacctcccccattttgttcccagctcttcagcggtatccagtggtgtctagggtgcctgaggccgagaacctgttttctctggcctcagtgaggcccagagacctaggactgctccttggccaacccctagaggactgggctcagtggcttcctacaaccagacacccacccaagccatggggagagtgtgcagcagtcctcccttgtctgcccatccagagcacgggaactctggctggatgcgggttttctcctactccctttgtacccccacacccactgccctgctttcatgtatttgaaagc

SEQ ID NO: 3068 - DNA, 1200 bp, mus musculus
taatcaactcttaaatgtgttgcattttgcataatttctgagtttttaatataatagcagtatctggaagaatactactaacagaagtgtggactaataaaatccaagtgattcctaaataaatcaaaccaaacaaaatgataaaaataaaattaaaagtcatcatttaacttaaacatttagaagttcagaaaaaaattcaatattttccatacttaaaaaaatattaaaacaagaaacagccatttaaaaaagatagtagtgaaaagatgaggacacctaatatcaaccactggcttctgtaggtgggatcctgctcacatgaatgtgtgcacacacatgcacagtggctctgaacactgcaggggtcatttccaggtcttctccacttagtaagttaaaacggatgtcaggccgggcttggtggcacacacctttaatctcagcacttgggaggcagaggcaggcagatttctgagttcgaggccagcctagtctacaaagtgagttctaagacaaccagggctatacagagaaaccctgtcttgaaaaaccaaaaaaaaaaaaggatgccaataggctccaagcaaaaaaaaaaaaaaaaagatagtagtgaatcattttaacatttcaaactctcctttcagttcttactgtgtcaagagttttggttttaaatttttgctattggttcccacattatttcagcaagatgcaggagagtacatacatattgcatgcccattattttgtgaatgtgttcgaatctattggttttttttgttttgttttgttttttttttttttttgattagcaaaggagttatttattctgtctgaaataagttgttaaaaatttgaaatacatgtgaacattatcaatgaaagatataaaaagacctggagtggatggtttagttaataaattgccttttatgcaagcacccatataaaagctgggatagtcagcacatatatgtaactcgagagcaagagatattgacaggagaattttaagaaatcaatggccttatagtttagacaaatttgcaagctttaggttcaattagaggtagactcaaaaataagggtataataaatagtagacaaatatctaatattttcctcttttatgcacacacatgcaaacacaagaacatatgtacattcatacactagaaagagagagaaaggtgggat

SEQ ID NO: 3069 - DNA, 1000 bp, mus musculus
cgctgtgttccactcagcagaggtcttaggatcccgtggggagtcccgtgtgggcccttgcgggtgttgggcaagactctgctggcaagcggaaagtggattttgaaactctcccagggacagagagaaaatcgtggaatcccgtctagtgtgtgcgtgctggccggtgtctttgttctgagtgtctgttttatgtttcctgaaatgaacatgtgctcattgtgttggtttgttgtatgtgtctcatcctgtgtctctgaaacatggcacagtctgagtttagatccgcctgagtttgttttctctggtgtttatagacaatggggttttctgaaacacacacttggtatttgcagctgtccctctgggctgtaaggaccggaggactgtggtcagcagatgtcctaggaagactgtcacctaaccaggggatgcccaggggagtagggagagccagagacgtctggcagtctccagagatcagtcagaggaaccaagttttgtttatgaaatggcagcttacccttctaattcttttgcctgctcgtggaagacgagaacgggttgcatgtgtctggatctgtttgtttctgttttgtgtgttttgtgtatgtgtttagagctatgtgaaaatttagagaagtgctagtgtgactggaaaagccctactgggagttgattgcaaatgcagttcttaaaggggcaggcagccttttgcttgtaatagaaagttagcttaaaattggtaactcagagttggagtaattataaacaacatgtagcaggagcaaacccaggaaaacaagtctttaaagatacttcaaaatagggataatctttgggccaggactctggcagagtgctcagattgagaaatgtttgcacttgggtaaactctgagctcagctcagagcagcctcagggaggtttgtgtggcatttcttttgtttcacaaaccttcatggggaagttcctgggacctcacctctccctgccttca

SEQ ID NO: 3070 - DNA, 1800 bp, mus musculus
tggaaagccatcctatagacatatcactttgtaggaccatttattttactatattttacaaaacgatcatctcagacaggagctacttctaattgggttcttttagtgttctgagtgtggtgtgtgtgtgtgtgtgtgtgtgtgtgtgtgtgtgtgtgtgtgtgttagttctttaatctcttcttaccaaactttcttatttatttatttttttattttatttttaattttttatctttttggttttttgagacagggtttctctgtatagccctggctgtcctggagcttactttgtagaccagactggcctcgaactcagaaatccacctgcctctgcctcccaagtgctgggattaaaggtgtgcgctaccacgctcggctccaaactttatagttacctgtgatgtaagtatgtactccactgaaattattgtttggaaagtgagtattttatatttgaatatggggaatttgggaagtaaacagaactagatgaaataataagcttgtcaatagtgatgtcaataatggctatattaaaaatgaaaacaggtattgaatcccttccatgagattcattccttcaacctcaaactatgtgatagtttgaggcttagccataaagtgtaggcataagttattttgcaatctacttttaataaggggtcaagctcttctctaacccaacacccagctgaggtagtagaagagaaaagttattaagatatgggggaattggacttgctcagccacagttctttagggagtgaacaggatcttctgtggcagtagttcagtcctgtagcaaacaccaaatatgactcagcagctctagacatgtcctctaggcaggcagattccacacatgaaccagcagcttaagtccagtactttaggcaggcagacactaggcacaaagcagtagctgcagttcagccctgaagaaaacttcaagactcaccaacaggcctgaggagaggccatggaagtggcaagctgctacaggaacctcatgagctgttgtcctttggtaagtttttctcaattgcagtgttaccacaagttgagctcaacaacactatataatgtgaaccaatacatgtgtgtagttattgaaggactgtgaggaggagtaaaccaaactaatgctcagttctcatctcccactgtctgtggggtcatatctatactccttcatgaagcgttctttcacatgtgtgttatatctaaacatgctttaacatgtatctgcttcagaaaacattctttcatatatctactttagcaagacatcattttacctgtgtgccccatcaaaacatcattagacataaatatctttccaaagaaactagaagctttctcttcaataaacaacacagaaacaatttctaaagttcagagagcactgtagagtgagagcaggaagtatgtaaaaaccagaagatacagtgaaaatgcttcaaactttaataacctagacgcaacaagaccattgcaaccattaattcacaaataagtgtggttgcctcaacttggcctatcttactgattgggtataaattcactgactcataaactcagtaagtcacaaaccaaactatatagagatgactataagaaaagaatgtataggaagaaggaggggcatacgcatgtaaaaagaaagtatgcattgtttacatgtatggatttgagaataattttaattaatgaatatgctaagtagagcagaaaataacttagaaattgtcaaatccaaagcaaactctccaaattccagtggttatacaaaag

SEQ ID NO: 3071 - DNA, 1200 bp, mus musculus
ttcagagatgcagtagaaaactctacaaggccgggggtgggtaataggggacttttgggatagcatttgaaatgtaaatgaagaaaatatctaataaaaatgaaatgtaaaaaaataaagtagcaaagtgatttatagaggaaaaaacaaacagacaaacaacaacaacaaaaaaccaaactctacaagggacagaacagtgatccatgttcccagacaaatgagcctgacacgatggcgcccccaactccataatcagtcactcagacaatatccaaagctcctagcattctggctagactccaccatcacagttaccaggcaatagccaggtatgatcctccccacagctaccctgcaacaagaagttagcccacaccattatacaaagagttgattggcccctcctctctctcttaagctcttacctcttttattctcatctctagccctccttctccccctcccttatctcctctctccacatggccttggctggcctctccttttctaccttctctctttctctctgcctttctacaataaagctctaaagccatggaccatctctgcttatcaagaaccactatgcttgaacaatggaataaactgtcccctaaagagccacaactaatttccccggggaaggcctcccagcttcttcagcctccagactagaccaaggactctgtcatgtgagaaccacccagcaccccctctatgcctgtcccctttcccttcagcccctgagctgattgagctgcccctggagccctcactttgttctcagctctttggtgacatacagcaacatctgagatgtccaagactgagaacctgtcatctctggcctccgtgaagtgcagagaatctgtactgctccctctctacccctgtggactgggggtctgtggcttctcacagccaaatgcccacccaggccggtagagagtatgcagcagttctccacatccaccttcccagatcaccagagagactgctgcccaaaaaataaccagatttcctctcctttcatttttgtttttgtttttctgtatacaaaaagttttcagcaattcatatgttgacagattttaaattaatttcaaacctttttttagaaatgcatgtctgaataagaaagtgcaggtgcttctggaagattgcttccatttccttcagatatgtatgcaaaagtag

SEQ ID NO: 3072 - DNA, 1600 bp, mus musculus
attctaaaagatacaaccaattaccacaatcctcataagagcagtatgaacatttcataaaccctggttaggatatttttctgtcataatgaaatcttatgtttactctttgtatgtgtggtgcatgtgtttactcatttattatcatgtttagggtcttagtaacagacaatactgtgactttttaaaaaattaaatctactctgtaaagcaaaaagatattgaaaaaacactggccccattattatttccttgaaagttgaaatgttttgcaaaagaataatatgaaccattgtgtctggaataagttgatacatttgtgcttgtagttactttctttttttttttttttgcatacatgtgtgtatgccttttgcacttgtagacatttttcctttacattctctttttttatttttgacttccttaatattattttttgtattattttattttaattagatatttcctttatatacatttcaaatgttatcctgaaagttccctatacactccctctgccctgctcccctacccacccactgtcgtttcttggccctggcattcccctgtattggggcatataaagtttgtaataccaaggggcctttcttccaagtgatagcagactaggccatcttctgctacatatgcagctacagatatgagctctgggtatcccgagcttttgtccccgctggcaagaacacactcaggacaaccagaattttctgcggcaaaaggctttattgcttacttctcaggaggaagaccccgaaaccagaaaatggcgctgcttttatagcctgcagagtgacgtttcagcacctgatgtggtgtgacagcttctgattcgttgctcgcccatcaccccattattacgccccgagatgggcagtgactaggcgtgaattcactcttgcacttgcgcataaggcttgtttactagttaggcgcagtggaagccagcaccatcttataatggcgattgctcatggcatggctctccacatctggggatactggttagtccatattgttgttccacctatagggttgcagacaccttcagctccttgggtgctttctctagcttctccattaggggccctgtgttccatattatagatgactatgagcatccatttctgtatttgccatgcactggcatagcctcatatgatacagctataactgggtccctttagcaaaattttgctggcattgtgcaatagtgtctgggtttggtggctgcttatgggatggatcccagggtggggtagtctctgcatagtccatccttttgtcttagctccaaactttgtaactcctttcatgggtattttgttccctattccaaggaggaatgaagtatccacccattggtcttccctcttcttaattttcttgtattttgcaaattgtattgtgattgttctatgtttctgggctaatatccacttatcagtgagtgcatatctaatgacttcttttgtgattgggttacctcacaaaggatgatatcctccagatactggcgaggatgtggagaaagaggaacactcctccacggctggtgggactgcaagcttgtacaacc

SEQ ID NO: 3073 - DNA, 1400 bp, mus musculus
ctagagattaactgtatcttaacaattagtgccatcgttactttttttactgctttagtaacccacctggaacacggaaattttagaagaaggaggatatttatacttacaatcccagagggaaaagttcatcatgatttttcttttcctttttttttttatttgcttcaggtagcaataattatatcaatagtgtccttaaagtgtgaggatgaaacagagagaatggactggggatttgaaagatccagtgtacatttcctccagcaaggtcttttaaatctacacagacagcgttacaaactgagaccaatattcaaatggcagagccttgggggacattctcattacaaaccaccatacttagtcaatgactctattatataagtggatatgttttgacaggtcataggccctaggagaaaatttagtttttttctattaaatattattaaacttctttttaatttttttatttgttctttaatagtttttttttttttcagcccaggcactatctccctcccagtccatcctatgactgttccacatcacacacctcctccccatctccaagagcatgcctcaaacccctactcccacagacctcccaactccatggggacccacgcctcttgagggttaagtgcatcttctctgactgagtgtagacctggcagtcctctgctgtatatgtgttaggggtctcatatcagctggtgtatgcagcctggttgataactcagtctttgagagatcctgggggtccaggttagttgaaaatgttggtcttcctagagggctgccttctacctcagcttcttccagcttttccctaatttaaccacaggggtcagcagcttctgtccattgattgggtgcaaatatctgcatctgacatttccagctgcctgttgggcctttcagaggacattaatgataggccagtgtttgtaagcataccatagtatcagtaatgtgaagacttgtcccaccccctagcccctgagctggatcccaattttggcctgtcactggagctctttttctccaattttattcttgtaattctttcagacaggaaaaattctgggttagagtttttgactataggatggcaaccccatccctcaactaatgaattctttttatacatacagattagtgtatctgtaaatccatagaaatttcttttgtagcacatggtagttaacacaatcttggaactcaccaaagtccaaaaaatatgagacggtgtaatgctcagctctaaactaagcatatatactatagctcttctttccaattctcaggacctcattgcaaaaaaaggtcaagaatagtgtaagtgggagtggaggtcaataactacaaggaaagtgtgatttctgaacatgtca

SEQ ID NO: 3074 - DNA, 1200 bp, mus musculus
aataatgaagttactgcatgaaaatttgccattgtatatattattaaaccaaagaggtagaatagtagcaaaaaagagggaaattaactggctgtcatattttgcctgtttgattctaaaatttatactgtagacctttggcatacatactgcaatatacataatttttatttagaatttatgacaagtttctatttaaagttaataaatctccaatgcattcatgtttaccatgaagagattcgtagttctagttaaaatttagagggttgtttttcattttgaaataggggagatcttggttcctggatcatctagactaggctgcacaggttagagtgtggactacagaagctaacagcttctgggacaggcaaaacccacagagcttctgaggcaaacccattagggtctccagacatccgggcaacttccctgccagcagagaggtgtccaccctgctggagcacctgagggagccatcttggttcctggatcctgctgagtctagtttgcacaggtgcgagtgtggaatacagaagctaacagcttctgggacaggccccgttttgggccttcatcttctaccaggaggcaagtccaaacgccagatatctgtgcaccttccctgcaagaggagagcttgcctgcagagagtgctctaaccactgaaactcaggagagagctagtctcaggtctgctggtagaggctaacagatcacgagaggaacaagctctaacaagagacaactataacaactgactccagagaataccagatggtaaaaggtaggcttaagaattttagtaacgaccttgccagcagagtcttgcccaacacccgcaagggcccacacgggactccccacgggaccctaagacctctggtgagtggaccacagtgcctgccccaatccaatcgcgcggaacttgagactgcggtacatagggaagcaggctacccgggcctgatctggggcacaagtcccttccgctcgactcgtgactcgagccccgggctaccttgccagcagagtcttgcccaacacccgcaagggtccacacaggactccccatgggaccctaagacctctggtgagtggatcacagtgcctgccccaatccaatcgcgcggaactcgagactgcggtacatagggaagcaggctacccgggcctgatctggggcacaagtccctt

SEQ ID NO: 3075 - DNA, 1400 bp, mus musculus
tgcctctaggtcaagccacctctcaagctggcaagcatcattcacagttttacttcacctgaaaatcttgtaagccaaagttctctctctagtgaagtacatatgggagacaaaatgagtagtttctgttggattcagtcctccaaatctgattaaatatagcaagtttactgactcatcaataaatgaggtcagagacctcagcagtagtaaaaagaatgttgtactcaagtgataaatattttacctatatcaaatctttatcaaattacacttgtcaagacaatggtttgtaaatattattcatgaattaacataaaaaataactttaatttttattacacgctaacatttcattgcaatttagaaatatattgaggatagcaattaggactcttgttgagccccattttggcccaggtttgaaccttgaggacaaatctgagtctggcttgagtttctgtggccttgtgggagagcttaagcctggcttgagttttgagacctgtctcagtcacttccataccggggtgagtcagtaagatctgtttggccctgcctctgccctgcttttgctgatgtatagcttttacattggccttgtcagtcactccataccctccatcacccttctctgcctccttatcccaccaaaaatccacctgcctatgttccaaatttatataagcaagaggctgatgccataaagttgccaggctctgtgtgttccttttgggccgtggacacttgccatcctgctcaggccaaaagagaatccagtgggatcagaacctctctgctctcacctgaaactgctggcaaggagctgcaggcagactcttagtaattgataacattgttcctgatgctataataccaatgctcagtaatagaactatatgtttactttagtaaatatctactgagaaaaataaatgtgttttctgaggctaaagttatagttaaatgttgtacttagagatacatttctactaattaataatatatcaatgttaaatgcatatatttaccttatattttcctatgtatttgtcataatattttgtcttgttttactcattgtcttttgtttaataatcatcttgtggtcctcatgtgttcactaacatctatgtgctattatgttctatggatactctaagaccctatgttgaatgagtcttttggtgcttccgtggatgttacttggtgaggacaccttcaaatcaagaggtccttcctctaaatagttgtacttccactcgaaagtattctgcactctaatgtttagtagtagtgagtaaggctgccagatttctagatagtgagtaggaaaaaggatactgcatgtgttagtattgttttgtttactcttttcactccatccttttaagagccca

SEQ ID NO: 3076 - DNA, 1200 bp, mus musculus
gaaaagctcttatatgatccctgcctggcaggtctacttgaggcacagccagcggaggtgagctccatgttgtcttcctgagttccatgactttcccacctgaaaaggcctgctgggtcccaggaatatctggttagacaattcttcaccaattccctgcctacccagtccacttagggcacagccagcagaggtgagctatgttctgtcccctaggctccatcatgagccttaaagctctgtcttccttccagacccggaagaccccaggaacattcagttccacatggggcacaggcagcagagttgagcactgagctcatttgtcaggctcaaggctgtctgcctcccagaagactttttctggcatcagaatcttccacccaacaccaaagacaaccagatggatagagaagagtgtaagaacagaacaaacaagagcccagacaatatggtatcaccagatctaagctatactaccacagcaagccttggtaatcctaaaacagctgaagcacaaggtgaccttaaatccaatcttatcagcgtgatagaggcctttaaagagtaaatgaataaatctcttaatgaaatcatgtaatgcaacctcagttaagaggatatcaatgattataatagttaagtttgagagacaaaaaaaatgtccctcaatggaccttgctacctattctcaaacatgtgtttgtagttgcatgaagaatagttatatcatgctaagtgtaattatgaaatcgctggcaagtccacttcttcactggcattagagccttcatagttggttgggattctgatgtgtactgaaggccagctgaaacacacagcccattggactgagaaattagtggattcgtgtaccttgcaatagtagccagccagcattaaactagttggacagtattcattctataggttctatgcctctagagaactctaattaatacactcactccattcttgtttagtctggtatgttagggcctgtgtagcccagagcattgggcacctctttaattcttaacactctgtgatggttaaccctgcttgtcaacagagtctagaatcatctaggagaaaacttttgggtgtacccctgagggaattacaagattgggttaaggtggaaacaccaaccctacatgtgggtgcctggggtaggactgaataaaaaggagaaagaaa

SEQ ID NO: 3077 - DNA, 1200 bp, mus musculus
ataaaggattcttttatggatattatcatgcccaaataaatattcttttattctggcctatatgtgaacatgtggtggcagttaatgatatcacagataaatatttatgcttccttttaataaaataattttaaaaatggtcatttagacactgtattcactacataaatatttggctgtcttgttcaagtggaggataacatcatacctgaaaataattaatggaatttatcctatatatttttccaataataattcctaataataatttttaattattgataaataattgataaataatcttagatgactagaacaaataaattcctgcccccccccaaaaaaaatcaaaaagaaaagctaggacaatcaggtagaaatgccaaaccacagggcactgtcttctgggtacccagcaagcccaggaatattgaggtctgtcctggctcctttgtgtcccttttctcagtccatacatctaaccaaaatccaagatagctgcagccatcactgaccaccagatgagatccccaccccaattttgtgcctgccagatacccatgggggggacagcaaaagcaagccccactcagacccctctgtactccatttcccaggtcacaaattgtactgcatccctggaggcctgttgctgcccaggataaacataggcctgcaatcatcagggacaagtagatgtacaactatctctggaggtctgccccaaatcagaaaattcagcagcccaaagtcctctgattgcttccctggaagcctgctactattaggaaataccaggcctgtcagcactaaggacaatcaaatggctaaaagccagcagcataagtactcaataaacaaaattccaagaaatcttgcaccacccaaacccacctatcatactacagcaagccctgaatatcctgacaagtcatagttcctgaaaactggacttatatcttatattataaagatgatagagacagttaaaacagaaatgaaaaaaaatccttaaagaaatacaggaaatacaataaaatatataaaagaaattaataaatctattcaaggcctaaaatggatatagaagcaataaagaaaacacaaatggagacaatcctggagatcaaaagcctaggaacggttacaggaatgacaaatataagtatcaacaacaaaatataagacatggaagaaaat

SEQ ID NO: 3078 - DNA, 2600 bp, mus musculus
cttgagtgggctgaatcagaccttgcttctgccacagtcagttagctcagctagctcacctagggtggagtcttctgacctaggtaaagtctattgagggccacatctgcagcttcctgcaagaagccaccacctgctgctttcctgaggagatccctacaaagcaaggagatcctggcaaagtggaggatgggttcctccaccctttaaattcaagaccctacaattaaagaatgagcctctatcagagaacagttttctggcacattatttctcttgtagtccttcccatccatccccagctttcctttcaggaacctagcaacctgtggctgctagcagctacaggtggcatcaaaagagtggcctgaatatggaaagaatgactgagggacactgtcttggtgggactccagagtaaacagaagaagatggaaaaccagaataaaaatgattatgaaaagtgtaacattaaaacaaacaagcaaacaaaaatctaggcctttaggcccaggcttgaaaatgtgacttttgtgactcaatgctccaagacatgctaatcgtaaaacagatagcgacattcttccacccacccgcttcctgggttcagggagggtttgttcaaaaagagtcaccctgaccattgctggaacctgctatgcaaatgtgcaattgttagaggctcatagaaactgtcttgaaaaataaccacacaattaccaagtatttttcttgtgacttccacttactggtgactcttaactggtatttttgatattttccaacaatgccctccccacccactggagttgtagtttcttcctttaaataccctcttccccagctacttgggtgctccatggccctctacctctgtgtagtgtacaactgtgggcccctaagtgtgcttggaataaaagtcttcttgcagtttgcatcaagaccatttcggcgaataatttggtgtgtcgcctctcctgagttagaacgtgggggaatcctcacattgtgggtctttcatttaatgatttaaaatcagttaaatgacttaatttaactttgattattcatttgtatgacattatataatttaattttactgatgagttaaaatatttgaagaaaggacataggattctccaattttgaatgtatataagaggcattaatctttatttcaataaagcattttagaagaatccaatattgaatacaatatggtttatagaaaaatactccatgggttttctttaatacataatatgctcagaatgacataatattttcccatacaaatattctacttctttattcttcatggttatacatagtagtcaacaatgggatacatatacatttctttctccaaaagtttccatagcattttgaaattgttttagtcctttatggtcaatttagattccatacattagcagacacaaatgagcatggagtcatgttgaaattcaaagaggttatgttttctagaaagcaccatttctctctctttaaaaagaagaaagaaataacaccctaggcagtaaattcatacaagcaaggcctatgtatatatgtatccatatatagccactcacagctacatgaaccaggttcccaaaaggagggctggggctgtatgagccaagacaaagtattctgatcaagggcaatgtttacttaagagtctgaacttataaaagggggaatatgccccccccccaataccaggatctcatttcatcaggatagtgtcaggagaacagattcagcctcttagcaggtaatagagtcttggaggaaactgaagatgtggcagaacaatagacctaatctaggtcagaagaatccacccgagataggctagctgacagtggcagaacaggtctgagccagactgctcaaggctggaggaagctatttacttattcactttacatccagcacactcctcctcccagttaaccctttaacaattcttctccatcactcctcattcttttctgagtcggtggggccacacttggtgccccatccccaacctagcacatcaagtatctgcaagactaggtgatcctctcccactgaggctagacaaggaagactatcaagaagaacatgaccttgtcacaggcaagagcttttggcatagctccctcactcccattatttgggacccacaggaagaacaaggtgcacatgtgctacatatgtgcagaaagccctgggtctactcactgtatttgattagtcgttcagtttctgagagtctaaagaaaacaggtttgttgactttgttgttcatcctgtgaagttcatatcaccttcagcttgcaacccttccctttctctgcatgcactgtttcgtcgtagatatttacatcgacctgagtcagttgctttgtggagcctctcggaggacagccatgccatactcctctctcaaagcataacagagtatcatcaatagtatcagaaattggtgcttgtcattgagatggctctcaagtttggctcattattggatggtcatttctctagtctctgcttcatctcctgtgcctgcatttcttgtagacaggataaatttgggtgaatgtttt

SEQ ID NO: 3079 - DNA, 1400 bp, mus musculus
ccctaggaaagcagagagcaaagggctaagttaaaggcttttttagccaaagtgctgtctggcctgtgccacaaaggtgcagcactttgccccgcccacgcagcgtcaatcactgcctagctgggccccacacacagctcaaagctgagagcaaagggggaggggctacagagttggaaaaccaactttcttctagctgaaacctgaggagagacttttacctaagggggctgaccacccgaggcaccagccctcctgcctgcaaaaaacttcagaaatcctttcaccagccagcataggaaaacagctcacagcaattactgccctcaccgggcagagtcattcaaagcctagagctggaggggtggagggactacagagcttggtaaagccagctgcttatagttgaaacctgagagagcaagagggggccagggcaggagggggaggaagcttgccaggaacacttgggagagagagagagagaaaaggtaaaaaagcctagtttttgaactagattactcacagtctcttgggaaacttcaagatctgatgtaggtctctgtgcaaagcattcttcagctggttctgtcccacatagatgacataaccatccctctgctaccatttgttgggaactaaaaagggggccctggggaagaggggaaaggggaaaacccacacctcaacagagttttacctattctctggtctgtcaggcatgggagggctgctatctaccttccactcatctctggctgggcattggatcctctgacccactcttaagggggtagctagggggcatccctacctgggaacccctgagctattttgctaaagccaccagggttataggagagagggatgagggaagggaggttcccaacacctggagagtgagtgcagtggatcttgactggagcacaggaagaggccttccatctggagattagaaagagctcattaggagaaagcctgtcccatcctccaagcacaggttttagagctttattatagaaaggcaggggaaaagagaagagagaagagaggagagagaagagagagagagagagagagagtaagagggagagagtgaaaggagagaggagaggagaagacagagaggagagaggggtgagagtgaggggtaagaagtaagagagtgagacataagagagagatgagtaagagagtgaggtgggggcctaacaggcccttttatgatctttactgttgctaggtaactggggaggagtttagcctgaaggtcagaagcttgggccattgtctacatgacttctagccatgcttctcttgtgggggctgtggggagcggtaacttgggcagggtccagagttccaggagcattaaagaatccctacagtgtcatgaaggt

SEQ ID NO: 3080 - DNA, 1200 bp, mus musculus
ctgaaaatgtagaatgtatgaaccttgttgaaagtaagaatttttttcaaaatagaaatgagggtttaaggaaactcagttctttcattgaaagtattcacaacctaagagagaatgtaactaaacatatgctcttcgtgggctacaaaatcaaactaatttataaaattatcgaaatatttttaacatgtaaaggaacaagttattctgagttactgatctgcaactttatatgcataggaactaagatgaagaaagcccatgagaaggtaaattttgagagacagagagagagagagagagagagagagagagagagagagagagattattttctctcagacacgtattgcaggcaggtgaaatggagtctataacttcttggcttccagacacacattcaaggcttgccttcccacacattctgactagatctcagagctctttggttacacactatcagttgcctctttctttccaagacctttaagctcagagtggcaacatctgatttctaaggaaaatttgcagggttcttctactgtagaatgacctaggctgtcacagagcttattttgtatgttttcgatttgatttcgctatgatttaaaaggatttgttttgttttgtttcttcgtagaaagaataactcaatatcaaatatcatttatgaaaaaattaaaacaagctcaaattatagtataggaacagctacataaagatcatcgtgccagaagttaggggaaggaatgaaggatctgaaggggtttgcaacatcataggaagaacaacaatatcaaccaaccagacccccaaaactcccagggactaacccaccaaccaaagagtacacatgggtgggcccatggatccagctgcatatgtagcagagggttgctttatttggcatcaatgggaggggaaccccttggtcctgtggaggctcaatgacccaatatagggaaatgctagagcattgaggtgggagtgggcacgatgagtggaggagcaccctcatagaaacagggggaggggataagggagttgtggagggaaaactgggaagggagataacatttaaaatgtaaatgaataaaataacacaaaaatcataaataattttccacattaataattgttggtttgcattagcatgttatgttactcaggatatatagataattacctgaaatattccca

SEQ ID NO: 3081 - DNA, 1600 bp, mus musculus
attctttaagggatttttgcgtttcctctttaatgtcttctacttgtttagcagtgttctcctgtatttctttaagtgagttatttaagtccttcttgatgtcctctaccatcatcatgagatatgcttttaaatccaggtctagcttttcaggtttgttggtgtgccctggactgggcaaagtgggagttctgggttctgatgatggtgagtggtcctggtttctgttagtaagattcttatgtttacctttcgccatctggtaatctctcgagttaattgttatagttgtgtctgtttagagattgttcttctggtgattttgttaccctctatcagcagaccagggagactagctctcttccctgactttcagtggtcagagcagtctctgcaagcaaggtctcctctttcagggaggtgcacaattatctggtgtttggacctcctcctggccgaagatgaaggcccaaaacaggatctttcccagaagctgtgttgctttggcctttcacagaagcctatgtttcagtagtccacactctcacctgtgtagactactttccgtggagtcccggaaccaaggtggcccccgaggaacgtgaggcagaagcctctcgggctgggcggacacctgtgctctgaccaggaagatggccggttgtctggagccgaaaatggcgccacctcagaggctctgtggctcttgctcgttccagaagcctctgtgttccacactctcacccgcagactgcccgcctcggagtcccagaaccaaggtggcccccgcagaaagtgagggagaagcctctcgggctgggcacacccctgtactctcaccaggaaggtggtaggttgtctggagcaggaaatggcgccacctcagaggctctgtggctctcacctgtcccaggagctgctggcctctgtgttccacactcccacctgcaggctgcccgccatggagtcctggaaccaaggtcgctcccgcggaagctgaggcagaagcctctcgggccgggcggacccctgtgctctcaccaggaaggtggtcggttgtctggacaagaattattattttcaacaaatgatgctggaacaatttggaatcctctttcaaatattttaggtgaaacatacaccttacacttctaagaaaaaagaattcttaacccaaatatatcacagacttaaatgtagaacaaaaaatataagcatcacaataagctacataggagcaaataaacataaccacagacacagcaatgactttccatataacacaaagaaagtctgtgaaataatttcttagctggattccattcagattataaacttcaacattgtagaaatcagtgttaacagaagaaaaaacataagatgagattttttccaagtaatcatcatgaacaactactatccaaaactaaacatgcagagagagagagagaaagagagagagagagagagagagagagagagagagagagagagaagcagtggtggctcatgcctttaatcccaacacttgggaggcagtgtcaggcagatttctaagtttgaggccagcctggtctacaaactgagttccaggacagcc

SEQ ID NO: 3082 - DNA, 1000 bp, mus musculus
ggtgacaacacatgtagagacagaggaacactcctccattgccggtgggactgcaaactagtataaacactctggaaatcaatctggaggttccacttgcgaaagagaaaaaagcaaccacaagggtagggaaggagtgacctgggagggaaagtggatggggtgggggaggtcaggggtagagggaaacctgatcttgtattggataagtggataagactggagccctgagggatagcagaaagaatggaaaaagactcaggaggttggaggttgtagggacactccagaacacaccagagacctaggaggtgagatactaccaggactcaaaggaagggactttagatgaaatgcctaattatagggagatggattttatagagcccacctctagcagaaagagagggcttcaactgagggatggggttactatcctacagtcacaactctgacccaaaattgttcctctctgaaagagttacagggatggaaatggagaggagcctgaggaaaagaaggtccaatgacaggccaactcaaagggacgtcccaagggctgacactatcactgaggctatggagagctcacaaaatgggacctataatgactgccctccaaaagacccaacaagcagctaaaagggtcagatgcagatgtttgcacctagccaatgagcagaaactgctgactcctgttattgaattagggaaggctggaacagactgtagagaagtgtgatcctgtgggaggaccagcattctcaattaatctagacccctgagaactctcaaatattggacaaccaaacagacagcataaacctgatgatatgaggcccgcaacacacatacagtgaaggacatttgagtgtgtgctcattcagagatgatgcacctaaccctcaagagactggaagccccagaatctttagaggtcaggtggggtagggggtgcagacatccacgtggagacatgcagtggggaggaggtatggga

SEQ ID NO: 3083 - DNA, 1200 bp, mus musculus
tataagaatgtggtggatgaaggaggtctgttaataaaaacttctgacttttaagtgcaagagtgttctttatgtacaagagtgttctttatgttctttttagctggcagccagaagcttgtcttgtccttacagtctagtggatgtatactgggaaacgagagttttgtcataatatactccattgctacaataccatgaagaaaatcctttccagaaaagtactttgttgggaacatagtttttagaaagttttttttacacatcagaatacaacctggttatgttatatatggtttgacagctgatcattatgcattggacaaccaataacaaaccttatatctgagaaaggctagtagttttccttctcacagtagtctactagtgtagcatgaaatattaaaaaaaacaatccatgataccgctggcctagcatcagcagacaggtcagcctgttctcagcccagccaactctgactcagagctctgaaatctctccacccagcttgctaagtttccatgacaggctgctgccacgcacacttcacgtttccaaattcccattggctggctgcggttccctgccagtgtacttttctctggaacccagcagagttgctatgggaaggaaaacacctcaggatcttagtttagaatcaataggtaaaaccatcactgggcagagcaactagaatcctaatttgtaagctattcaaagttatatatcctccagtagcagatttaagcagatctgtaacctgaactgggggccttccttaactacattgtatcctccatgttctccagtccaaaaagaagtctttcacctgtcttcctcttcctctctcctacctggaagtcccgcctactcctcacccaatgattggtcctttgatatctttattaattaggggaatgttctgccaaccactagctgcctgtagttttttctttacaacatattccctctgccacattaacaagtccatttacattgacatcattctgtttttgtttatgaatccattcctagtagacactcttttgaggaaaactttctagtattgtggcccttacaatgtttctgcccccttcttctgtgttgccatcattataaatgtaggagttgtaatgtagttgtatctgttgggactgggtttcccacattcctttgatctcttcatgggccctagttgt

SEQ ID NO: 3084 - DNA, 1200 bp, mus musculus
ataaaagtaggaaactttacagccaaatagaaaatggtatgtaaatgtaaaatgtttaagtaaatcttgaaataatatttgtaatttttatagtgaatagaaccaaactaaataacagtggcagaataaagcttgcataagaacttgtaaacatagaaggtttcttagcagaaatactagataacatggtttgtgggaccatgaaaggcagtctgtgttctggttgagtgaagcttactccatagacccagtagaaaactctacaagggacagaacagtgagctatattcccagacatagatgcctgacaccacggaaccctcaactccatactcctgtggcagtcatgtagacaatgtcccaagcttctggcattctggctagagtccaccctcacagttatctgacaatagccaggtaggtatgctccttcccacagttaccctgcaacagctaggtagccctgcccactataaaaggtcaagcctctcttattctcatctctagctctcctcctcctcccttctcccctctctccacatgtccatggctggtctacttctcttcttctcttcaggaacttaatgtgccatagctggttgatatccatgagaggcattccattttctggagagaaaaggtagagaataggatgggcatagagttggggggagtggaatttggggaaggaaatgtgactagaagagccaagagaaatatgcaatacattattaacacattgataatgacaatattagaattctaaaaattactacagcacaagcacacacacatatacaaatatatatattgagagagaacaagagaaaaaacatataacaaattttattatttctagcatatcatttgtttatctactttaatttttctgttaaagcaatagacatatatgagttaatgatgtttatcactaacttaaatttatcatcattgatatgtaaaaatgtaattgtaggttttaagtaaatgaatgcaaactattttgagtaaaaatgaagtagacatttgaaattatctacatagatttataatttcaaacatatagaagatatgatgcaatttgaatctcacatttcaataccagtgatgaggattttgcaagaatagttgatgcaagtctctgagaataccattaaaatcctctctactgtctaggggtggtctttcttggtattttag

SEQ ID NO: 3085 - DNA, 1400 bp, mus musculus
ttagcacaagcctaataaaataattcaatttatttcaaggacttgtctagataatatagttgataacagcacaaacatagataactctgatgataataaaatgaattaaagttcaaactgtggggataagttcacttactttgataatatggtttaatttttgcttactaggttcttagatttgtactatttattcttttttcagcagtttacacatttcaaaagatatatatcattttgtttaaatataagtatattctatgtatttaccaacccattatttttcaaatgacatgctaaattttaaaatatgtatagaggaatagtcacattttgagaaattgcaattccattaaattagcatattgtaagccaaatacaacctgaaagtctgtcatatgattgctactttatccagattttcttgtgtaagtcaatatgtgcataaaagtgatagcaaaatgtgtgaacaaaaaagggggggcctggggagtcccagggagaagtgggggaggaaaaatatgccaagtccccccagagtttctctgggcaggaggatgtaggaagactgccaggagctttccacacgccccccaccccccacagggtagagatctaaagcctctggatgtactggttagttcatattgttgctccttcattttgggcgctctgttccatccaatagatgattgtgagcatccacttctgtatttgccaggcactggcatagcctcacaagagagagctatatcagggtcttttcagcaaaatcttcctggcatatgcaatagtgtctgcgtttgctggctgattatgagaaggatacctgggtggggcagtctctggatggtccttccttccatctcagctccaaactttgtctctgtacctccttccatgggtattttgttccccattctaaggaggaacaatgtatctacactttagtcttccttctccttgattttcatgtgttttgcaaattgtatcttgggtattctaagtttctgggctaatatccacttatcagtgagtgcatatcatgtgagttcttttgtgattgggttaactcactcaggatgatatcctctagatacatctatgtacctaagaatttcataaatttgttgtttttaatagctgagtagtactccattgtgtaaatgtatcacattttctgtatccattcctctgttgagggacttctaggttctttccaccttcttgctattataaataaggcttctatgaacatagtgaagcatgtgtccttattaccagtgggaacatcttctgagtatatgcccagaagaggtaatgctggatcttctggaagtactaaatccaattatctgaggactgccatactgatttccagagtggttgtgcaagtttga

SEQ ID NO: 3086 - DNA, 1400 bp, mus musculus
tcagaatgctttctagcctcctggttattttatattgaccaaaatagatgtcaaattacatgccagttaaacataatgcttatgaaatatgcagttacatctgtgatcagatttgatttataacatggaatgaaacattactatctttatagaagtatagttcactgtgtaaaatgattatatcagggcatggattaaaaataaaaatagtgtttcattaagtaactcttttattttatttatttatgtatatgtatatgtatatgtatatgtatatgtatatgtatatgtatatgtatatgtatatgtatatgtatatgtatatgtatatattcattcactccagattttattccccttcccggtccaccctttgactgttccacatcccatatttcctcccgacccctgtctccacaaggatgtccctgccacccacttcccaccccaccagatttctaaactccctgggttcctccagtctcttgaggtttaggtgcatcttctctgactgaacccagagctggtagttctctggtatatatgtgttggtggcctcatagcagcctggttggtggtgcagtgtctgaagatctaggtagtccagataaattgagacgctggttctgctacagggttaccctcctcaacttctttcagctttccactgattcatcgacaggggtcagcagcttctgtccgttggttggttgggtgcaagtatctgcatcttattcttgtagctgcttgttgggtctttcagagggcagtcataatagatccatttttgtgagtgctccatagcctcagtaatagtgtcaggccttgggtatccccttgagctggatcccattttgggcctgttacctgaccttattttcctcagactcctctccatttccacccctgcagttctttcaaacaggaacaattatgggtcagagctttgactgtgggaaggcaacctcctccctccttccctccccccttgtgattgctttcttctccctcccaagtggaactgaggcatcctcccttgggcccttcagtttgttgaactttttgagttctgtagagtgtatcttgggtattctctactttttaaatttatttatttttttatttatttatttatttattgatttttaggctaacatccacttattagtgagtacataccatacatgtccttttgtgtgtgtgttacctcaattaggatgatattttctagttccacccatttgcctgcaaaactcaagatgtccttgttcttaatagcggagtagtattccattgtgtaaccttttttatgaaaagtagtgtacttgataccttacatatgttactttattatctcagagtcactgtacagttagtaagtgttggaataagggccttgg

SEQ ID NO: 3087 - DNA, 1000 bp, mus musculus
ttgctggtgggattgcaagctgatgcaaccactctggaaaccagtctggtggctcctcagaaaattggacataggaccttaggacccagctaaaccactcctgggcatatacccaaaagatgctccaacatgtaatagggacacatgctccactatgttcatagcagtcttatttaaaataaccagaagctggaaagaacccagatgtccttcaacagaggaatggatacagaaaatgtggtacatttacacaatggagtactactcagctattaaaagcaatgaatttatgaaattcttagcaaatgtatgcaactagaaaatatcatcctgagggacacaatccagtcagtcacaaaagaacacacatggtatacactcactgataagtggatattagcccaaaggctcagaatcccaaaatacaattcacagatgacattaagctcaagaaggaagaccaagttgtgggtgctttggtccttcttagaaaggggtataaaatactcacaggagcaaatatggagacaaagtatagagcagagactgttggaaaagccatccagcgactgccccacctggggatctatcccttatatagtcaccaaacccagacactattgtggatggtaagaaatgcttgctgaaaggagcttgatatagttgtctcctgagaggatctgccagaaccttccaaatacagacgtggatgctctcagccaaccattggactgagcacagggtccctaatggaggacttagagaaaggactgaaggagctgaagagatttgcaaccccataggaaaaacgacagtatcaaccaaccagacccccccccccagagctcccagggactaagccaccatccaaggagtacacatggagggacccaatgctccagctgcacatgtagcagaggatggccttgtaaggcatcaatgtgaggagaggctgttggtcctgtgaaagattgatggatgccctagtgtaggtgaattt

SEQ ID NO: 3088 - DNA, 1200 bp, mus musculus
atttttcctaaatgctctataagcatgtctcaaaaaataagatggagaacaattgagtaaactattaatgtttactgtggcagagattggcaacatttgctaaccattctaagtttagggcaagagaagcgatagcaacactgtgcaaaattcaggttatgatacatctatttaaatcttaatccatttatttatttatttattttacactccaaattttattctgctcctggtccaccctctggatattcccataactgccccagcatccccctcagtctccacaaggatgtcaccacccctattcgtgtacacctcacaggatctctatgttctctaaggcctccaatatcttgaggtacttcatctcagactgaacacagacctggcattcctctgctgttaatgtgttgggggcctcatatcagctggaacaggctgcctggttggtgttcaagtttttgagagatctcaggggtccagattaaatgagactgctggtcctcctacagggtcacccttctcctcagcttctttcagccttccctaattcaaccacagaggtcagcagcttctgtccattggttgggtacaaatatctgcatctgactctttcagctgcttgttggatctttcagagggcagtcatgataggtccctttttgtgagtgttccatagcctccgtaatagtgtcaggccttgggacttccccttgagcaggatcccactttgggcctgtcactggaccttcttttcctcaggcttctctccatttccatttctgtatttctttcagacaggaacaattatgggtcagaatttggactgtgggatggcaacactctccctcacttgatgccctatattcctgctggaggtgggctctatgagttccctgtctccattctatggtatttcatctctccctttaagtactgagaatctctcacctcccaggtctcccagcctcctacctctggaggttacatattcccattctttctgctggccttcaggggtttcagtcattttccctcacccaataccagatcagtttcccctctctgtcccccatcccctttccctcacaggaccctccccccttgtggttgctttcttctctgtcacaagggggattgaggcatccacaaatccaggcctacaaaggataatagaaaactctagcacaccattaaaaa

SEQ ID NO: 3089 - DNA, 1200 bp, mus musculus
cactactctaaaatcttctagtttgacataatttccatagtttcagtcattaattcttataactttataatatatatataaatataatatttttctaattcaaaacttcttttcaaatattcatgtgggtacaattacttacagttcataataaaatagttctgcattaagaatctttccaggttataggaatgggtcagccattaggataattgaatagccttctacaggcctctctctttgagtctgagtgtctctcacttcccagttctctagtccatcttagagggtccccccaactcctacctcctgagtttgcctgtttccaggtaggattgaggcatcctcacttgggctctttggcttgttaatcttttgagttctgtgggtattcggtatattatggataatgtccactaagtgaggacataccatttcatgtccaattgggtctgagttacctcattaaggatgatattttctagttctgtccatttgcctataaaactcaggatgtcctcgttcttaatagctaagtagtattccactgtgtaaatgaaccacattttttttaatccattcttctgttgtgggacatctgggacttttccagctcctgactatcacaactaaggcctctaagaacatagagaaacacatgcccctgtggcatggtggggcatctttttgggtatatgcccaagagtagtatagctggttagttcgtactgttgttccacctatagggttgcagacccctttagctctttatgtgaactaaccagtacccccagagctgtgtctctagctgcatatgtagcagaggatggcctactcagccatctatgggaggagaggcccttggtcttgtaaagattatatgccctagtacaggggaatgccaaggtcagaagtgggagtgggtgaattggggagcagagctggggagggtatagagggctttgtggatagcatttgaaatgtaaatgaagaaaatatctaattaaaaaaatgaaaaacaaaagattagcatactgtggtcttgtaaatatcatatgccctagtacaggggaatgccagggccaggaagtaggagtggatggattggggagcagggcagggggacagtacagggggctttagggatagcatttgaaatgtagatgaaggaaatatctaataaaaaatatgaaaaaaaag

SEQ ID NO: 3090 - DNA, 1400 bp, mus musculus
atctgagagtaattttgcaatatcatggtaatttctacaccatataatagaaaaatactacatttgaaaatatattatattttgtatagaatctactgattttgcactgtaaatagattaaggcctgggctagagttcatatattcttaaagaagccttagggtttcagcaaaaaaaaaaaaaaaaaaaaaaaaaaaaaaaaaactggaaataaattacgtattcaaagctctcacctcataaattaaaagttttacaaagtaaattttgaattaaatttatgtttctatatataaccttggatattttatttcattaatctcttcattatatgctggatatttttatttcattaatctcttcattataagctatgcactttaaattttactatgaatagtgtttatgtagacccatagagtcaaacacaaaagaaaatgcttgaaagtatcataaatttaataaagacagcaataattcctcttaattattaatatcatgtctgtaaaagagcagtttaacagggtagaactttaaaaatcttgacaaatgtgaggatagtcaataaaatgataactagttcttcaaaattttgtccgatacaaaatttaataatcaatatgaaagagaaccagagatatatgaacaataaatgcataactgaaagcaaaaatcttcattatgctaacctataatcaattagtaagttttattgcgttaactttctagttgtcttttgttttcttcagagctgaggaccaaacccaggctcttgcacttgctaagccagcgctctaccactgagctaaatccccaaccccgggttgactttctaaaggaatgcatattcttggaatctctttctccttttgcttcttataaaatttatgctgattgattttcaggaaaaaaagtgttgaaacaatccctattttaaaaaaaatggagaaggttctcatatatatatgaacctctaggctgatagtggtgttagcatcagacaagaaaaatacaatgcaaaatataaatctataataatatcaatgaactaatttgatgaataaatttaaaataaaacaaataaacaaataaacaaagctaaacctgaaagatacatttgaaaagtgagcctttcaaattattctatttattttaaaacccagcctaggccaatttatgctatctatgtttctccaattttccatgaaaatcttaggagacttggctttggtatcctctatcatcttaaaacctcttccttttttgttatatattcttgatcacaagcatatattatatttcaagtatagatatcaaaggatattgaggtgagcacagatttatgtaatattctatttttatacactttttatttttattttttattttttattttttta

SEQ ID NO: 3091 - DNA, 1200 bp, mus musculus
cttatttatttacttatttgcaattcagcagtttccccctcccccaggcctccctgggagctcaagtctctggataattgtgcatcttctcccactaaggctagaccaggaagtcctattctatatatgttttgggcaccttggactagttcatgtttactgcctggttggtggctcagtgtcagagatctcaggggtccgggttagttgaggctgctggtctttctattgctctccctcttctgcttcttccatctttcccctaattcaaccatagggatccttgacttcagactattggttgggtgtaagtatctgcatttgtctcagtcaactcttggttgggcctctcacaggtcagccatgctaggctcctctgtaagcacatcatagcatcagtaatagtatcaccttttggtgtctctccatgaggtggatccccacttgggtctgtcagtagactgcctttccctccttcccctcaatttcttctccattttttgtccctgcagttcttttggaaaagttcacttcctggtcagaaattttcactgctggaggtcagctcttcgagttccctcttctcactattaggtacttaatctaagataactctcattgagtactgggaatctcttacttcccaggtctctggtactttctagagggacccccccccctttaccgaagctacatattttcattcactttgctggctacctgggcttctctcctgttccccctccctgaatatctgatcctgttccccttactacttctcctaccttctcccacacaaatccccctctccctctgcctcccctcattattttcttccccctactgagtgggactgaagcatcgacttagaatttctgtttgttaaatttcttaaattctgtaggttgtatcctagatattctgctcttttgggctaatatccacttattagtgagtacatgctatgtatgtcctttggggtctgggttacctcaatcataatgatattttctagttccatacttttgcctgcaaaattcatatttattgttcttacaagatacatccttatcagtttaaactctaaatatcattcatatttgaatagaatagcattgtaattctataactgggctaatatctttgaaaatcacaattaggtgtactccacaatgtttctatgttttctttataagaaga

SEQ ID NO: 3092 - DNA, 1200 bp, mus musculus
ttcctttcctattgggatttctcatctactatgcatataatttaatattcaaaaaagtaatctgaagatatttttattcagttttttttttatcttttcatttcttatagtgctttttccccagccattcgtcccctccctgctcttcatgtgactttaggaatatttcttgatagttggacactagtaaagacactagaattctccaatgtgtttaaacaggctgccaacttttcagttagatatgacttattttatgtagatgataataaaaaatattttgttttgttttctgtaccctgacagctgcagaaataacagtgcagccaactgtggaagaagcctctgatacctgtactcaagaatgcctcatcttgggacactctgactcctgctggatgccagctactttgaccaatcctagcccttcacagataaagacctctgctatctgccacagcccacccaggccccgcttgtcagttcgtcgctacagccctccagtgacacagacggtcactatttgccacagcccccctgtgacccaagctattgcactgtgtcacagccctccaccagtacaggttactgtaccccgccatagtccaccaccagcacaggcctctgcagtcagctacagcccaactctagtacaggctgtggtaattcaccacagtcctcctctgccacaggctgccacacaccatcgcactcaggcacaaccaccaatgggtttgcagcagggatgggtgcagggtgctggagcagatggactgtatcctattgatcagggagtacagggcagtacaagagctcagttttacaccatggctgaaagatttcatcccgatgatgactcaattaaagtcattcccttgaccacctttacttcaggtcaacaggccagatcctcaagaggtgattctccaatcatagaggaacaccccttgtaaagcctatatggatacttcacattttaaaaaagatgtatataaacatactcaaagattaacattcaattttaatgaatattccaaattggcagatttgtaaatagctgtgtaaatagaaacagataccagaataagactagagctagacccttagtcacaagataataaaataaatttaaaatttaatttggtttgtgaattttcaaaagaagtaaatactttatattcctttgtacagaaaggctta

SEQ ID NO: 3093 - DNA, 1000 bp, mus musculus
accacatattcttcatctattaacccattagcagacatctaggttgcatctgattgctagctattatgagtagagcaacaatgaacacaattgaagagttgtctttatagtaggatgaaatatattttgggtatatgctcaataattataaagctagatcttgaggcacatcaattcccagcttcctgaggcactgcctcccttatttccacagttgttgtacaagattttataccaatcatcaaaagatacaatttttgcttgctcttcatcctcaccaacatgagctgccatttattttattgccaatggctattctgagtggcataagataaaatgtcaaattagtatttgtgtgaacttccatgagtaatgatattgaccatctttttaagtgtttctccaccccgggatccatcccataatcagccaccaaactcagacactattgcatatgccagcaagattttgctgaagggaccctgatatagctgtcttgtatgaggctatgccagtgtctggtaaatacagaagtggatgcttacagtcatctataggatggaacacagggccctcaattgaggagctagagaaagtacccaaggagatgaagtggtctgcaaccttataggtggaacaacaatatgaactaatcagtaccccccagagctcatgtctctagctgcatatgtagcagaagatggcctagttggccatcatttggaagagaggcccctaggtcttgcaaactttatatgcctcagtacaggggaataccagggccaagaaatgagagtgagtgggtaggggagcagggcggggggagggtatagggaactttcgggatagcatttgaaatgtaaataaagaaaatatctaataaaaatttttttaaaaaagtgtttctcaaacatttttgtttactattttgtatattctttgtttagacctgtacctcatttttaattggattgcttgttttcttgatatctagtttttt

SEQ ID NO: 3094 - DNA, 1000 bp, mus musculus
acttcagaggtggaaagggaaaatgaagagtttcagactagcatcagttatgctaggtttctgtctagaaacatagcagagtggcagtaatagtgtcaggggttggctctctcccatggaatgggtctcaagtcgggccacttattagttgatcattccctcaaactctgctccatttttacacctgcacatcttgtagatatgacaaattttggttagagggctttatacatgggttggtgtaactctctatccactggaagtctcatctggatacaggaggtggccccttcagtacccaatgttcccagattctaggagtctcagctagtgttacctccacagactctccagatcgtaccccatactatgcctctggctagtctcatagatgccccacatttttctctcccatccctctcctaagaccctttcccccagacctgatctcatcccagttcccctacttagcccctctcctacccagttctcttcctccattcacttagatgtcgattttatttccccttctagcataactgtctcctgagttgcctcatctatctgcaaaccggtgcagagatccacagacaaacatctgttgcagatctatgagtcttgtggaagactggaagttatgattgagtgaaacagaggggccaagggccccacaagaagacctgcagagtcaatgaacctgggcccatggggactcacagagactgaatcactaaataaaaagcatgcagggactggtcatatgtctcctacacatttgtagtagatgtgcacattggtcttcatgtgagtaccttaacaattggagcagaggctgtctctgttatctgttactgcatcccctttccctagaataactaccactgactcagcttcagaaccaagccatgatgtaggttttaagctctcactgctttattcactgctctgggcagtggtcacagtgcagtacacttgacaatgagcacctatccgcaggctc

SEQ ID NO: 3095 - DNA, 1000 bp, mus musculus
tggatatccctggtgtttgttgatctgtatgactgtatgtagtctgcctcttttgtctctgagttgcttcagatctccttgtaggcttgtagccctgtctttattagaccacctgtgggtccttccaacttgaggctcttctcaggggcagagaagctgcttatctgttgccctggctgcagtagatctcctgggaggctttcagactattaagtcttcagtggagaagtcaagctctgttccaactgtgctgagtacagccaatcctctactgctctgagagtagtggatcctcaactgctccaagtgcagagggtcctcaactgctcaactggtttgcatgtagtgggtcctctagtatagtgatatgtagtattaggggagtagaccaactagggccccaagtccgtggctcccagcagcagctccaggactggatgaaggtggttgagggggtttcttaccaactgctctgagtgcagcaggtcctgtaggttggataggaatataaagtcttcacgggagcagaccaactaggagcctgctctagccatgtaaaaatttgcttggataattataaattatggatagaagtaaaaatttgtttagtgactggggaagttaaatatcccctccttataggctaaaacgctaaatcaaaatggtccaaaactgtagaagcttgtgctggatttgtgcttctgcactcaggctaactgcattgccttcagcttaaggttatatattgtaattatatacacaattgaaagaaggtgttggaggaggctcattgcttaaatagggctttacttccaaaataaaattgccttaaaattcagaaattttgaccctacaatttacattgtcttatgttaatagatttgaacgtatttataatttttgcaatagaaattcaccaagagcttttaaaacaggctaattgatcagtaggctgtccttcatcttggcatttaaaaagtttgtgtacctttcttattct

SEQ ID NO: 3096 - DNA, 1200 bp, mus musculus
tctcttgtattctgttgctgatgcttctatctacagttcctgatttatttcctacggtttatatttccagagctgtgtccttttgagttgtctttattgtttctacttctattcttttatcttggatggttttgattaattttatttcctgtttggttttgttttcctgtaattctttaaatgatttttttttttgtttcttttttaaggacttttacatgtttagtagtgttttcctataggtcaagtgagttattaatgtctttcttaaaatcctccaccagcatcatgagatatgatttttaaatccaggtctagcttttcgggtatgttggggtatccaagactggctgaggtgggagtgctgggttctgataatggtgagtggtcttggtttctgttagtaagaattttacatttgcattttgccatttggtaatctcttgtgttagatgttctagctgtttcatgctgaagcttgttccacctgtgattcagttaggctctgtcagtattcctgagtgtccaacactctcctgagtcccagtggtcagagcactctctgtaggcaagctgtcctcttgtagggaaggtgcatagaattctggagctctgatccacctcctggctgaagatgaatgcccaaagggacactgtccaataatttctgttgcttcttcagccagcatgctctcctgcgatcactggtctctgagagacccgggacacaaatggagctctcacctgagtcccagggtcagaaccctctctggatacagactcttctcagtgatcctaagttcttgggtatgctagggcacatggggcatcaagagtcatctggaaaacttgggccagtcttcacagtttgtgcccaagatagcacgaggctggtgctgattggaaggatccccagcctctgcttgggatggtttcctttgtccctgttcctgttggcaaaacccctctgggttgttttggaacagatgttgcattcaactcaccagtgatcccaagatcctgggtgtgctagggcacctacagtgtggagaggcctttggggaccttaagactgtctgcagagattgtgcccaagatggcttggggctggtgccaaccagaaagatcaacaattccattttgaagtcgtcaatattgttaagaaattcctgtaagcattgttaactgtagcagttttca

SEQ ID NO: 3097 - DNA, 1000 bp, mus musculus
ttcagattagcatttttagatgctctccctgtaaaaatgcagtaagtatatttcacatttaatagcacagacttgaatttctaccaagacaaggatatacccttataatgaagaaaaataataaaaattacttcagcaggttgatctaaatttgtaaagtataagtcatatttatagtttatacccttgatgtattatttaaatataccgtgtcttatgaaattaacaccaaaaataatgactatataagaagcagattcaccactggggaaaaaatgtataaaatacttaatcatggggctggcgagatggctcagcggttaagagcacctactgctcttctgaaggtcctgatttcaaatcccagcaaccacatggtggttcacaaccatccgtaatgagatctgatgccctcttctggtgtatttgaagacagctacagtgtacttactataacaataaataaatctttaaaaaaatacttaacaatatactgtaaaagaatcatgattatcaaaaccaaagaaaatctgtatagcggctagaaggacctgataacatgttcatcaagggaaaaattaaggaaatttttatataggattacatttgtatcgtcatctgcctctctgcctgcagtaactggatgtcgcctctagaacagggagtccataacccacctttcccactggtacatcagatgcaactacatgccagaccagaatgggaaatagatatgggacaaacgctgtggttctcagtctcctctctgggtgcccagaaattgcccgtatactgccaggagaggaagtcagaaatggagttaaaaattctaccgttctcctctgggcatctgcttgccaggtagaaaatgagaagtggaacgggggatcagtgggattcagtctgattaggaacaagtgccaagtaccagagggactggagaaacgaaagccttcttcagcagtcttaggcatcactcttataagtgaaggccttccct

SEQ ID NO: 3098 - DNA, 1000 bp, mus musculus
ctcctccaaatactccctccccctacttagtccccctctctttactcacaaacccacccactctgacttcatggccctggcattcccctataatggggtatagagccttcacaggaccaaaggccactcctctcattgatgacggactaggatatcctctgctacatatgcagctggagccatgagttccaccatgtgtacactttggttggtggtttagtccttgggagctctgaggacactggttagtttatattgttgttcctcctatggggctgtaaacccttcaactccttgggtaatttctctagctcctttattgggaaccctgttctcagtccaatggatgcctgtgatcattcccttctgtatttgtcaggtactagaagagtactactcagctattaaaagcaatggatttatgaaattcttaggcaaatggatggaactggaggatattctgagtgaggtaacccaatcacaaaagaacacatatgatatacactcactgataagtggatattagcccagaagctccgaatacccaaggtaaaattcacagacctcatgaaactcaagaaggaagaccaaaatttaaacagattcttggtttattttctgtttctaagaacagaaaaataaaagtgtggatacatcgattattcttagtaggtggaacgaaatacccatttaaggaggcaaagtgtggagcagagactgaaggaatgtccatccagggactgccccacatgtggatccatcccatatacaatcatcaaacccagacagtattgtggatgccaacaagtgcttgctgacaggagcctgatatagctctctcatgtagaggtattttaatccagtaacatgactatgctggcaagagattacatccacacaccttcttggtttgtgctctggctggaattcatgcagagttctactagaccttcaaagaagacctaattccaatactccttaaactattctacaatataga

SEQ ID NO: 3099 - DNA, 1200 bp, mus musculus
tagatattctacacaggacaagaatttttgctagactaagacaataagttgaatatcatatcatactagtcactattatttattctaaaatataactattactaaaataaaacagaaaaatctcactatattgaaatcagtacccaagtttttgttaattactttatttacatcccaaaagttgttcttccttccagtccatcttccttctatctttcttcccttttgcctcaaagagggtgccccctgtttattacccacaagctggggcatcaagtctctacaagattaaatgcatcctctcccactagggccagacagtttcatttgtccctggctaggaccaggccctgtatgctttttgattggtggctcagtctttgggggttcccagaggttttggttagttgacactgttggtcttcctatggtattgctaccctccttcagttcctctaatcctttccccaagtcttccatttgggtccctggtctctgtataatgcttggctgtgagtatctgtaccagtctcagattctggtagagcctctcaggtaacaaccatgctatgctcctggcaacaagcacaacatagcaacagtaatagtatcaaagattggtgcatgcctatgggatagaactcaaattgggccggtcactggtcagctattctttcactctctgtttccttttgttccttgcatttcttttagacaagagtaattttggtcgaaagttttgtagctggattagtgttcccatccctccacagggagaactgactattggaggtagtttttgttgggtacttagattaaggtcacctgcattgagtcctgggatcctctgccatcccaggtctcttagaatttctagaggtcccccctatcacctgtcactgaaagcttcatatttccattaattatcctggagctcttggcctctcttcagtattcccccatgtttggtcctgcccctctttcctgtgaaccctctgcactcccattttcctccctctgcctcccatgattattttgtcccacatataattggattgaagcatcttgatgtgagtttttctgctgggtaaacttccaatagtttgtgggttgtatcctaggtattctttaatttttggctaatattctcgtatcagtgtgtgtataccgtgcatgtccttttgggtctgggttatatcc

SEQ ID NO: 3100 - DNA, 1600 bp, mus musculus
aaccacgattgaattcttaacaaagacacacattcttctctttagtatacaaatttggttttacccataattgtataaataaaaaaattatttgaaaaggaattgcctaacgttttaggtacagtaaatattttatttttataattattctacacaaacacacacacacacacacacacacacacacacacacacatatatatatatatatatatatatatatatgtatgtatatatatatatataaaatgtttggaaacatttttactgagataaaaacagtgaagagtgaacaagtttaaaacctgctctaacaaaggctatataaaagcccatatctcaaatattcatcttcaaaaactcaaggattttatcacccatgacagattcacggtaaagtttcacaattttttttttactttaattcatcatagtcttggaagttctagcaatagaagttaaacatgtaaaataaatacagaatacataaaagcctaatgagggccctgaccagcctgtcagcccaggggtaccctattttcctacttcttctcttgcacctctatcaggttcctgcaccatacaggtaagcttcccttctcccatccatttttcctgttctatgggctctctggcccaagccaggctgccctgatcagcctgctatatcatgtcaacctgcattctcccactgtctctcctctaccttcattagactcctgaaccatataggtaaacttccttcacccacctaacttccctgctggctaagctctctgggacaagccaagctgcactgagcagcctgtcctcccaggtggacctccatcctcctgattcctctctgcccacctgcatcagacctgaagctcctgaaccatacagaactatagatttggaaaacatatcccaaggacatccatcagaggcctgccacaccatgaccattgagatacacctcttcccaatacctgctacaacaagaacatgcagggactgaaaccatctagttggctataggccctagaaataaaacaatcaataagagccaggggaatttaacacctccaaagtacagtggcacaactagagcaactctggatatcataaatcaactgaaactccagaaaatgaccttaaattcaatcttatcaagatgagagaagactttaaagtggaaatggatatataccttaaagaaacacagaaaaatacaatcaaacaaacagagatccatgaagggaaaacaaataaatcccttaaagacatacaggaaaatgcagttaaacaggtgaatgcagtacatagaactgtgcaagacatgaaagtggaaataaaatcaatgaagaaaaaacaaactaaggagattctggagatggaaaacctagggaagaaaagaggaaaatcagatgctagaccaacagaatacaggagatggaaaagacaatctcaggcccagaagatccaatggaaggaattgatatatcagttaaagactatgctaaagtttaaaaaaaaatcctggaacaaaacacccagcaaatctgggatacttagtaaagacctaacctaagaataatagaattagaaggaggtgaaa

SEQ ID NO: 3101 - DNA, 1400 bp, mus musculus
cctttttaggtcttggatggctttattcaattccatcccctgtttggttgtgttttcctgcaattctttaagggatttttgtgcttcctctttaaggtcttctacctgtttagcagtgttctcctgtatttctttaagtgagttattaacatccttcttgatgtcatctaccatcatcatgagatatgcttttaactcagggactatcttttcaggtgtgttggggtggcccaggactgggtggggtgggaatgctgcattctgatgatggtgagtgtcttgttttctgttagtaagattcttacgtttgcattgcaccatctggtaatctctggagttagttgttgtagttgtctctgtttagagcttgatcctcaggtgattatgttagcctctatcagcagatctgggagactagatctctcctgagtttcattgttcagagtactcccagcaggcaagctctcctcttgcagggaagatacccagatatctagtgttcgaacctgcctcctggcagatgttgtgatccactcacagagatcttaagatcccgtggagtgtcctgtgggtactttgcatgtgtttgctccagactccatgcccaaggtaccccagtgctggcatgaccagagagacttgtacccctgatcaggccgggttttctgcttccctaattaatgcagtctcaggtcctctgtaattggattggagcagcagctgtgttccactcaccagtggtcttaagatcctggatagggtcctagaggtagctcccgggtttctgtagactccgtgctcaagcaacccaggtgctgctagggacgggaagggacttgtgcccctgatcaggccgggttttctgcttatctccatcaggcaatttttttttccgtattttcctcaattccaattccaatgctatcccaaaagtcccccataccctcccccccaccactcccctacccacccattcccactttttggccctggcattcccctgtactggggcatataaactttgcctgtctaatgggcctctctttctagtgatggcttactaggctatcttttgatacatatgcatctagagtcaagagctccgggatactggttagttcaaaatgttgttgcacctacagggttacagatctctttagctccttggttactttctctatctcctctattaggggccctgtgatccatccaatagctgactgtgagcatccacttatgggttggctaggctccggcctagtctcacaagagacagatatatcagcgtcctttggtgtcatcatttggaggctaattatgagatggatccctggatatggcagtttctagatggtccatgcttttgtctcagctccaaactttttctctgtaactccaat

SEQ ID NO: 3102 - DNA, 1000 bp, mus musculus
actagcagaggctattagacatgatagagtccctgaagatgaatcaacatatggaaacacaaaaaaatgatgctacaaaccagcacatcagccttggcatatctacctctacgagtactgtgttcatttttctggtttgttctcacaaaagtgattatttcagtcaccataaacaagtacttcttaatgaggtacagtctccattcccagacatgcctttagaccattttatctagaggtaaattatattatatgagttaggttaatcaacttctggcctctgaaatgttgaaaaatttcacaacattcttacatatcattctgcagcagccagtttacaacctttgtggttagaccaataaaccactttcttcatgatggtgatagattgctcacagatattagaagtcacttatcatgcagacagtatattatcagtggggcttttctaccagcaaagttaatgtcatgatctttgtaagactcttattaatttagttgcttttaaatacaaatctgttattagcatatgttttttctgcatatttgagatactttacctgtatttttgtattatatgtaactactatcccagtacctggcagacatttcaattgttctcagaagctcttaggagacaagggtcttgagtttaaagactaaataaggtcattgctggaggtggcttctctatcactggctctcacaatatgtataacaactatatgtatagtacccacatggtcattcttgaacatgcctacctatttatcaatgaatattcttcttagccactctcatttaccactgaactggttgatgctcctgcatcattggaaggttttatatccccttaccacatgagcattatactgtgggtgtatactaactacctatagcaccacaagtcttggtatcacactattgtcaatcaaaatgtactaaagtgatttgtagatgaacttccttgtcagggtgtggtagtagaggtcttttcaat

SEQ ID NO: 3103 - DNA, 1200 bp, mus musculus
ttattgattaggagtggcagaagagcagtagtataatagggggaacagtggaaaagaaaacttaattaacaggataaaataattgagtgtaaatattttttctctgacaaatcatgctttattaatattaatattaataaccactgagccatttttacatgccatacatcaatgggatctgctcacatgaaaatttgggataaaagcttctactttcctttcatcattttactcatgacccatgacagcagcctagcaccttcatgtttatcatcccattagtcaagaaaacagatattaggttatttttgatattttacagtcaagttttgggaactgttaactagaatttctggaaagaaggtatataggtagggactgattgactgaacagaatttcagtgatgttgaccatttgaaatgttgcaggtttagagactaactaccttatttcatgctaatgttagcaccaacaccactgggccattctttgctaacctgggtgacagatgaacactttgtgacaaatatacttttaacaaacttttaacatttattaacttatcaggcacatagtgtccaacaatgaaaacataagaatgcaatcaggtaaattttattttcattttttgttatgtatatgctatacatacatgttccactgtctgtctatttctgtctttctgtctttctctctgtatctccatctctatctctcctccccgacccatatgcaagagttggacatggggactctttttttaatcactctccaactcaaattttcagagtcctttgctgagtacagagctcactgcttgacttgccagagtgcctcatggattttttttatctttgcctcccttaatgatgtgatttataaatatatcccatcacttttagcttttggttaggtgctggagctatgaatgcaggtcctcactcttgaatagtctctctaacacattcacagataacaattttttcccagaagaattccccaaatgtggtttggatttattatgactaaattagtgcagtcatgtatcttccaactttaactcaataatatgtgtcctgaaacttaggtattaaaagttatacttactaatatgttacaaaatatgttatggagcatatagttgtgtggatttgtacaatgctccattacataagcttaggtatcaatcattcaattat

SEQ ID NO: 3104 - DNA, 1000 bp, mus musculus
atatattatatcttaaaacagctgtctctacataattctttaaagggaaaattgttattaaaatttgctaattccaaggtcacattgttcaatgaataaatatcgaaaacgtaacgtggaagggttaaatatatacacttacaaatatattgcccgagcttttgtccccaccggcaagaacacactcaggacaaccagaatcttctgtggcaaagcttttattgcttacttatcagatgggaagaccccgaaccgggaaaatggcgctgcttatatagcccgcagcgtgacgtttcagcacttgatgtggcatgacagctcctgatttattgctcacccatcaccccattactacgccgcgagatgggcagtgatgaggcatgagttgactcttgcacttgcgcataaggcttatttactagttaggcacagtggaagccagcgccatcttataatggagattgctcacggcacacacgcgattgctcgcagcacggttctccacacaaatacacacaaacataaacaaatataaagcatacaataaaggcttgtgctttaaagaatttaaaatttgattagtttctgaaatctaaacagttaacatgaatgatataagagagttatgtgattgaataattttattgtatatgtctggatgctacaagaattttgagaaggaatcattaagaaaaactgccataggcattaaaggttctgctatgttttatatgtggtatttcttaaaacctagcatttcatataacagtattacgaaactgagttttgtgtatgtggttatgtcatgaagcctctacccttataaaatgctatttaaatcaatttaagatctcaacaaacactaaatctgcttttgccttatcatgaaatttgaattcccattctctaaaatgaagagaatgtagtcatcatcctggaaacataaagtttgaagcatttacttgtgccacctaaatgaactaatataggtattaagttg

SEQ ID NO: 3105 - DNA, 1600 bp, mus musculus
tctgtgcttcctgatttctttcctagggtgtctatctccagagttgtctccctttaggttttctttattgtttatatctttttagatcctgcattgttttgttcacttccatctcctgtttggtaatgtttttctgtaactctctatggcatttttgtgtttcctcttaaatgattcaagctctttaactgtgttttcctgtatttccttcttaaagtccttcatgatcatcattagaagtgactttagatccatgtcttgtttttctggtgtgatgatatatccattgtttgttatggtgtgagagtttggttctgatgatgccaagtaaccttggtttctgttgcttctgttcttatgcttgccttctgccatcttattatctcaagtatttgctgacttcaatatatctgattggagcctgtccttcctatgatcccagatggtttagggctcctcagaatccagctttctctgtgatcctttgcttgcgggctcctgtgtacctgtgattctgggtgtgtcagagttcttagcagtaaagttcctctgagaccctgaaatactggggtgaccaagctctttttatcctgggatcctgttgtcaaagatcctggatgtgttacagtgcttggaagtggtgtgtcctttgaggagtatggagctggctggtcagtagtcctaagatcatatggagagtcctctagggaccttgggggtatcagctgactcagagcccaaggtgatccgatgctggagccgaccctggttggaaaggacttgtgaccctggttaggcaggattttctgcttccttaatgctgtctcaggtcctgaaggattggattggaacagaagttgagttccactcatcagatgtcctaagatcgggtggagagtcctctagggaccttgggggtgttagctgactccgtgcccaaggtgacctggtactggcaccaactcaaagggacttatgatcctggtcaggctggcttttctgcttccctaatgctgtctcatttcctgcgctattggaatggaacagaagttgtgttccactcacaggtggtcctaagatcgggtggagagtcctctagggtacttgggggtttccacagagtctgcgcccaagatgacccggtgctggcactgactggaagggaccagaaaaatctactcttaagacaaatatatgtatatatatatatatatatatatatatatatatatatatatatacatatatatatatatgtatatatatatgtatatatatataatcaaaatggtgaattaatagggataattagaattatctgcatattatatttctaacagtagtattcaatattgttacttggtttgtgatgactctactagggaaaaaataatcttgtgtattccattctacttaataccttaacatgatacataaacctacaacagatacctccctggagactgaggtatcagcacacatataattccaaatatttgattcatttacagaagacctaacttaaaacttgaagaaaaaaatgtatttctttcacttttcttattcttgcttctaaacttctcataaattctagcacatg

SEQ ID NO: 3106 - DNA, 1000 bp, mus musculus
ccaattctttcccacttgccctccaatctagatccaccatttttctgtctctgcttagaaaacaaacaggcttctaagggataataataaaagtaaaacaaagcaaaacaaaacaaaacaaaacaaaaactcacatgtcagagttggacaagagaatgtaaagaggtcaagaaaaggcaaacaaatcatagacccacaagttcacacactcatgaatctcataaaaactctaaaatatgtatactcggcacatgaagccgacttagaccaggccatgttcatgctgtttctgtccactgaagttcatatgagctataatcatgtttatttacaggaccgtgttttcttgctatcctccatcctctgtggctctctcttccactctttgtgccttctcttccttttaaaaaaattatttaatttttaattttttattagatattttcttcatttacatttcaaatgttatcccaaaattcccctataccctcccccctgccctgctcccctacccactcactcccacttcttggccctggctttcccctgtactggagcatataaagtttgcaagaccaaggggcctctctttccactgatggccgactaggtcatcttctgatacatatgcagctagagacacgagctccggggtactggttagttcatattgttgttccacctatagggttgcagaccctttcagctccttgggtactttctctagcttctccattgggggccctgtgtttcatcctatagatgactgtgagcatccacttttgtgttttccagacactggcacggcctcacaagagatagcaatatcagggtcctttcagcaaaatcttgctggcatatgcaacagtgtctggttttggtggttgtacatgggatagggtagggcagtctgtagaaagtccatcctatggtcttagctccaaattttgtctccgtaactccttccatgggtattttgctccctattctagggatgaat

SEQ ID NO: 3107 - DNA, 1000 bp, mus musculus
aggggcgaatatggcccatctgtaactattcttgaactaattctttagcagcctgtaatttctctgagggcaaaggccactgaggaacccatactggaccctcagtcttccaagtaatggggatggcctcctcagtggcccctaggaaaaacccagtccagcacgacctttcttcgaactcacaggaataggggatttcctgccctgcaagagaggccttaatccttttccaggttgatatccataattctgcaactcaaccccacacttgcacttctccctgtccttaatacagttacgtactaacttccatactggaagcacccccttgaggaggacccttgctcctcggcaaacttcagatccttccctaatttctcccaactaggccctgtaagatgccctgacacagggaaccatggagccacctgatcaacggcctttagaaagttttctaacgtctcctttttcaacccgattccttttactttcaacaaatcctttaatgcctggcgaacggactgccctgatgttttatcttaatcgtccctaaccgggaaccttatttgtctctaaccgagaacttgaatcatcccacttacctgggagctttccagctggctaccctgacctcttgaagttctggacctcttgcgcgcgcacgctcgactggccaggaagaacgacgctgcaacaggatccttcttcacacgtttattgggagagcttgattgtagaggcgaaaagacctcgagcccagaactggtgctgtttttataggcctaggaggggcgtgtctcacacccggattggttatgcactaagccttatttgcatgttcctcatctgattggctactctctctcagtaccttacagaacctcattatcatacctcatttgcatgtctcacatctgattggttatactctcagtaccttacagaacctcattatcatacctcatttgcatgtctcacatctgattggttatactctcag

SEQ ID NO: 3108 - DNA, 1600 bp, mus musculus
tctgttttgcgggaacctttattaactgctccttccccgtgatgcagttctgaatcctccctgtagcagggggtcttcactcatgcctgaagatgtttcttgtcccgggttttggcaccacttcttgcgcgcgctcgactgaccaggaagaacgacgctgcaacagtatccttctgcacacgtttattgggagagcttgattgtagaggcgaaaagacttcaagcccagaactgatgctgcttttataggcctaggaggggcgtgtctcacacccggattggttatgcactaagccttatttgcatgtccctcatctgattggctactctctctcagtaccttacagaacctcattatcatacctcatttgcatgtctcacatctgattggttatactctcagtaccttacagaacctgattatcatgcctgggccaggcagtgtctttgcaaaaaactttactgcatatgtacacattggttgtttgtccaatcttatgcgtggtggccagcagtagtcagtgccactcagcaacggcacatgtggcttcccacatggacccactgcgctcttgtgaagtagaagtccctgtacgggccaccacttgtcgcatccacgcagaccagcaagaaagactcgacaccacgttgtccttcttcaagcaggtttattcaggtactcttcacattgcaatgcaggaatgggaatcccccaaacaaccctgaggaacaccttgaatacccttctgactcctcccaatcaccccagtcacgtaacggcagtccattctttcacaacaagtgaggacccctcaggcgagctggcaaggcatggcgtctgtgcagtgcaggtggctgggatgtggctaagtctgaggtaataaggaagtcaggtgcaggtcataagacctggcaagccctcctgggcgccatcttgtggcggcggccgtacccgctcctcacatctctgtttgtctctgtctttgtctgtctgtctctctttctctctctctctctgcttgcttcttttgtattggatgtaagctcccatttactgctgcaacattaagcctgaatgcttgctgccttgcttctcatcattatcatcatggactctaaccctctgaaaatgtaagcaagtgccacaatgaaattcttccttctataatttgatttggtcatactttctctttacaggagcaatagaacagtaactaacacaatatacatcaaaaaagaaataaagcatcatatatgcacatagtagaattttatgcagctgtaataaaaatgagatcatggaatttgaaaaaaaaacgaatgcaatgaaaatcattatgctaagttgtataatacagtctcagaataataaaaccatgtcttctcttatatggaacgtgtatgtgtgtttatgtgtgtgtttctacatatgtatatttgcagatcacaaaactaaaaggcggtcatgagaggataggaacagatattaaaggatgtaggaaaaattagtgtattaaaatgcatgtaaaaggaaagtagaatgtgtgattaactgtgagggtagagattcaactagagccaaagagctacctgacatggt

SEQ ID NO: 3109 - DNA, 1000 bp, mus musculus
atgcagcctaagttgctagaggctgaagctggggttccctgactcctgggaatctagtcagtactgaaaaactgcagaggactcaggaacagaggattgggggtctctggtcctaggatgaggatcctgggtacaggggctccaaaactcctggacatccagacactgctaaatcgtttgaaattgggactggagttcaggcctgtgggctgaggatgagcctggggactgtgggatggagaactctggcttagttcattaatggttgtcatactgttatttatctatctatctaccaaccatttatttatctatcactctgaccatatggaatttattgaaggaaaaactaatattaaaggaaccaaacaatacaattcttcttactagaactacaaagaaagaataaatggtatttattgctgcaaaattcaattgatacaaattcttccatcattcataatttttaaaactttacaaaggctaaatataagtttcttcaatcatagagaagctatgcacaaaaagttggatgatgactttgtatttactaataaatgattcagtgcttactccttcataagagaaacaacaaaagcatgtctgacctttacagagatgtttattataatgtctaatgaagcaagataagaattttctaaatgtcgatagaagaaaattaataaaatatttatttacactttattatctacaaaaatttccaactatttcatgtgcacaaaacaaaattgttctaaatacctagaaaagtttttttaaattttttcagaagaaattattgtataaagatcatttttgccaggcagtggtggtacatgcctttaatcccggtacttggaaggcagaggcaggtggatttctgggttctagtccagcctggtctctagtacagtgtgagttccaggacatccggggctacacagagaaaccctatctccaaaaaaaaaaaaaaaaaaaaaaaaaaatgtactatatataa

SEQ ID NO: 3110 - DNA, 1200 bp, mus musculus
ctgagtgtgtgtgtgtgtgtgtgtgtgtgtgactatatacatattaatctgcacatacacatacatgtatatatgtgtcttatatagagattcttttttggatattttctttatttacattaccaatgttatttttttatttttattagatatttcctttatttacaatttaaatgttatccccttttttagtttcccctctgaaaatcccctatcctctcccccttccccctgctccaccacccaccgactcccattcctggccctggcattcccctatactgaggcatagaaccttcacaggacctagggcctctcctcccattgatgaatgactaggccatcttctgctacatatgcagctagagtcacaagtaccaccatgtgttttctttgattggtggtttagtctcaaagatctctgggggtactggttagttcatattgatgttcctcctatggaactgcaaacaccttcagctccttgggtactttctctagttccttcactggggactctatgctccatccaatggatgactgtgagcatccacttctttattaatcaggcactggcagagcccctcaggagacagctatatcaggcttctgtcagcaagctcttgatggcatctgccatagtgtctgggtttagtggtggtttatgggatgcatccccaagtggggcagtctctggatggtcactcctttagtctctgctctgaactttatctcctttcctttcccccagcagaaacctcctatctcatccaccttccccctgcttctaagagggtgttcccacccacccacccacccacaccggcctgcttgcccttgcattcccctacactgggacattgagccttcacaggtccaagggcatcttcttccattgatgcctgacaaggccatcctttgctacatatgctgctggagccatggctccctccatctgtactccttggttggtcttttagtacctggtggctcttagggtatctggttggttaatatttttgttcttcttatggggttgcaatccccttcagctccttcagtcctttctctaactcctctattggggaccccatgctcagtccaaaggtttgttgtaagcatctgaagaggtataataagaaatgtatgtatggaaatgggaagtcatccatcctatggttcatgggaacttatgtgact

SEQ ID NO: 3111 - DNA, 1000 bp, mus musculus
tgtaagacagggatgaaagaacagagaaaattgtatgtataaggctatgtaaaagaaataattttgaggcagtgaactgtgcacagacagcctggtatccagtcaaacacaagcctggaacccccagagacctggtgggccatgacttctgccttcatgggatggtaggggtttgtccatgcctcctaggcccctggctcctgttgcagttacagcctcccacagccccatgcagagaattgtgtggccatcagtcacttaggcaatgccccaagcttctggtattctgtctggactccacctcaatagttacctgtcaacagccaggtatgctcctctccacagatacctggcaacagccaggatggttcagcccactataaatggagctgcttgccctctccttgccctcttgctcccttacctcttattcccttgctcccttgctctccttcactccaccttcccttcctccctctttccatgttgccatggctgccttctacttctgtacacttctccgtctctctgctttctacaattaacaccttaaaaccatgaaccatatcttctcttcagatccactaacaagctgccttgtgtctagcatcctgccaggagacttccctgcactccaatcatggccactagccaaaccaagccacacaccaagcaaacagcctgtgctagccaattgctctcttccctgtggtaacctgttagatttctccttcctgccctttttccttcggccccaggccagagtcctcccaagagttcccactttgttctcagctcttctgctacatacagctgcatctgtgagttcagagcaagaacctgttttaactggcccctgtgtggcccagagaccccagaaaaagctcttccacagtacccagcagcatcagttgtgcccaggagactcccaactccaacagttcaacggagccccagcctgtgtgttttcccacccccagagcaggatcccaaggcttcc

SEQ ID NO: 3112 - DNA, 1000 bp, mus musculus
cttttggagatagaggcttgctggaggtgttgtgacccactgagtgagaactgccaatttatgtgctctcaatggttatattttctggaaaaacttaagtttgtaaaatttatcaattgaggatgaaaagctctgttttaataattgtagtggatatagtactttacagtttataatcaaagagctgttataagaagggatgatttaggtcccttccggttggcaccagcactgggtcaccttgtccacagagtcggtggacacccccaaggtcccaagaggatgacctgtgaatggaacacaccttctgttctattccaatcatgcgggacctgagacagcattagggaagaagaaaacctgccctaaacatggtcaaaattcccttctggtcagtcccagcacctggtcacctgggcaaggagtcacaggacacccccaaggtgcctagaggacagcttctgaggcagaccacatttcaggctccagacatccggacaccttcactgccagaggacatgtgtcttccccacccaggagggctttgccagagcatctgggaaagccatcttggttcccagatccctctgagcctagtctgtgcaggtgagagtgtgaactacagaagctaacagcttctgggacatgccctgtttcaggccttcaacttctgccaggaggcaggtctggaagccagatatctgtgcaccttccctgcaagaggagagcttgcctgcagagagtgctcagaccactgaaacttaggagagatctagtttccaaggtctgctgatagaggctaacagaatcacagaaggaacaagctctatccagagacagctataacaactaactccagagattaccagatggcgaaggcaaacataagaatcttactaacagaaaccaagaccactcaccatcatcaaaacgcagcactcccaactcacccagtcctgggcaccccaacacacctgaaaatctagacccggttttaaaa

SEQ ID NO: 3113 - DNA, 1400 bp, mus musculus
aaatggtcgctatccaattccacccaaattccttgtctaggcacaattctgtcttctcaaattttattgaagcaatatagaaaatcactcttgttttcctaggacagtaaatcagctgtttctaagtcaaccaatctggcatagtaagaaataaaatccaggagctacagtcagacataaaagaacttcaaggaacttgagacgtccagttctgggattctcaaaaatcttgtatggaagtggatactcgctttcataccagctttcctagtcatcttcctggcattattatttgttccttgcttcattaatcttgttactatattccttcaatgacaatacataaaatttctaaccaaaatattaatcagctcctgttataggattatcagccactgctcacagaagagacactgtccacagtggaacctggatcctgatggtgaaagtcagctacaccccaaaattaacgatgcccctagacagctggaagcagcttatgagacatggctccctcattcccttttcaccattggcttccccctcttctttttctcttctctttataataacaagaggggacatatgttggtatcagaacctctgaaacttgtgacatcacatcagctacagcaagacctatatacctgttgccaagacaatggccaccttattcgcagaatccattgggctcaccttccaactttacctatgaccatgttaccatccataatatataagaggaatggccccctcttcctctcccccccttctctttctactgccaccttccttgcctctctttctcccaataaacctcttacacgtggaactgttttggcctagtatgctgtgttcagatgtgagttgctattctaacacatcaactgtcacatgtgagataagttcttctcgcttggctgcattgtgtagcctcagcgaaagataatatgcctagcctcacagaagtttgatgtgccagggttgggggataaccaggggtttccatcctctcagaggagaaggggagagggaatgagggaaaatgttgaggggggggagtaaatggaacagagccagtaagagggatgtaaagtgaataaattaagaaagaaaattaaaatcttaaaaatgaaatgttcttgtattagtatgttagtttttaaaagtataaaaatcgagggaattagtctgaacaggtgagagggtgcgccagagaacctgacagcttctggaacaggcggaagcacagaggcgctgaggcagcaccctttgtgggccggggacagccagccaccgtccggaccggaggacaggtgcccgtccggctggggaggcggcctaagccacagcagcagcggtcgccatcttggtccgggacccgccgaacttaggaaatt

SEQ ID NO: 3114 - DNA, 1000 bp, mus musculus
tactggattgtaaagtaaacacaccagcaagactttattcatgactcaaaacataggaataatattctttcaccacattctttaaattcacttaaatttattgcagaggtgtctgatagtttccaaaagagactgcattaaagctagagttcagagcatattttcattacaattttcatcaactaaaaccacaaagctattaagtgttttattttatttttttgaagaaagtataatttatttattgttcacttctaaaattaatggtgttacttgtgtgtaataatgggtttgtcatgactttttttttcctttttgaattaggtattttcttcatttacatttcaaatgctattccaaaaatcccccatacccccccccactcccctacccacccactcccacttcttggacctggtattcccctttactgaggcatgtaaagtttataaggccaaggggcctctcttcccaatgatggccgactaggccatcttctgctacatatgcagctagagacatgagctcttggggtactggttagttcatattgttgttccacctatagtgttgcagacccctttagctccttgggtactttctctagctcctccattggaagccctgtgatccatccaatagctgactgtgagcgtccacttctgtgtttgctaggccccggcatagtctcacaagagacagctacatctgggtcctttcaataaaatcttgctagtgtatgcaatggtgtcagcgtttggaggctgattatgggatggatcccgggtgtggcggtctctagatggtcaatcctttcatctcttgtctctgtaactccttccatgggtgttttattcccaattctaagaaggggcactttaaacaagaaaatagaaacaaaaggaagtcactatatatggcagataaataagacaaatacacatgcactttataaaatgaaattaaaaattaagaatacctcaatgcacttaaagtactt

SEQ ID NO: 3115 - DNA, 1200 bp, mus musculus
tgtttccatttccttcttcaattaacatgaccacaaattacattctttatcacaactgataaacaccaaataaaattcaccataatttggaaaattattaccagtccataatgatagtcattgaatatatccagtaaattacaatgctgttttctaaaaatttttaatataatctgttttcaatggtctggaaacatttttattaaaatgtaaaatatttctgtttgaaaaatctcatctctggaagcaaggccatctttgggacactaaaataatcttgaactaagaacaatttggggaccttgaggtagcttggttagccccggggtcaaagggaggaaaggacaggggggagaggggatgctgagtggttcataggctggtgagagtccttggtccagtcagtggctagagctcaggaaggactccaagtgggaggttagatgcggctccttaggggaaaagcctatatagcattcttcaagcacagttggccttgatgatcggagagtctatggtttttagagctttattgtagaaatacagagagaaagagagtaggtagaaagagggagagaggctggccatggccatgtggagagagaggggaaggaagagagaggaggagggttagagaagagagtaagaaagataagagattaaagagagtgaggaaggaccaagcagccgctttttatagagggttggactatcttgctgttgccaagtaactataggaaggaacatacctggttatagttagataactgtatgggtggagtttagccataataccaggcaggagcttgggacattgtcttcatgactgatagtcacatacctctcctgcagggtctttgggggctgtaactttgacaggatccaggggtccaggagacatgagcaaacacccaaatcccatgtaggtagaaatcactatccatcgggtcccttgggttccagacctttgttcaactggagaccaggctgtctgtgtgcagcctactgccccacaagaaatacttcttaactaattctgtaaagccacaattactctgataccttaaccatacaaggacccaactaaaaatgagaacttcagaccaatttcgcttatgaataccagtggaaaaataataaaatttctgcaatccgaatccaagaacacattaaaaccatcattcaccacgatcaagtagg

SEQ ID NO: 3116 - DNA, 1400 bp, mus musculus
taaaacgagtcttaaaatcaaatcatctgatgtaacaaagaatattgacaagtggcttctaataattgaaatgtttaggacttcataatttagcaactccaaaagaagtaataaactcctggcactgggattcatatttgttaggctatgctgtctagtagaagcattattaccatattacagagtaaccacattttaagtcttatgtatatatgcatatatattttaaaatgtttctaaagtagaaggtttccatataacctcactatgtctgttggatatgactttataaggggaaaagagaattactctggatacagactatatgacatcttctggtgagtcaaatgtgggggtcacaaggcttatgtaatgagacatgaaggtctaatgcaagagaggagttgctctgttcctgccaatctcaggaaaatatttcacagggttggacacacaacaacccactatttctctaggactggttccatatttcttggccctacaccagacattcttttttcattgaccaatcaacagacccaaaggtagatcctgtctcttggaccctgcaagtagggttgtagtagacatgaaaattgagaaatatctttatacgataagatggaccatccagagactgccccacccaggggtccatcgcatactcagcctggcaaatacagaagtggacgctcacagtcgtctgtaagatgcaacacagggcccccaatggaggagctagagaaattatccaaggagctaaagaggtctgcaaccctataggtggaacaacagtatgaactaatcagtacccccagagctcgtgtctctagctgcatatgaagcagaagatagactattcagccattattgggaagagaggccacttggtctagcaaactttatatgccctagtacagttgaacgccagggccaagaagtgggagtgagtgggtggggcaacagggtgggaggagggtacaggggacttttgggatagcatttgaaatgtaaatgaagaaagtatctaataaaacgtttttaaaaataagaaatattaaaaatatctttcatatattgagtgtgtgtctgcttaagagttttaattgaatacattcaagttgttctcaggatatttttattaaaagcagagttttaaaaatcatgcaaatatgtatacaaatataattatgaatgtaggtgttttgtgaaggagattactagaaggaaatgctggatcaaaatgtagactttttttttaaagaatttcattgaacttcaaatgatttctaaatatattcagagaaatatttatcctgtgatgacaaatccataagaatcattattaccttgttttcctaagatctaaaaccttgtctgtaatattcagagaggtcaac

SEQ ID NO: 3117 - DNA, 1000 bp, mus musculus
tttgttttgtttttgttgttttttttttgttttttgttttttgggttttttttggggggaggggttcgagacatggtttctctgtatatccctggctgtcccctggaactcactttgtagaccaggctggcctcaaactctgaaatctgcctgcttctgcttcccaaatgctgggatgaacggcgtgcaccaccatgctcagctcatgtgtaaatgtgttttgtttttttcttgttacacagctcttaaaagcaatgagtttacgaaattcttaggcaaatggatggatctggaggatatcattctaagtgaggtaacacaattacaaaagaacttacacatgatatacactcactgttaagtgcatattagaccagaagctcagaatacccaagatacaattaataaaccacatgaaactcaagaagaagaaagaccaaagtgtggatacgttgatcattcttagaagtggtgataaagtacccatggaagaagttacagagacaaagtgtagagcagagactgaaggaatcaccatccagagattgcccgacctggggatccatcccataaacaatcaccaaacccggacactattgtggatgccaataagatcttgctgacaggtgcctgatatagctgtctcctgagacgcttttccaatacctgacaaatacataagtggatgctcacagccatccattggactgagcacaaggtccccagtgaaggagctagagaaaggacccaaggagatgaaggggtttgcagccacataggaaaaacaacaatatgaattgaacagtacacccatagctcccagggactaaaccaccatccaaagagtagacatggtgggacttgtggctccatctgcatatatagaagaggatggcctagtcagtcatcaatgggaggagaggcccttggtcctgtgaaggctctttttccccagtgtagggtaataccagggctaggagccacgagtgagtgggttgat

SEQ ID NO: 3118 - DNA, 1000 bp, mus musculus
tggcctccaacaacgcaggtggcagttattattattgttcatcaagaagaattctaaatacatattgtggctttggtctgctttgggaatatggtgtgcgatgaggccctgacagtcagttgaagggcaaccagatcacgtaatcataccaatctaatacaggggtacatgccaaaaggtcgtggttgttgataagacaccacagtgccatgtttgtgtaaattattacacatacaactgcatgtagccccctatgatggaattggatggttcgggaggatctgagatcccaagacaggcagagctgccagccaccataattccaaggcatgacttcagagcataaataaattttatgcctcattccagttttatttaatattatttaaagggggggaaatattacctccttccggcctagcaagactggctgagaccaactgcccctgaggcaattccacctgctgtgttgcttctcatccctctcttttgatatgccactacctgccacctgcctgaggctgaatcacttctccaagatcttccagagttaacaaggaactgtgattttcctgggttcttaataaaaggctgatctgacaacttcgaaggaaccttttgtggctgggaatgggcctcccctcttctttataaagcgtgtttgcctacattaaagttgagtcttgatcagaattcagtcttgactccatttcattctttacccgcctagattccctcttttctttcagtttcaaaatgcatcccaggctagaacccagacatgagagccgcaagccggccccaacagtgggagacttcaacaccccactgtcactaatggacaggtcattgaaccagaatctaaacaatagacacagtgaaactaaaagaggttatgaaacaaatggatttaacagatgcccactgaacatttcaccatccatttgcctaagaatttcactaattcattgtttttaatagctgagtagtactccattgt

SEQ ID NO: 3119 - DNA, 1200 bp, mus musculus
ctttcagactttcatctgtcaagctgactccactggagtcccgtggcagtatatgttggagtatacttggttttgttgatttctgtactgtactgtccttggcaataaacggccatctagtagtatcatttctacccctgagaatagaactaccaaccactatgtcttccatagtccacatttaaattttctacaaagtttgtgacatgttcactcttctaagttatagattattttactcaaactttatgcataagattacttctcctggtttgatcctgcactcaccacttctggtgagtgcaggatcaaaccaggagaaatagggttaacacagacagcactagaacaaaaggctttcagtgctgccttccagttaaggggagggattaagaaggatcaaagttactcacagtatcctctctgagttgaatccaccatggttctgaacctgctctggttggtcggaggttctcctctctggtgctgtgccttgttaaggcgtttttccccagggtttcgagcaccaagtatcctgagcttatccctgtcccacaggaaataaacacaggacacgccagattcttccgtggttaactttacttcataaaatattgaggtagacaaagaaggctcagaaagtgtgtggcttaaatactttttggtgacatgtctaaactaggattggtagctacacccacgaatctcatgcaccctagggataggcacacctagaagctcattcattgggggcccttgttccatccaatagatgactgtcagcatccacttctgtatttgccaggcactggcagagcctcacaagagatagctatatcagggtcctgtcagaaaaatctttctggcttatgcaatagtgtttgaatttgttggttgattatgggatggatccctgggtggaacagtctctgaatgatccttacttctgtctcagctctgaacttcgtctctgtaacttcttccatgggtgttttgttccccattctaaggagcaaaatatccacactttgttcttccttattcttgagtttcatgtttattgcaaagtgtatcttgtgtattctaggttcctgggcaaatatccacttatcagtgaatatatatcaagtgacttcttttgtgattgggttacctcactcaggatgataccctccagatacatccacttgcctgagaatt

SEQ ID NO: 3120 - DNA, 1200 bp, mus musculus
actgaatggagtacctggacttcttcaaagaagttttatacttttgtctttcacagtcacacctttgtttttcaagcaggtcagttaatgcagttaagcctgtctgcaacagatgtaaaacctggcctccaacaacgcaggtggcagttattattattgttcatcaagaagaattctaaatacatattgtggctttggtctgctttgggaatatggtgtgcgatgaggccctgacagtcagttgaagggcaaccagatcacgtaatcataccaatctaatacaggggtacatgccaaaaggccgtggttgttgataagacaccacagtgccatgtttgtgtaaattattacacatacaactgcatgtagccccctatgatggaattggatggttcgggaggatctgagatcccaagacaggcagagctgccagccaccataattccaaggcatgacttcagagcataaataaattttatgcctcattccagttttatttaatattatttaaagggggggaaatattacctccttccggcctagcaagactggctgagaccaactgcccctgaggcaattccacctgctgtgttgcttctcatccctctcttttgatatgccactacctgccacctgcctgaggctgaatcacttctccaagatcttccagagttaacaaggatctgtgattttcctgggttcttaataaaaggctgatctgacaacttcgaaggaaccttttgtggctgggaatgggcctcccctcttctttataaagcgtgtttgcctacattaaagttgagtcttgatcagaattcagtcttgactccatttcattctttacccgcctagattccctcttttctttcagtttcaaaatgcatcccaggctagaacccagacatgagagccgcaagccggccccaacagtgggagacttcaacaccccactgtcactaatggacaggtcattgaaccagaatctaaacaatagacacagtgaaactaaaagaggttatgaaacaaatggatttaacagatgcccactgaacatttcaccatccatttgcctaagaatttcactaattcattgtttttaatagctgagtagtactccattgtgtaaatgcaccacattttctgtgtccattcctctgttgagggacatcggggttctttccagcttctagctattataaa

SEQ ID NO: 3121 - DNA, 1800 bp, mus musculus
ttgtaatcagttcattattatttatacatataaaacatgtataagacatatttgtgacatataactttaaaaaaaaggtaatacaaattttacaaatattacagaactctgcctatttattctggatgctcttaaatgcatattaataaaaaaccagccaagaatccctaccattgaaaaattaataaagttgtagtacaatttaccctattgatccatgaaactcattgtactacagaagacatatttcataaagtacaaaataggtgaattacagtattttaattacttttctgttgtaataataagacactgtggcaaataaaacttacaaataaagagtttattaggggtttattcttggtttcagtggcttggactccgtggtcatcataattgaaagcttagcagcaagtagacccacatggtattgggataacaatttgaaggcagacagattaatctaaccaggaatgatagaagcttttacatctcaaatcccacccccagtgacacaacttcttcaacaaggtcatatcaactaattattcctaaaaatttacactaacataggatcaagtactcaaatatttgagccaaatgagatcattcccatccaaagaagcccccaaagcatacttattttgtttttcagatcatctgttaatgtgtttctgaaattatagtctgttgtggtgtttccttttaattgtcatcttgacacaaactagaatcacttgataaagcaattaaaattgtgtggatgagactgacatatgggctaggcatggtgatgcacacatttaatcccatcacttggaaggcagaggcaggcagatttctgagttcgaggccagcccagtctaaaaaggaggtccaggacagccagggctatacagagaaaccctgtctcgaaaaaacaaaaaaacaaaacaaacaaacaaaaaagactgacatatgtttgtgaggaactgtcttgattattagttgatgcaggaacacccaccctgaatatagttgacacaattatttatttgggctgtggaatcttctgtgaatgtaaaaaatagctaagtcgcaagaacatacaaggatatactcatttcaaaatctttctgaatgcagacatgtgaccatctgcctaggcaagtttcatttgatgaaaactgacaaattgtaacttctaattataagccaaactaagcctttctccctaatttggtttatttacagcattttattgtagtaatagaaataagactggaagactcataaagtaacaagacaaagttataagttctcatcatgtatttttcaagttctgtggcattttttacacaaaataatttctacacaccctttgattaacatggatgcttgctgaaattataaacaaaaagtctagaccaacttcaggcaccccaggtaacattccactctaggctctaggctcaccaattccccttcaagtattttgaacaacaataaagtgcaacccatgacctgactcaatattccttctcacaacttgagctgaagatctctgctttttttttttttttttttggagtctctatctagggaacccagaggtaatgttgacacccaaaacctcagaagacagaggagtcacaaaactctcagcaaagacaccctcctggacctgaagacttcctggtcactagaaccccaaggcattaagaccagaaaacctggaggaaacaagagaccaagggaataaaaacatcaacaaaacaaatcaaaaaaccatgcatctgacaattacatatgtagaaatca

SEQ ID NO: 3122 - DNA, 1400 bp, mus musculus
aaaacatcatccacagcacacaactaaattatctgtgctgaagcagggggatgttgaaaagaatacgcacgtgatctaattcacatgtactgtttcccatagagaggttgtttttaaacacaataattgggatacatgcatgcatgcatgaatttatagaagatacaaaagcatgcataaaaacaattttttaacttacctttgagatattgtttgtcaattttatttaaaatgatggtatataatagattaattattaatattctgtaataaacaaattaaatgctttttggaacaaggaacagacattttgtcaagttcctaaggcacaatttttgttaaaggcttaccaaaatacacgaatatatcttacaattctttattagcaccagagtagttttaatagatttttgaaactgtgctttgaggtgagtactacctcggccctgcccacctgccttgatgaggctccatggtttcgggcatgacacccacagggtatctcaggggggggcagtttgccctaagtcctccttgtccctggccacctgccaccctggaatgcggagtcactctgaaaaggactctggattttaacctgctgttgagccccacatctctgaaacggaggtggtgtgtgtctgctgtgtctgctgcagtgatgtcaagtggcagctccttcatcctggaactggcagtagattcagccttgctgtagcagccacttctgtcaccgctgcagccaccttggccttcctctcaggctaggaaacacaagggagggtggcggagcaccccgggccttagtgggaaaaatatggctaccccagcagagacaggcagaggctcatgggccaatggcaggcaaggccctccccactgagttggctacaaggcctcccgctttttggcagcttctcgtatcaccatgcccagggaaagctgtgcgcccaagggtctcgccccacagctgccagcagtcactggccctgagccagagaatacagaaattaaagagggtaggagatcacagcaggcaaaatatttagaatttacctgacttggaaaaaaaggaatgacttcaaatgtattaacaggaaccagataaatgtttacagtaaggataaagctgctctgcctagggttagcttaatgacacctaaggttttaagcaaaattccttcgagaggcattagctaataaaatattttctacttagaaaacaatatacactgaaagattcaaactcttggcttcttgcatagaagcagaaatgataaaaattcctcacataatgtagacctatatttagccatacctagaggtaaaatattccagtaattacaaactcactagaagcaaaacctttacaatcattaagatacaaagaaaaaaaaaac

SEQ ID NO: 3123 - DNA, 1200 bp, mus musculus
tgtttgagtctgttttcctgtatttcttaaagggatttaattctttcctctttaagagcttctacctgtttacctatttttttcctgtatttctttcagtgagttatttatatcctccttaagggaaaagattttagttcaacttcttgattttcaggtgtgttggtgtattcaggggttactgtgatgggaggactggtttctgatgatgctcatatatattggcttccgttgcttatggtcttgtgctcacctctcaccatctggttatccctggtgtttgctgagtgactttctggagtctgccatttttgtccctgggctgcctcagatgccctggtaggcctgctgcccatagctatagcagaactcctgtggggctttccaacctggggtcttcagaggggcagagaatctgctgatatgttgccctggctacagcagatctcctgggaggcttttaatctgttgggtcttcagaggaggaatcaagctgttctgggacttatggactttggtttctgtttctctgtgtgtagcaaaactcaaaggagactttcattctgttgggtcagtttccctacatgccatgaagcccctgggatgtcttcagactgtgcagtcagttgcccagttgtcttgtgtccaaaggcttttaagctgtggtgtcaattatcctgtgtagagtggatatcctgggattcatataggcagttgttatgtgtgcagtgtatcttctgggatgcctcaggctgtaatgtcttcaggggagtggactagctgccagtctgccctggcagatggtgctgaccagaagagaagtcagggaggggagcttcagggtgtgatgaatcccaaggccactgggctcccacaggcagctgtgggacttcagaagggtccttactagttactctgtgtgtagtatatctcctgagatgccttaaatcagattttaagcatctcataaaaaaccattatcattctaccgtatatagttttaaccagaggagctggattttcactctgaactcattatagcacatctttctgttcttaccctgcaatataccacctctctttaatccccactgaaaacttcaaaagagttcacaaaaggaataaatttcctggcacctctgctacgaggaaaaaaaaaaacaaacaaacaaacaaacaaaaaaaaacagagagaacaac

SEQ ID NO: 3124 - DNA, 1000 bp, mus musculus
cttcttttttttttcatagaaaatagtaacatttttttaattaggtattttcctcgtttacatttccaatgctagcccaaaagtcccccatacccacccccacaatcccctacccacccactccccctttttggccctggcgttcccctgtactggggcatataaagtttacaagtccaatgggcctctctttgcagtgatggccgactaggccatcttttgatacatatgcagctagagacaagagctccggggtactgcttagttcatattgttgttccacctatagggttgcagttccctttagctccttgggtactttctctagctcctccattgggggccgtgtgacccatccaatagctgactgtgatcatccacttctgtgtttgctaggccccggcatagtctcacaagagacagctctatctgggtccttttagcaaaatcttgctatttactttcaaatgttatcacctttcctgatttcccctctgataaccagatatcccctctccctccccctgcttctataatggtattccccacccacccacccactcccacttcccagtcctggcattcccctgcactggggcatcgagccttcataggaacaagggtctttcctccctttgatttcctacaaggccatcctctgctacatatgggactggagccatgggtgactccatgtgaactctttgcaaagtggtctattgcctgggagctatgggggcagagggggtaactctggatgtttgatatctttgttcttcctatggggttgcaaatcctttcagctccttcagtcctttttctaactcctccattggggagcccatgaccactccattggttcagatattataggtatacaacagtacctaccttgtaagtgttgccaaatgtattttacagtcccaaatttcagtttctttttctgtcctgtgaaaattaatgttctttgttgtatgactataaaatagaaaagccaccg

SEQ ID NO: 3125 - DNA, 1200 bp, mus musculus
taatgtttgtttaaatatccttttttctggatcaacttgtcaccaacagtagtatcattttaaatttttcaataagcacaagtctaacaaccctagcttatttgtaacaaatactctagatatagtcagttctatacaatgtgaatttatttgtagtattagtagccagtgttgctctaaattactctatgcagaacagggacttgtctgctcctctgaagacacaacagtctgaaggcctcataggagggttactacactcagagcaacaagtaagtgaccttcctaaataactgcagcagctgggaaacatcatgagcacagcagaagcaggaaccatcccctccacttgaactctacctcttttcactcctgcgccttcaaacagataagcagcttgtctgtccctctgaagatcccaaagtaaaaagacctcctaagagatcttttgcacccagtggaagagatcatcagtttgtctgtccctctgaagaccccacaatctgaaggcttcacatgagatctgctccacccagggcatcagaacacacagtgtgaaagcctcacaggaaatctggtgcatccagagagacagggtagatcaatagtgtgtctgacactctgaagagcccacagtctgaaggactcctatgagaactgcttttcccaaggctacagaacctactctctgaattcctcccaggagatctgctaaagccatggacataggtctcccaagagaactgcagaaacacaaggacaaaggaaccaggctccagagagaaacatccaggccagttaacaccagaattaatcatatgtctgcaggcaaatgcaaaaccataagcaacagaagccaatatactctaacaccatcagaacccagttcttccaccacaacaagccctggatacaccaacacacctaaaaaccaggaacctgacataaaatcctatcttatgaagataatagagtcctttaagggaagtttaaacaactcactgaaagaaatgcaggaaaacacattctatggaactgtctgcctggtacttgttgctgtggcagactcctagatggtatgctcttgtgaagactgtatatccccatacatcctaggggacccactgtactcagagcagttggtaagaagtcccctccctcccctgcccctagtctcagagctgctgcagggagcctgat

SEQ ID NO: 3126 - DNA, 1200 bp, mus musculus
aaagagatcttgataccaatttcccttatgaacatcaatgcaaaaatactcaataaaattcttacaaactgaatccaggaacacatcgaaaagatcatccttcatgattaagtaggcttcattccagggatgcagggatagttaagaatatagaaatcgaccttctgaggcggcgccattttcggctctagacaactgtccaccttcctggtgagagcacaggggtctgcccagcccgacaggtttctgtctcaggctccgtgggagccaccttggctccgggactccgcggagggcaggctgcatgggtgagggtgtggaatacagaggccagcagtttctgggacaggcaagagccagtgaccttctgaggcagcgccattttcggctccagacaacaggcaaccttcctggtgagaacacaggggtccgcccggcccgagaggtttctgcctcaggctccatgggagccaccttggttctgggactccgtggagggcaggctgcatgggtgagggtgtggaatacagaggccagcagttcctgggacaggcgagagccagagaccttctgaggtggcaccattttcagctccagacaaccagccaccttcctggccaaagcaacacagcttctgggaaagatcctgttttgggccttcatcttcagccaggaggaggtccaaacagcagataactgtgcaccttccctgaaaggggagagcttgcctgcagagactgctctgaccactgaaactcagaggagagagctagtctaccacgtctgctgatagagggtaaaaaaatcaccagaggaacaatctctaaacaaagacaactatatcaaataactccagagattgccaggtggcgaaaggtaaacgaaagaatcctactaacagaaaccaggaccactcaccatcatcagaacccagaacgcccacttcgcccagtccagggcaccctaacacacctgaaaacgtagacctggatttaaaagcatatctcatgatgatagtagaggacatcaagaagaactttaataactcacttaaagaaatacaggagaacactgctaaagagttacaagtccttaaagaaaaacaggaaaacacaaccaaacaggtagaattccttatagaaaaaacaggaaaacagatgatggaaatgaacaaaaccatactagacctaaaaagggaag

SEQ ID NO: 3127 - DNA, 1600 bp, mus musculus
gattttttacaactatagtacaaagcctagtctttagataaaatacaggtaaactttcttttctgtctgttgagatagaatatgacatcatgattatgtataatgaagaaggtgacattatgattctatttttcatttcaagttatgatcatgtaaatggataaggaatgagaattctcaattggctatgaaaatgatgtcatggaaagcccaagttgcctgagacatgtcaaccattatcatattttcatttcaaaattaagaaattaactttaatgatgctacctgagttgttgaaagaataatgaatgctatcactaataatgaatactactactaaatgtttcaaactggtaaatgctttgttcattaattatttatacaaatgactcatgtttgtcacttctgtctagtacagtgtcttagttagggttttactgctgtaaacagacaccatgaccaaggcaaatcttataaaaacaccatttaattggggctggcttataggttcagaggtttagtccattatcataaagataggagcatggcagtatccaggcaggcatggtgcaggcagagctgagagttttatgtcttcatccaaaggctgctagtggaaaactgacttccaggcaactagagtgaggatcttatgcccacacccacagtgaaactcctacttcaaccaggtcacaccttcaaatggtgccactccctggtccaagaatgtacaaaccatcacatacatgaaagagctagtaggactcatttcaaactacaaatgttttcctatatttcaaataaagtgatttcaagaacagttagtattgccacagatgttggtagaatgttaaatgttgctaattaatgaagagaataagacaagggctgtgaataaaatactaagcaaaagtaaactcccactgtgactattccaacattcattactgttagaaagcaacatcttttttttttaacaatttgcattctcccatggtggaggtggtgattaaaaggtccatatgccaacaatatgggcatccagctgagcaacagaagagtcaattctatcggtcaaggcatgagcttattctttgatagtttaagtaacttcaaacttcaacaatttctgcacagttgggtaaactcatgataaagtacaattagagttatttaaaagctttaagaataagtatgaaaaactgtctatctttagattgatgttgttctaatattaaacatgcaataaggaaattttaatcaaagtttcaattcagcacctaaataggcagatccatggattcagatgtttacatacaatacctgctgcattatcataaacatcaaaacaatctgtcccccaagtttcacaaagttactatattctttggcaacaaatatcataaaattataccaaatagtgtaatacatccataagattttttaaaagccactttgaacaagtgttaacaaaatgtaagttgacaaagtgagaaagcatggttgagtctattgtatcagcagccctctcctcagtaaactcctcagatctccatttccagttctaattttctactcctttagttcctttgtgtcctgt

SEQ ID NO: 3128 - DNA, 1200 bp, mus musculus
agtctaagaacactgggaaaaggctttagctatgttagaatacaatcttaaaaggcatttactataaggtaatgcttaagagagtgagcatgaatctatacactagactaatgcaggaatggaaaaattaattttatggtttatatagattagggagaaaatgccaggcccccgggaaaggagtttccttgaaactctttgcttcatgaaccagcttcccagcttttgctttgtcaagctgactccaccagagtgccgtgacagggtcccttcgggcctacatcctcagtcaggaggaagagctaagatctagacctctgtggaccataccccccagaggagagtaggcttccaaggaggactctgaccccgggaatcagggaagagcaccaacttgaatcccaagtctctcagagaccagtcctcacaggtgagcacaccggctgcagaagcaacagagcttcttggacagggtcctttcaggccttgatcttcaggcaggaggtagagttgagctccagccctcagtgcaccttccctgcaagaggagaacttgcctccagagagtgctctgacaactgggaatcatgagagagttggactcccaggagtgctgacagaagttaacagaatcagaggaagaaaaagctccagccagacacaactagaacataagatataagagattaccagatggcgaaaggcaaatgtaatgattttattaacagaaaccgagaacactcagcattatcagaacacagtactcccaacacagagagtcctagataccccaacacacccgaaaagcaagatttgaattaaaattcacatctcatgatgctggtagaagattttaagaagggcattaataactcacttaaagaaatacagagctgggtgtggtggcacacacctttaataccagcactcaggaggcagaggcaggtggatttctgagttcaaggccagcctggtctacaaagtgagttccagtacagccaggctatacagagaaaacctgtctcaaaaaaacaaaaacaaaaacacaaaaagaaaaagaaaaagaaatagaggagcacataaaacggtagacgtccataaagaggaagaaaaaaattccctgaatgtattaaaggaaaacaaaaccatacaggtgatggaattgaacaaaaccatcaaagatcttaaaagggacgtaga

SEQ ID NO: 3129 - DNA, 1400 bp, mus musculus
gtatacaggacataatagatgtgaaattggggagtagcctgtaattcacttgcacagtagcatacattctgaacagaataccaataggacaggcactaagagtatcagttaataaatgagacctaatagatctgaaaatcttgtttaaggcaaaggtgaatatcattcagataaagcagcaccctatagaatggattttttttttaccaattccacatctgaaagatgattcatatacaaaatatataaagaacacaagagattagaaataaaaaagaaaagagagagatcttccttatgagcccagcggaggctgttaagggctccagagtgcttttcacactgcaggacctcgggatcacctcgggatcacgggtgagtggaacacaacctcagctccaaagaatcgctgagggtctttggctggcaggaacagggacaaaggaaccccccacctgaccagaggctggtgcccgttccagtctgggtcacccccaccatcttccttctgatcccagcagagaccagtaagggctccagagtgctctccgtgccgcacgacctcgggatcacctggggatcacgggtgagtggaacacaacatcagctccaaagaatcgaggaggttcttgtgccagcaggaacagggatgcagaaaccccacctgaccgtagcctgggatccattcaggttggggccatcccctctatcttctgtgtaaacccagcctagggtgtctagggtaccagaggactctccgcactgcaggacccctagacacccaggacctcctgataacctgagagaacctgggtgatagaagcaacagagattcttggtcatggtcccattgggtgttcttcctcagccaggaggtggagctgaggccaagaccctgggaacctcccttgccagaggaaagttggcctaaagggaaggctctgaccccaggactcaggaggcagatcagagctccagactgctggacacctggcttcaagaagagagcttgcctgcagagagtgctctgacaactggaactcaggtgaacattacactcccaggagtgttgacataggctaacagaatcacaagaggatcaggctccaaacagagacagcttgaacattaacaccagagatttccagatggctaaaggcaaacataagaatcttagtaacagaaaccatgaacaccgggtatcatcagaacccagtacactcaccaaaatgagtcttggataccccaaaacacctgaaaagcaagacagattaaaaaccatatctgatgatggtagtagaagatcttaagaagggcattaataactcacttaaagaagtacaggagaacactgttaaacaggtagaagcccttaaagagctcaaaaatccttcaaggaa

SEQ ID NO: 3130 - DNA, 1200 bp, mus musculus
ttatttatttatttatttatctacattccaaattttatttcccaccccttgtacacctacccactgttccacatcccaaacctcctccatacccctgtatccccaaggatgtcctgaccaaccagatctcttaactccctgtggcctccagtctcttgagggataggtttatcttctctgactgaacccagacccagctgccctgtactgtatatgtgttagaggcctgatatcaactggtgtatgctgcctgatttgttgtcgagtgtttgagaggtctcgggggttcagattaattggaactgctattccttctacagggtcaccttcctcttcagcttcttccagcctttaattcagccacaggggtcaacagcttctgtctggttggatgcatatacctccatctgacttttcagctgcttgttgggtcttctggagtgtggtcatgctaggtcaatttttgtgaacactccatagcctcaataataatgtcaggccttgggacctcccctttagcttgatcctactttgagcctgtcactagaccatcctttcctctggcttttctccatttccatccctgcagctcgtcacacaagaaaaactatgggtcagagttttgactgtgggatggcaaactcctctctccctggatgtcctgtcttcctgctggaggtgggctccaaatgttccctatccttactctcctacatttcatctaaggtccctccctataagccttgagagtctctcaccttccagatctctggtgcattctggagggtcccttcaagctcttacctcccaaggttggccgttttcattctttctgctggccttcaggactttagtcattttccctcacccaataccagatctggttccctctcccccacacctccccatacactttccctccaaagtccctgccttcctctacaactgtgattggtttcttccaccttccaagtggaactgaggcatcttttgaatactgtggactgtatcattggaattctgtactttcttttttttttttttttttttggcttatatccactcattagtgagtacataccacacatgcccttttggatctgagttatctcactcaggatgagattttctagttccatccagttgcctggaaaactcaggatattctcattcttaatagctaagtagtataccattgtg

SEQ ID NO: 3131 - DNA, 1200 bp, mus musculus
tgcatacactagcaagattatgctgaaaggaccctgatatagctgtctcttgtcagagtatgcctgggcctagcaagcatagaagtggatgctcacagtcggctattggatggatcacatggcccccaatgaaggagctagagaaagtaccaaagaagctaaagggatctgcaacactataggtggaacaacattatgaactaaccagtaccccggagctcttgactctagctgcatatgcatcaaaagatggcctagtcggccatcactggaaagagaggcccattggacacgcaaactttatatgccccagtacaggggaacgccagggccataaaaggggagtgggtgggtaggggagagggggtgggtggctatgggggacttttggtatagcattgcaaatgtaaatgagcgaaatacctaataaaaaatggaaaaaaaaaaaaaaaaaaaaaaagaaatgtacatattttgtatatgctgacacaacacttgtgagttaacaagtgcagctttcctgactccagaagatagttgtcttaggattttactactgtgaacagacaccatgaccaaagaaattcttataaggacagcatttaattgggactgtcttacaggttcagaggttcagtccattatcaaggtgagagtatggaagcatataggcagtcatggtgcaggaggagctgagctaactacatgttcatctgaaggcagctagtggaagactgacttccaggcagctaggaagagggtcttaaagcccatgcccacagtgacacacctaaagcaaggctctcagtcttggccatctacttcaacagagattgcaccttcaccaatggccttcgatggccacttacagttccaagcctcaactgttcttcatgaccccttcatgtttcaaaaccaataccacctgggtgactcttacacattaccaagcagagctgctgcaggaggtagaaatttggttatctgggaagaagccaactaggacatggtgaacaatcctttgatgtgttcttgaatttagttttcaatttttttgagaaaatcttattctatggccatcagagttattggcttttaatttccattttctgaccatcctctagtattaataccagtataatactgtctccataaaaagaattttaaaatgttctgtttatattatgggagattgtgtaa

SEQ ID NO: 3132 - DNA, 1000 bp, mus musculus
atcaggacagggcatctagggaggtgtggaatagaacttcatggtctggggattacttatgtgttggacatcaaaagctatgcagatctggagactttcagtccacttgacagagactgaagggcctaccttgtttgttctgtaagcagagcagaagtcttcctgtacttatgtctttaaagttttaggatgaaaagtcctaatgatatatttatcattatcacatttaaataaggtataatttaattctttaaaagtatcatgtcatcgaggaccaggttttgtcctctctctatatatattttctgaagaatttttctgtgcatgtgcacaaatgtctccaacaaatattaacaatgcataatctcttgtagttgttaaatgttttaagtacagagggcataattctataaagttataaaattgtgtttaataatttagttattactatatgtttattctagaacacaattgtatttttaaatctgctggaaaagtgtaaaggtaattgaattatgattatctactaatagttctataggtactctgaagtttttcatcaatatgaccaattcaactatgagcattttgataaatgtttgttgctttatgtagctatgcatttccaaacaattaatagtagatggtagggttatggccaagtgatagagtgcttttatggcacttgattgctatcagtaaatgggaaaaagattaatttagttagttttttcattgctgtgaagagacagcatgaccaagacaactattataaaggacaacgtttagctggagctggcatatagtttcagagctttactccattattatcatagcaggaagcataacagtgtccaggaaggtatggaggacctgagatttctacatcttgctccaaagtcaaacaggagaagactgtatccatgtgactaggaagaggatttcaaatcccacacccacagtgacatgcttacttcaacaaagccatacttcctagtaa

SEQ ID NO: 3133 - DNA, 1000 bp, mus musculus
acagaagaaagcaattaaaagaggagagggagggagggacttgggagcgaaagtgaatgaggtgggggttaatggggggttagaggggaccctgatctggtgagggaaaagtactgaagccctgagggccatcagaaaaatgtaaacaggcaatttcaggaaatagaaggtttggggtacccccctcccccagaatgcaccagagacctgggaggagacagattctcaagactcacatcagagaaggaactttgatgaaatgcatgacagtagggggaggtaacttatagagcccacttccagcaggaagacaaggcatcaaatgagggatggggttgccatcccacagtaatatctctgactagtaattattcctgtttgaaagaattacagggatggaaatagagaggagcctgaggaaaagaaggtccagtgacaggcccaaagtgggatccagctcaaagggaggtcccaaggcctgacactattactgaggctatggaacacttacaaaaagggatctatcatgactggcctccaaaagactcaacaagaagctgaaagagacagatgcagttatttgcaccaaaccaatggacagatgcagctgacccctgttgttgaattagggaagactggaagaagctgaagagaaggacgattgtgtaagaagataagcagtcttaattaatatggaaccttgagatctttcaaacactggaccatcatacagacagcatacaccatctgatatgagactccccaacacacatacagtagagaacttttgtgtctgtgtactttcagagatgatgaacctaaccctcaagagcctggaggtcccagggaatttagaggtcaggtgggatggggagtggggacagtaaggtggagatggggtgaggaggagtggatgtgggatgttgaatagtggaagggtggatggggaggggcagggtaaggaatatggagtgtaaaaaatgaattacaaagaaaatta

SEQ ID NO: 3134 - DNA, 1200 bp, mus musculus
tgtttttcctctttaaggacttctacctgtttagcattgttgtaattctttaaatacttctacctgtttagtagtgttttcctgtatttctttaagtgagatatcaatgtccttcttagaatcctctaccagcatcatgagatatgattttagatctgaatcttgcttttggggtatgttggggtattcagtactcactgtgatgggcatactgggttctgatgatacccagtggtcttggtttatgttagtatgattcttgcatttgcctttcaccctctggcaatctctggtgttagatattctagctgtttcaagctggagtttgttcctcctgtgattctttacctctgtcagcactcctggaagtccaactctcacctgagccccagtggtcagagcactctttgcaggcaagcactcctcttgcagggaaggtgcacagaaatctgaagcttagatccaccccctgagtcctggggtcagaacccttccttgaggccttccctcctctgatagggaacatgccaatggggtctgtgtatcatctgtgcctcctggctgaggatgaaagcctgaaatgaccctgtccaagaagctctgttgcttcggctacccatgcattctcctgcacagactggtctcagtggtcccaagattctgggtattctcaggcctgcctttgtcttttgtccctgttccttttagcacatgacagtctggttttgttttgttttgttttttgctttttgttttttgttttttgttttttgttttttttgtttttttgttttttgttttttgttttttgttttttgttttttgttttttgttttttgttttttgttttttgttttttgttttttgttttttgttttttgttttttgttttttgtttttgttttttttttttttttggaacacatgtgttccactcaccagtgatctcaagatcctgggtgtgctagggtacctgcagcatggagagtcctctggggactttgggaccctccactgagttcgtgcccaactacttgactatttataaacagcctagaaactactattaattaaattaattaatttcatgtgaagtatgttatgcatgataaataaatacactgcatgatcttgatcatacgtgtaacataaaacactgactttcagatgatagacaataatgtttcaggtactggaaac

SEQ ID NO: 3135 - DNA, 1200 bp, mus musculus
tttctgaaagccattttcccttggaaataatccattgagagactgttatactgtaattacagactcctgaaacatacaggctactgctattgctcttagttgcatgccagaggtataagaaaactacttaaattcacattttaacatgtcttattttattttccttgaacagctcatttcctttgtaaacctatgcttacgcttacattaaagtgtctgtgtcaccaggcaaccttgagaggtaggttgggggaacctctagaatgtaccagagacctgggaggtgaaagactttccggactcaaagggagggaccttagatgaaatgcccaaaggtggaaagatggaacttgtagaattgtttctgtctaaaagaactgcagggacaaaaatgaagaagaaactgagaaaaaggagattcagtgacttgcccaaatcagctcaaggggaggctccaaggcctgacactattactgatgctatggtgtgcttacagacaagggcctaagatggctgtcttctgagaggcctaacaagcagttgaacaagtcagatgcacatacttacacccaaccagtggacagaggcctgggaccactgtggttgaattaggggaaagatggaagcagttgaggaggagggcaaaacctgtaggaggaccagcagtctcatttaacctgaattcctgagatctctcagacactgaaccaccaaccaggcagaatactccacctgatatgaggtccctaacacatatagaggagaggacttcctagtctgacttcattgagagaacatgcacctaaccctcgagagatgtgaggccctggggagtgggaaggcctgctgggtttggggtggggacattctcttggagaaaagggaggagaaatggaatgaggaactgttggaggtcatactgagagccagataatgactggactgtataaaaaagattaaagataattttaaaagtaaataaaataaatgtctgtttaataaaatatatttttaaatttttctttcctaattaaagccacgaatccatatttagcctgtgtcaggactctaacaggagaactcttcagactgctaggggtgacaacttggaactggtgtcccagtcccatcattgataatattctgtagattggtactgaggttagttgggttaattttcctactttctgctttgtggtt

SEQ ID NO: 3136 - DNA, 1000 bp, mus musculus
ggaacttcaagtctagttgcttcctttcttactgaattcaaacaagacagcccagctggtagaacatatcccacatacagactacagcttttgagatagcccctcttccagttgctcaggaaccacatgaaagtcaaacacacatttcctacatatgcttggggatgcctaggtccagcccatatatgttctttggctagtggttcaaactctgagaggtctaagggtccaggttaattgaaactgttggtttttctgtagagttcctatccaatttgggatcctcaatccttctgcctattcttcagtaagaatctataagctccatccactatttgtgtattgttggagcctctcagagcacaacttgtggtcttgtctgcaggcttaacagagtatcattaataatgttagggattggtgcttgtgcattggaagggtatcaagttgagatggttattagttggccattccctcagccactgctctctgccttgtgcctgcattacttgtagacaggataatttttgagttgtaagttttgtgtatggatggtgtctctacctctttactggggttcttgtttgactataggaggttggcctcttaaggttccatattcccaatgaaatagctgaggccacctccactgattcttgggctcttccattttctaagaccatgtcttgtcctagagatacccatcagctcctcatccccatcaatttcagattcccattcattttcagggccatctagtcatttctcctgtccatcaccacacctgaccctgagtcccccattcccttcccctcccagttaactgcctccattggcctcttatggctactttattcactcgtctaagtgatattcaagctgttttgcttgggcctttcttcttgtttagctcctttgaagtctgtgaagtgtaacactgtacctgtatttttcggctaatattcagtaataagtgagcacataccataaataccatgca

SEQ ID NO: 3137 - DNA, 1400 bp, mus musculus
aattcttaacattgaaataacaccctgaatatactctgaatactatgaatcaaagttctataccaacaattttaaaaaagtacacaatatttaaacttatggaaggtgaaacactcactactgaaaattgtatcaaaacagatataaaagaagaaagaaagaaagaaagaaagaaagaaagaaagaaagaaagaaagaaagaaagaaagaaagaaagaaacaaagaacggagggagggagggagggaggaagaaaggaaggaagaaagaaaaagaaaaggaaaaagaaaaaggaaaaagaaaaagaaaaagaaaaagaaaaagaaaaagaaaaagaaaaagaaaaagaaaaagaaaaggaaaagaaaaagaaagataggaagaaagagccttcctcccggtccttaaagatggggcagactcctagttggtctgctcccttgaagacaccatatcctgatccaacctagaggacccgttgtattcagagcagttggtacgaatctcctcccactgccgctcaatcccagagttgctgatagaagcctggtggactcaggacctatgacccaccaaaactcccaccctctagaataccattacccttccttcccctcaaccacttcttcctagtccttgctgctctggcagactcctaattggtctgtttccgtgaagaaactatatcctaatccaccctagaagacccactgcactcagagcagttgaggatccactgcactcagagaagttggacaacagctagacttctccactgaagatacaacagtctgaaggactcccaggaaatctactgcagccagggcaacagatcagtaccttctctgaccctgtgaagagcccccagttggaaggctccacatattgtctgttacagccaaggatgcaggcctatctggagacctgaaccaacccaaggaaaaagtggcagactccatacagtcacccagaacaacaaacaccagggataaccagatagtgaaaggtaagcacaagaccataagcaacagaagcaaaaatacatgggcatcatcaggcagcaagacctgaatacactaatacacctgaaacaggaatctgtccaaaaatgttttctcatgaagacagtagagtcctttaagatggatataaataactcactgaaagaaatatagaaaaacataagaaaacagggaaaggaattggataaagtgatccaagacctaaaagtgaagaagaaacaataaataaaacagaaatggaggcaaacctgaaaaaggaaaacctaggaaagaggtcaggaaatacagatgtaagtattaccaacagaatacaagagatagaagagagaatctcaggtatagaagataagggagaagggattaacacaactgtcaaaga

SEQ ID NO: 3138 - DNA, 1000 bp, mus musculus
tataccatatttcctctccctgcttcaatgagggtgttctgccacccacccacccactcctgcctcccagccctgatattctcctataatgaggtatcaagccttcacaagatcaagagcctctcctcccattgttgtgcttcaaggtcatcctctggtacataggcagctggagccatgggtccctccatgtgtagtctttggttggtgatttaacttatgggagatatggggggttctgattaattcatattgttgttccacctaaagggatgcaaaccacttcagctccttcagacctttctctaactcctccatttgagaaccctgttctcagcgcaatggttgactatggtcatctgcttctgtatttgtccagatctggcagagcctctctggagacatctatatcaggctcctgtcagcaagcacttcttggcatccacaatagtgtctagttttgatgactgcatatgggttgggtgcccagatggggcagtctctgaatagcctttccatcagtctctgctacacacgttgtctccctatttccccccttgattattttgttctcccttctaagaaggactgaagcccagatacttaaaatacccaagatataagatacaatttgtgaaactaatgaaactaaagaagaacgaagactaaagtgtggacactttgccccttcttagaattggtaacaaaacacccatggaaggagttacagagataaagtttggagctgagacaaaaggacagaccatctagagactgccatatccgaggatccatcccataatcagcctccaaacgctgacaccattgcatacactagcaagcttttgctgaaaagaccctgatatagctgtctcttgtgagactatgccggggcctagcaaacacagaagtggatgctcacagttagctattggagggatcacagggcttccaatggaggagctacagaaagtaaccaaggagttaaagggatatgcaa

SEQ ID NO: 3139 - DNA, 1200 bp, mus musculus
gaaagaaagaaagaaagaaagaaagaaagaaagaaagaaagagaataaaacatcatcactttcttagaagagataatttgtttttgatttttttttttttttccgagacagggtttctctgtatagccctggctgtcctggaagtcactttgtagaccaggctggcctcgaactcagaaatccacctgcctctgccccctgagtgctgggattaaaggtgtgcaccaccacccccggcgataacttgtttttgaaataatgagagtatgcaattagaaagcgcatatttctttaaaaggatgcaagtttgaagaacataaaatcagataatgaatttagcatatacacatgcaaaattaagtttccttaagtatatataatatgagactttccacagtaagccaaaactccacagggcacatgccattatctaaaataagagggcatgtattcacagaagtatatactaaaattaaagttacttttgctctctttctgaaattatatttaaattacttttacatttcagctagcatcaaaggaatatgagaaatatatttagtaaatgataattgcattttaaaatgtttcaataatggttttaggatttttctaggttgagacagtagagatgactgcaaagtatgttgaaaattattatcggtatcaagtttgtagagctaatgctttttgaagcaggaatctgattattaccaaaaagcatgattccagtattgtgaagtaaaagatctcaactgagaattagaagaacaaacatccagtcttggtttgtcactaaaacttagatcaaagaaaagtgacttttggtctctctttttgacttttcatcctttttttttttttttttttttttttttcttttttgacagggtttctctgtgtagccctggctgtcctggaactcactctgtaggccaggctggactcaaactcagaaatccgcctgcctctgcctcccgagtgctgggattaaaggcgtgcgccaccactgcctggtcttttcatccttttttgaacaatgtgcttctgtaggagcatttctaagattcaattcagctctaataatgtgtctattttccactttggtcattgctgaagttcccatactttttctcctttgggttaaaacattaagtggtttattaaaagccaaatattacctgagaagtattacacatt

SEQ ID NO: 3140 - DNA, 1200 bp, mus musculus
atgctcagagctagccatcagactaagcatgggaccccaatggaggagttaggagaaggactgtaggagctgaaggggtttgcaacctcataggaagaacaataatacagccaaccagaccctccagagcttcttgggactaaaccaccaaccaaagggtacccatggctccagctgcatatgtagcagagttctgccttatctggcatcaacgagagaggaggcccttcatcctgtggaggctcaatgcccaaacatagggagatgcaacagtgtggggagttgaacaaagggcttggggagcacactagaaaggctcagacactaggggtatgagagatgtacatgatctaatggggatggcattagttgaatgctcaactgtggggagaaggaacctgaagataccacctccattagatagacatggctttcagctgagggatggggccacccaccccccatctcaaaatttaattcagaattgttcctgtctaaaggaaatacaggaacaaaaaagtggagcagagactgaaggaaagggtatctggagacagccccacctggggatccatctcatgtgcagacagtaagccccaaaattattactgataacaagatgtgcttgtggataggaacctgacatggctgtcttctgggaggttctgctagcacctgactaagacagatgcagatattcacagacaaacattgtattgaacaccaggactagaatagacgacttaggagaaggactgaaggaaatgaacaagattacagccccataggaagaacaacagtatcaactaatcagacccctcagagatctcaggaaataaaccaacatcaagagtatacatgggtgggtcctaggccacagctacacatgtagcataggagtgccttgtctggcttcagtgggagagtatgcccttggtcctgtggaggtttgatggcctgacgaaggggaatactagaagcattttgggagtgggtaggagggtggggaagcatgatcttagaggcaaatgaaaagtagatggagtgaggggttcctggagtgagacagggaaaggggacatttgaaatgtaaataaatcgaagaaagaaagggagaaagagaaagaaaaaagaaagaaagagagagagaaagaatgaaagaaagagaaagaaagaaagaaaataaaggtatgaaggaat

SEQ ID NO: 3141 - DNA, 1000 bp, mus musculus
gattttcttcagtgtgagctaagagttgtaagatgaactaaattatttcctccaaaattttcttttggttatggtgtttcatcatagtagtaaaaaacctaactaagcccccttcttccagaaatgagcaaaaatacctttgtggcagtagtgatgtcagtgcaggtgtacatgtgcagagaagggaagataataacttctcccctaactccatacctcaccacctgtagcagtcaggagatctggccacgagagtgggtgagctgtgcctatcccttgacagctgcagaattggggagagtgggctctgcacttcatctgggcagcacagtactattggccctggtcgagagaacacagatgagccagacacaagggcaagagtgaaggagaactagtctcagccaatcatcttctatgaggtagagtaggtacaaagggatgacctctccccagctagcccctcaacacctgtagtagtcagaagatatggcctcaatggcatgagagcataactagccctgcctgctcgctggctgtagcgtttgggagagctattcctgaacccttacatggacaacacaatagaacttgacctggtggtgaatgaataagagagctatccagaagggtctgagaataggagagcagttacatccccctcataggcagcacacagtggagctggcttcggaggcatgggtgtggaagagccagccccaaagacacaatagtaggaaagcttccctgcatcctatactggtgatgacattatatgtcctagctggagcagtgctggagagctcaccctggtggtgcagataaggaaaagctgaccagttgaccagctctgctactactcaggcacagattcaggtttatgagttgccccaccccaaaatctataccatctatgatcagttgggatgcatgagagggccaacccttcagattcaaatctgtaagatctccatgacaaaagacaacagaagaataatca

SEQ ID NO: 3142 - DNA, 1200 bp, mus musculus
ctagcaaacttgtactgaaagaaatttggagtggcctgtactggtctggcgagtatgaagttgaactgtcctctgtgaggggagtgaggattatagaaaagatggaaaaagagactcagaaacaaagattaaaaattgggagggatttccaatcagtactgtagtggccttgagtctaattcttttaggttttctatactgtacaggattataggaaacaaagtcacaagccagcagatacaatggctgacatacattcgatatctgtaaccctctgaaggccaccctattcctccctgttccttactccaagattacctgaaaattcattcccttaccttcaagtatatcctcttttatcattccatgcatcagcaggccaggaaatctgacagtagaccagcctgacttgactctgcttgacaggccagctttcacagaatcaggcaaaatgacccccaaaagtgtccttatctgcagtggattaaaaaaaataattccaacttagctaagcttccaacttgtgaaaggaaaagacctaagaatgtttctgctcttagaaaggaataacaaaagcttcaccaaatgtgactcagtttgaccaaggttcatcccatgctgatagatgaatttgacaatattgtgcaagtggtgctggctccagatttatgaagaatacaaaaggaaaggtatattggaatctttctctataatttgagaatactgctaagaccaggaatgtggcaaatgggatcctatatggaggctactgtgtgaaatctgagttgcattggagaccccaagatgctagaaataccagagcctcatgatatctgccaagaaaaactgcacatggatacactggaaccttctggagagagagatctgtgttgaatatgacaaaggtggaaggacagaaccatccctttgacatcagaaatgaagttaaaggatttggaatttgccctgctaggatctgttcttgattttgaccagcattttctcactattgctaaacccctcccttttcaaatggtaatatataatcacttacaagaataatttgaaggcttgtaatctgcttttggatttgacaggcttatgtctcagtggaggacttggactttaaaacactgttgtgactataaataactttgggaactttcaaagtttgaactaaataaatttcttattatatgt

SEQ ID NO: 3143 - DNA, 1000 bp, mus musculus
ggggaggttcatctctttttttcttttttaattagatattttctctgtttacatttcaaatgtcatccccttttctggtttctcatctgaaaaccccctatcccctccccacttcccctgctcagcaaaccacccactcatgtttcctggtactggcatttccgtgtactggggcatagaaccttcacaggaccaagggcctctccttccattgatgactgactaggccatcctctgctacatatgcagctacatctttacactctctcctaagttgcagttgataatatgaatgtatatatcataaatatcctctaatggttcaccagtactaaaatggctaagtttacattttgaacattttaaatgattaatcccttattcaagcttatacttctgagatgttgttaactatcagcatccatgccttcatatttagatgattagcagcatttcttcttgctaatacattgtcttaattagagatttattgctgtgaagagatatcacgatcactgcaactcttatgaaggaaaacatccaattggagctagcttacaatttcataggtttagtacatcttatggaggaaagcatcacagcacataagcagacacagtgcttcagaaggcactgcttcagatcagcaggcagcagaaagagaaagtcacactaggcctggattgagcaccttggacctcaatgccatttcttccaagaaggccacatcttctccaacaagaccacacatactaatagtgctactatattatataaggtgggtaagttttaagaaagtgaaccttgggaaaaagttggatgtagaaaataaaatactacttctgagaaaaagtgttatatctaaattagagccttttacttttaatccactagattctatagttcacattcttacaaacatgatggcacatcttcccaattctatgctgaaaaactagctgtaggatacacagtggattttataatttgcattaattac

SEQ ID NO: 3144 - DNA, 1000 bp, mus musculus
gcaataagtagctgggtatggtgtctcatgactatgatcccagcactagtgagacaaaggcagcagaactctgttagactgaagtcagcctggtctatggagtgagtttcaggacagccattgatacacaaagaaatcctgctaagttatgtttctcattttattcagtacaataccataacccagagaatggtgctgttgagcaaccatggatcttagcacttcagttgaacaagatgatccctcacaggcatgcccaatggcttgtatgtttggtgattctagatttaaagacgttttcatgagtatcatgtattatttaccctgaatatcagatatttacatgatgactcataacattagcaaagttactattattactgaagtagcaaagaaaaaataattttatgatttgggggtctccataacacaaggaactgtattaaagagaaacagcattaggaaggccaaaaagcactcctaaagacaatgctaagttgacagttgatattagacataaagttcttgtatcctgggtatcttagaggccagtctgcacaggagaacacatgggccagggaaatgacagaccttcttggacaggacccttcatcctcagccaggaggaagagctgaaacccatacctctgtgcaccttccctgccagaggagagttgttcttcagagagggctctgatcctgggactcaggtgagatcaccatcttgtatcctgagactctcagagaccagtcgacacaggagagtgcacaggccacagaagcaacagagcttcttggacagggccctttgggccttcaatattcagccaggaggcagagctaagacccagatgtctgtgcaccttccctgccaaaggacagcttacctggagagagtgctctgaccactgggactcaggacgaagttggactctcaggagtgcagacagaggctaacagaatcacaggaggaacaagcttcaaccagagacagctagaa

SEQ ID NO: 3145 - DNA, 1600 bp, mus musculus
cttcacaaaaataacaaaaacacacattggagaaaagatagcatattcacaattggtgctggagaaatcacaagtgacagcacatgttggcaaggatgtagagaaagaggaacaatcctccattgctggtaggattgaaaactggtacaaccatcctggaaatcaatctggagattccttagaaaaatgaaaatagatctacctgaagttccagcatatacccaaaagattccccaccatgccacagtggcacatgttctactatattcatagcagacttatttgtgataaccagaagctggaaacaacctagatgtcccataacagaaacatggatacagaaaatgtagttcatttacaaaatgggatactactcagctattaagaaggaggacatcctgagttttgaaggcaaataggtggaactagaaaataccattctgagtgagctaacccagacccataaggacatgcatagtatgtactctctaatgagtgcatattagccaaaaatgtacagaatacccagaatacaatctacagtactcaaaaagtttaacaagcctaagagtccaagcaaggatgcctcaataccacttgggaggttaaagaaagcaatcacagaaggggatagggagggaggggcatgggtggaaaagaagacaaggagaggaagaggggaacatgatcaggtattggattgggtcgaggaacaggaatgaagccgtgaggggcagaaaaaataatgaaaacaggcaacctcaggaggtaagaggtagaggaaccatccagaatgcaccagagacctaagaggtgggagacactcaggactcaaagggagtgaccttagatgaaatgccctacagtaaggagagcgaactcttagaacccacctcttgcataaaggcagggcatcaagtgaaggatggggatctcatcccacagtcaaaaactctgacccatgactgttcctgtctgaaataactgcagggatggaaatggagaagagcccgaggaaaaggaggttcagcagcaggcccaaattgagatccaactcaagaggaggccccacggcctgacaatattactgaaggtatggcgtatctatcaagtactcacaaaatgagatttatcatgacttacccctccccctgcagaaagacccaataagcagctaaaacagtcagatgcagatagttgcacccaaccaatggacagaagctgctgatccctgtggttgaattaggaaaaagctggaagaagctgaggaggagggcaaccctgtagtaggaccagcagtctcatctaactggaactctcaagatctctcagatactgggccaccaaccaggcagcacacaccagctgatatgattcccccaacacatatacagcagaggactgctgggtctggacttaatcagagaagatttacctaaccctcaagagactggaggtccctgtgagtagggaggtctggtgggttgggagtgggaggtgggaaattctcctggagatgggggtagctataggatgtggaacagtcagagcatgaacccaggagatacaatctggattgaaaaaaaaaaaaaagattata

SEQ ID NO: 3146 - DNA, 1600 bp, mus musculus
gaaaaaattcaatattaaatatgaaaatgctggtattacataaataatggaaagaatatgtaagcaccatggttattattgttgaaaattaggaaaactattgctgattaggtgactgccctagcctgatttttgattctgtgataaaacacatagcaaaccgaactttgagaaggaaaaggtaagaaggacgagtaaaagaaaagttaatctgttagcactacttgcccaaggatatacaatttcctggaatactggaggatattttttatgggagataacaaaatacatgtttttgctcccctaaactagttcatttgacttgattgtatcagatgttcatcataggatgcagaagttacatgggcaggaaatcaggatatatgcttccctctgattgaatcaggtggaaaatatggtggaattgtgggtttgccttttaaattctcagtaaaatgtggcttgttgccatttctgggaacccatcatcctggccagaattaaatattgcttcaaatttgattaaaaaattatggaacttgtctttctagaacaatttggcttatatttccatgccacaacctcactttaagggaagttagaacagaaagaagttagagcaataactcaagcagaggccaaaaaaaaccaccatatttataataggcctttatcagcattagagctgggtagtatctatcctctatttgccagtcaataatcccattatataatttgccatttttcatctggattgcccttaactctaatttgcaagcccatatggtcattattttaagacttttgccctgtggtggcttctcctgtctccactccacctctctctctctctctctctctctctctctctctctctctcgctcgctcgctcgctctcgctctctccctccctccctccctccctccctcctagtggtctcctccaatcacaagcctgggaacctcaaaccccaccaatctcacttctgcccagctgtaggctataggcatctttattcactaattagaaataacttcaggacaaggtcacaaagcatcatttgagtctccttgaggactctcttctctctggggcaattaggccttgtgggactgcagttaacattgcaatacaacagaataaacctcaacaccaaaaattattttcactttaagtcccatagttttgttttgttttgtttttttaaccatgaaggaagttagagaagacaaatattttataaatggatgatgaaaagaaattttaagtgaagtaaatgtgacatctaagtagattatagccatgggttcttcaattagaaacagaagttagaaaacaatatctgaatctggtaatgtcactagccagatgaaaagtgaatgataaactaccaagcataatttaagacattattttgggtggagaaatgagtcaactaaatttatgacatagtcacctcaaaattaaaaatgtgagcccttaaaaagtccattttattcattatacatttctaacagtcagtcatatatacaaaaaaatgtttaatacgtgtgtcctcccttgctttggatacatattaattaatattatgatcttttt

SEQ ID NO: 3147 - DNA, 1400 bp, mus musculus
gttctgatgatggtaagtggtcttggtttctctaactaagattcttacatttgcctttcactatctggtaatctctggagttagttgttatagttgtctctggttagagcttgttcctcttgtgattctgttagcctctatcagcatacctggaagactagatctctcctgagttttaatggttagagcactctcttcaggcaagctctcctcttgcagggaaggtggtcagatatctggatgtttggacctgcctcctggcagaagatgaaggcccgaaacagggcttgtcccagaatctgtgtagcttctgtagtccacactctcacctgagcaaagtactcttgtcaggatcctggaaccaagatgtctccaccagatgctgtggcaaagccctcccagatgggctggacaccaatcctctgacagggaaggagcttggatgtctggagcctgaaatgcagtctgccccaaaagctctgtggcttctgcctgtcccagaagctgttagcctttgcagtccacattctcaccctcacagaccagtcttggggggaatcagggaacccaagatggctccaccagatgctgtggtaaagccctccttgggcaggccggacacctctcctctgacaatgaaggagcccagatatctggagcccaaaaagtggtctgccccagaagctctgtggctgctgtctgtcccaggagctgttagcttatgcattccacactctcccctgttcagactagtctcagtggaatcccggaaccaagatggctcccacagatgctgtggcaaagccctcctgggcaggggtggacacctctcctctggcagaaaggtacccaggtgtctggagcctgaaacatgttctgccccagaatctttgtgggttctgctgtcccagaagctgttagcctcttcagtccacactctcacctatgcagaccagtcttggcagaatccagaaacccaagatggctcccccagatgctgtggtgaagcccttacaggcagggcagaaacttcaggagtgttgctctttctccacaacctaaccagcatctgctgtcacctgaatttttgatcttagccattctgactggtgtgaggtgtaatctcagggttgttttgatttgcatttccctgatgattaaaaatgctgaacattttttccggtgcttctcagccattcggtattcttcaggtgagaattctttgtttagctctgagccccatttttttaacggggttatttgattttctggagtccaccttcttgagttctttatatttattggatattagtcccctatctgatttaggatagataaagatcctttgccaatctgttggtggcctttttgtcttattgacagtgtcttttgctttacag

SEQ ID NO: 3148 - DNA, 1600 bp, mus musculus
attcgagggagctcattgatctttgttaattttagctttggaataaaagactagcaatgctttgacaggcattaattttttgcttcatatagcttccaaagctgatgtattattgtcaggagctctttttatgatttgcaaagtattattaaagcacttgatctgttctcatcacagaaaatgggtaatataatttacttgtttctccatgcagtagacatagctcaaattataaatggaaacttattattttagatttgagtctggttttctgtcacgaccaacagtgttttccagctaaaattaaaaaaaaaaaaagtcgatgggatcaatgatcctttcttttaaaaagcttcatcagaagtagtcagaaattctgtgaagtccaactactaatgtttaacagaatttcaaaccaattctctcatggaaaaactatataatgaattagaaaacatatagtgcctgtcttaaaacaaaaagtgtattcattcttttaactttgagctacatcatgacatagttaaagtacatgtattacccagaaaacattgtagcttatttttttaattacccttcatgtgattttaatacttgttaccatcttaaatggatttggactaacctagagcatgtctctgagggtgctcctagagacaacaaactgaggaggaacaacccaccccgagtgtgggttatggcatcctgcgggctgaggtggcaggctaaatagaagtggaaaaggagaaaggtacatgatctcgagcattcatctttctccttcctgattattcttcaatgtgagcaagcaactccctacccacacatccctacctactaccacaacagtgagactcttccattcccacagtttttctgccataatgggcaggatcctcaaacaatatgttaaaataaacccttgctctcttcaggtggttcttggctgctacttggtcacagaaatgaaaaaggtagctataatactttacatccccagcaaacctatcatttttctcttaggtaacaaatcaccttctgtaaagaggattttcttctttgcgcagtctctgaaagaaatttacattgcaataggcattagtaaatgctgtttcaatatggcattaaagatggagagacttcaatgtcttaacattatacaatttattcatatgctacctatgtaataaaatcctggagtattgaaaatgtatatgtgattgtcaagtgtttcctatcaattccaaactagagttgatgtccaattccaagcctatctgtactagcgccttcctttctcccttaacagttcttcgtgttgtctcttctctatggaaagcaagagaaacacacagatatatgcacacacacacacacacacacacacacacacacacacacacacacacacattcaatttcatgaaagcagaaaatttactgcttaaccaggttcaggacttttctgaacattggctacatctgactacagagattagacattcatgaagttgattgttgataatattggtcttgcactaatgtagctaactacagttaatatgaattaattactacaatagttgtattgagtttagaga

SEQ ID NO: 3149 - DNA, 1200 bp, mus musculus
ttccttgagggttttttgtgtctcctctttaaggacttctacctcttagcactgttctcctgtgtttctttaagtgagttattaatgcccttctttaattcttctactaccatcatgagatatgatttcaaatccacaacttgcttttccggtgtgctgacttatccaggacttgttgtggtaggcatactgggttctgatgatgcccagtgttcttggtttctgttagtaagattcttatgtttgcctttcgccatctggaagtctctggtgttaatgatcaagctgtctttgtttggagcttgttccacctgtgattctgttagcctctctcagcactcctgggagtccaactctcacctgagatccagtggtcagagcactctctgcaggcaagctttcctcttgcaagacagatgtctagcaatctggagctctgatccacctcctgaattctggggtcaaaaccgcccctgtaggcctactctcctctggcaaggaatgtgctcagggggctgggtctcagctctgcctcctggctgaggatgaaggcctgagggtaccctgaccaagaagctctgttgcttctatcaccccgggctctcaggtaatcaggaggtccctctgcgattctttggagctgatgtagttcactcacccatgttcctgagatgatcccgaggtcctgcagtgtgaagaaccctctggagcccttagcagcctctgctgggctcagaaggaagatggcggggctgtccccgacctgaatggatccctgcctcttgtcgggcagggttcctttgtccctgttcctgctggcacaagaccctcagtgattctttggagctgattttgtgttccacttacccgtgatccggaggtgatccgaggttctgagctgtggagagcactctggaacccttagtggcctctgctgagctcagaaggaagatgttgggggcagggagggaggctgatttattgatcttaaccattgggattggtataaaatgaaatcccaaagtactttttatttgtatttccttgatggctaaggattttgaaaatttctttgaatgtttgtcagtcatttgaatttcctcttttgagaactcatttctaattgactttgttttattacgtccatttttttttagttctttataaattttggatgtcaggccactatcacatgtatag

SEQ ID NO: 3150 - DNA, 1200 bp, mus musculus
ttatattatgaaaaatatttaaatatacaggaaattacaatgaacagtaaaacatgagtataattagggatcttttataacaagcaaactattttctcataacttcttgataatttttctctacttgaaaattaagtattacagattattccccttcctatcctacccagagacatcaatgaccatgaatttggtgtatatccatcatatcatgttcttaattatacctaatcatgaaatattttgtgatattgcttagactggttttgaagttacccatcattcttcagctttttttttcacattaggcttttcagttctatcaatattgatgtataaaaattcagtccattgacttgtatcattttattcattttcattacatagtattacaattaatcaaaactgctttttaattaactgtgttatttaaatatttttttctttggggctattataaaaattgacacaacaaccaactttgtccatgtatatatgtcatagtcagggtttctattcatttgatcaaatatgacaaaagcaacttggggagaaaagggtctacttcatattccaaatcttagcagacactccattgtccagggaagtcagaacagcaactgaagcaggacagaaatctggagacagaaattcaagcaggagctatggaggagtgctacttagtggcttgctatgcctcatggattgctctacctactttggtacagaatccagaagcacaatttcagtgctagcactgcccaccgtgtgaatggccctctcacatcaactaccaaccaagaaaatgtcctgcagacttgccaacagaccagtctgatagacacaattcctcagttgagctttcctcttcccagatgacagtctcttatgccaaattgacaagaactagccagcacagtattaatgggagaaattgcatcttcttgggcctgatacctttataatgagatcagactgaggaaaatgttatttttgtttgcattccaatacaatgtctttcgtggtaatcaagatagccaatttttaaattttttactctcttcatatatatgaaccctatagatttctaagctatggaaaatataattaatggtcataactcttatgtgcaagtcagtcagtgctcggtgtcaaaaaaaaaagtgctgtgtactctcgtattaaagttaataaacaaat

SEQ ID NO: 3151 - DNA, 1600 bp, mus musculus
tacacatttataaaatcttgtgactttccaatatatgtacatcatgtataatgactaaataagggtattagcatatctatcaccacaaatagttatcattatttttgtgttgggaaggttcaaaacacctccttcaggctattttgagatgccccaaaattattgatgtcatcctactttattgaagagaacctgagtgcttgagagatggctcatccattgagagcttttgccgttcttacagagagaactgtactttcagtaactctttattgattttttgtaaatttcacatcatgtaccccaatcctactcatctctctgtcactggtcatctgccctcaacccttgcaacctcctcccacgaaagaaaaaaaaattaaaaaacaaaccaagcaaacaacaaccaaaaaaaaaaaaattctcattgtggaagctcattgtactacagtgtatcacatattatccttttgtcccttagtccacacatctctgcttgcaaaggttcattgcaatgagtctttggtctggtttgaggcctctggcttctgctacactatcaatactggatcctcaccaggattcctctcagatatcccgttgttaccctgtgtcatggagatcctgcagctttgggtctgcaggattggccccttcgcatgctccagaaattcctgaatggggtagatgttgctgagggcttgagaataggagggctggcttaccctcacaagctgcagcactctagagagtggggcctgaatcttgcctgggcagcacagtaaagctgaccctgatagcctgtgcactggctagtcaacccccaaggtatgagagcaagagaactaaccctgccccttgcaggctgaagcattgggcattgcatgagctagctggggcaggtaaggagagcttgtcctgttgttgtgggtgtgggagagctggggatcctgatgaactcagcggccacccatgcccagatccagggctttgagttcctagaattcttatgaggtatctcacaaacagctctaactctagttataagagatcagacattatcctctggtaccctccatgggcacctatacacatgtacatacatatagtcacacagctacatacactcacacataagtgcaaataaatctataaaaagaaaagataaactctaacctcacaattgaacatttcaccaagtaacatttcaaagagagctgggtttgcttacaatgcagacatttcccagcccaacttaattaggatttgtaaggctacgcaaagactttgatccagacacttactccatctttgaggaagttagtcttcacgtgactgacaattgttgacagctattggtaacagatgaaagtgtaagctgaaaaatattaagaaaccaatggaaaggcagacaagtggccttcctccttgactggatgtgtgtttattaggacaataagtcaaggtggcaaggatgactccctctgatgcaggtattagaagattattgtaactctaggaagagtttggacaggcccgtgtcactttcagcttagcaatatattgcactatttcttagttgctaacttttgtttatttt

SEQ ID NO: 3152 - DNA, 1000 bp, mus musculus
tcactttatgtccctatcacaaccccctccttcctctcttcccagtcccacccttgcaaatccctattcccattgccctcttcccttctccccattacataactaaattagtaagcctaggcctcatgtcacacaccacagaatgtcatgagctcatagaggccatcctaagctactaggtgaaatcttgtctcacttaaaacagctattgtgtatgttcacacagaattctgttcagctatggtaaaaggaacaaatctggttttatggggacctccttgaacaagtgtgacaatgtcgatataaaatttcagaaaataattgatactcatatttttagtcctgacaattaacttaataagaaataggttggagtttgccagctgtgattgaagaagcaacaaccattttctcaaatgttcaatggatgaaatgatgacatgttgattgtaaaatgcaattaattcttttttcccttttttttttaattaggtattttcttcatttacatttccaatgctatcccaaaagtcccccatgctctcctctcaactctcctcctccccacccactcccacttcttggccctggcgttcccctgtactgaggcatataaagtttgcatgaccaatgggcctctctttccactgatggctgaataggccatcttcggatacatatgcagctagagacacgaactccggggggtactggttagttcatattgttgttccacctatagggttgcagatccctttagctccttgggtactttctctagctcctccattgggggccctgtgttccatccaatagctgactgtgagcatccacttctgtgtttgctaggcccaagaatagcctcacaagagacaactatatcagggtccttccagcaaaatcttgctagtgtatgcaatggtgtcagcgtttggaggctgattatgggatggatccccgggtatggcagtctctagatgatccatccttttgtctcagc

SEQ ID NO: 3153 - DNA, 1000 bp, mus musculus
tataaaatataaaaatgtatcaaaatgaaatcaatgcttaaaatatagtttttaggtctcaactacagtttgactgcaaatgctttatgaacataaactccagcagaagagacgttggtttggtcagtcattttcaagaccagtactactcttgaaagcatgattcttaaaccatggggacactttggtatggtactctaatgaaatagtctccagcagaagagaagttggtttggtcagtcattttcaagacaggtacatatgaaactaaagaagaaggaagaccaaagtaaggatacttcgttccttcttagaatggggaacaaaatatccatggaaggagctacaaagacaaagattggagctgagacagaaggaaggaccatccagagactgctccacccggttatccattccataaacaaccaccaaatgcagacactaatgcatatgccagcaagattttgatgaaaggaccctgatatagctatctcttgtgagactatgccagtgcctagcaaatacagaagtgaatgctcacagtcatctattggatggaacacagggcccccaatggaggagctagagaaagtacccaaggagctgaagggttctacaaccctataggaggaacaacaatatgaactaaccagtacccctaaagctcatctctctagctgcatatgtagcagaagatggcctagtcagccatcattgggaagagaggccctttggccttgcaaactttatatgccccagtacaggggaatgccagggccaggaagcatgagtgggtgggttggggagcagggcagggggagtgtataggggaatttcgggatagcacttgaaatgtaaatgaagaaaatacctaataaaaaatagttaaaaaaaaaaaaaaagacaggtactactcaaaagcatgattcttaaaccatgggaacactttggtatagtactctagttaaaacaattagagattgttttattatctaagaga

SEQ ID NO: 3154 - DNA, 1200 bp, mus musculus
atcctggatgcttttgttcaattccttcaactatttggttgtgttttcctgtaattctttaagggatttttgtgtttcctctttaagggcttctacctttctcctgtatttctttaagagtgttatttatgtccttctgaatgtcctctatcatcaccatgagatatgattttcaatctgaatcttgcttttccaatgtgttggggtattctggacttgctgtagtgggagagctgggttctgatcatgccataagccttggtttttgttgcttaggttcttgtgcttgcctcttgccatctggtgttagttggtcttgctgtctctgactagacgttgtccctcctgtgggctttgggcctgtgatcttaggtatgtcagcactccttgggagaccagctctctactggcaggatttgtgcagggagagctgtggggcagccttatgtctggagtgcaggtagagaatggaaggatcttgtccccagctgctttgctgtttttgtgccctgtgtgctcttagcaggtccttgtttgtacagtgattggggtgaaagtggtaatcttgcctctgagtgagatcactcctgggagaccagatctctacaggcaggatttgtgcactgaggactgtgaggcagctttaagtctggagtacagagggagaccactcagataaaattttaaaacccatcacatatagtaaagaccttcatatgcattaaggaggttattgggtgtcatctttatagatcttattttaccccttttgattgatcagttcagtgtaatatcttaaaatattactttacaacttcagataggcaattgggttttagttctccaatgttataacagaatttcacaaactgattggtttaaataacaatttgatgttgcagagataacttagtcattaatagcacttactgtacttgcataggacctgagttcagttccaggcatgcacccagtgattcaaagcctactataaattcagttccaggacacctgacatccccttcccagcttccaaaggcacagtataaacatagttaaaaaatatacatgcagacaaaaatactcatacacttaaaatacaaataaattaatttttataacaccaagaagcttaatatttcatgatgattctaagttaaaaaccccaaaccaatatgtaagaaatgtggtttccttttg

SEQ ID NO: 3155 - DNA, 1000 bp, mus musculus
aggtgatctagaaattgtgggagtggctcaccctcttgagatcaatctcagtggagggtcccaaggtccccagaggactctccacagtgcaggcaccctaggatacccaggatcttgacatcattggtgagtataacgcaacatctgttccaaaaaaaaacccagaaggtcttgtgctagcagcgacaaggtcaaaggacaaaggcaggaactagcacgcccaaaaacttggaatcactgagaccagtctacacaggcaagcacgtgggcagcagaagcaacagagcttcttggacaaggtcctttcaggccttcatcctcagccaggagacatagctgagacccagactcctgggcacctttcctggtagaggagagtcagcctcaagggaggactctgaccccaggaatcaggaggtggatctgagctccagactgctggacaccttccctgaaagaggagagcttggctgcagagagtgctctgaccactgggacacaggagagagttggacccccaggagggctgacagaggctaaagaatcacaggaggaacaagctccatccagagacagctagaacatctaacgccagagattaccagatgacaaaaggcaaaatttagaatcttactaacagaaaccaagaacactgggcatcatcagaacctagtacatccaccacagcgagtccaagataccccaatacacctgaaaagcaagattcgcatttaaaatcatatctcatgatgctggtagaggattttaagaagggcagtaataactcacttaaagaaatacaaaataacactggtaaacagatagaagtctttaaagaggaagcacaaacatccctcaaagagttacaggaaaacactgctaaacaggtagaagtccttaaagaggaaacacaaaaatcccttaaagaattacaggaaaacacaaccaaacagttgatggaattggacaaaaccatccaagatctaaaaatggaagtaga

SEQ ID NO: 3156 - DNA, 1000 bp, mus musculus
atctgtgttgtcttgggagttagtcatcgagctcctatgaagaagtcacaccaaaagacaacactcttagccacatattgtgtggagatctaaccctgtcaagtcatcaaacctccccaagtccttgagaaataatgagtaagggcaggtttgggagtgaagacagtgtctttggtggtgacggggctagtggagctagtagaagccatatgagcaatccagagctcggatgttggggtttcctgactggaatatggaggcccaacacacacagcattgtgttatgttaagccagtgctaagtgccactgaaattgacagtgtgttcaagattaggtcatttagagttccctgggtctccaacatgaggatgatcatggaggctgaaaaagcttcatagtaaattgtgtacaaaattaatgacatgacctcaacggctattgagggcaggcaggctttggctaaaaggagatccaagtaggatctgattcctatttggaatgtatgtcaaagtgcttggcatcctgcagtcctccgagggaaccagatgagtcaagatcttgagcatctgcatcctggaaaatgtgaacaagctgtccacacaccctggagattgtagatggccattcattgctgtatcaaagccgtgcaggcacagccacagaacgcccgtccacggcccaggcctgagtctgccagggtttccagggtgtctgctcttaacttcatccctgtggaggttctgcatctgattggagagtatcctcaccaggtgggaaaggctatcacctagattcgaacagagctccttggagttacagatgatgccatcacacaagtcatccggcatctgagtaggaagggacacgtatatcccagcctggatcgccagcacctacaagtttctggctgagaaaaaagaactgactgtagtttcggaggatgcttctgttctgctgttttgataattaggatgtatcgactatttcaaacaaaaaaga

SEQ ID NO: 3157 - DNA, 1000 bp, mus musculus; identical to SEQ ID NO: 3156

SEQ ID NO: 3158 - DNA, 1000 bp, mus musculus
aggcccttccggtcattgccagcacccagtcacctagggcgcagagtcggcggacacccccacggtccatagaggactctccatgagatcttaggatcactggtgaatggaacacaacttctgttccaatccaatcgtgcgagacctaagacagcagaagggaagcagaaaagcagcctgaccaggggcacaagtcccttcaatctgtaccagcaaccggtcacctaggggtcacctaggacacagtcagtggacacccccacggtcactagaggactctgcacgcaatcttccattcactggtgagtggaacacaacatctgttcctatccaatagcaagggacctcagacagcaaaagggaagcagaaaatcctgactgaccaagggcactagtcacttccggtcagcaccagtactaggtcatctagggcacagaattagaggacacccccacagtccccagaggactctccacaggatcttaggatcaatgaccagacagctttttggccctcaaaagagacaccacttccaggcactataaagcaaaacgcctaggatcttaggacaacaggatcccagggtaacaggagctgggtcacaccaatatttcagggtctaagaggaagcttgaatgccaaaaattctgacacacccagaatctcaggttcataggagcccacaatcaaaggatcacagagaaagctggactctgaggagaccttaatcaactgggattataggaaggaaaggctccaatcagatatgttgagggtagcaagcacttatgataaacatatggcaggagacaagcctaagaacagaagcaacagaaaccaaggttacttggcatcatcaaaaccaaactctcccaccatagcaagtcctggatacaccatcacacgagaaaagcaagacatggatcaaaagtcacttctcttgataatgatggaggactttaagaaggaaatacaggaaaacacaggtaaacagctaga

SEQ ID NO: 3159 - DNA, 1000 bp, mus musculus; identical to SEQ ID NO: 3158

SEQ ID NO: 3160 - DNA, 1400 bp, mus musculus
tgcagattcccttccctttctcctttttacctttgaccccattcaccacctctgccctgcttctccatttccccttcccattccctcttcctccatccccatcccttcccttcctcttccttctagttctattttgctttgcttctcatctccatcttgtctgtcttctctctatgtctgccatctccctctgctttccatttcctctttttatttctaatagaaatttaaaaaaaaaacatatttgtggattagaaggatggattctgaagccagatctcccacgcattcataaatctgagattctttctagaagtaacatattctggtaaaacctactctaccacctacatttttttttgcggggggaggggggtgaggagggcttctgcggcttttatttttacatgtaaaccactggggaagtcttgatggtgggcaccctagagattgcactggagttccgagggctccagatactagctgtgaagtcaggtgacagaaacaatgattcagaccaatcacatgattacaaagctgggtctccaggagggttcctctggtcaggtgtggacgtctaaggaagcagtgacatggaaggggcaagcactgggccagtcttgagccacctggatgacatcagggacagaggacctagcagctggtggctccaggggtctccagtccatgctttacttggccagggggttccagaaggacctgccagcaaacttggctttgctgtccagctcttccttgattctaaggatctgattgtacttggccaggcactcagatcaacaagggaaaccaatcttgatctgccctgtgcagatcttcagtctccccaaatcaatgggacactatgatgccccagtcattgaactgggccaacttacacgcctgcagagactcggtcacagagctgatctggttcactttgagcaggaggcagttgcaggatgtcttgtctgcagccttggcactctgcctagggttggtcactgtgagatcatcccctaccacttgggtgcctgcactagctgtgaacttctgccaggcatcccagtcgtcctggacaaaggggtcttcaatggacaccactgggtagtcttaaatgaaggacttttataggtcagctagctagtcgggtgtgatgtattggctggagtcatctggagacttgaagttgaggtcatacttgccagacctgtagaactcggaggcagccacatccatgctaataactacctggtcagtgatgccagcctttgcaactgcagtcttgagcagcaacagtgcttctttgttctccaggatgttaggtgccaattcgccctcattggcacctacattggtggcatccttcccatacttcttgatgttttttcaagttgtag

SEQ ID NO: 3161 - DNA, 1200 bp, mus musculus
gcagtttctcctcctagtctctttcccctgcatcccctctgtcccccacccctgctcttctaatccaccttcttcgcttctattcagaaaaaggcaggtcaatcatggatgtcagctaaacatggcatatgaagtttcagtaagcctaggcacctcaccttgtattaaggctggacaaggaaacacattatgaggaaaagcatgctaaaagctggcaaatgagtcagagatagtctctgctcccagtgttaggagtcccacaagaaaaccaagctacacaactatagtatatatgcagagagcctaggtcagtcccttgcaggctccctggttgaataccaagcatcttatgctatccattgcaatgtcttcatgagcaggaaagattttcacatgttaccaaatatctcagcattcccattactttcttataccattgattacatatagcctttaacttatgttcttgggaatatcatttttatttttagtcactgtcttttagtggatcacatgtgtgatttatgttagcatcattgacttggtgtgtgcatttgttttgctttaaaagaaaactcagcacttgagttgtcagtgatgaacatgtcaaaaggatgtcttaatagctatatagacatatgtagatatgtagagatatgttttcttctcttgaggtctgtgaattaccctccactctggtgcctttgaagtgctgctcaactatagtggtcgacccattcttagacagataagtgttatccaggatgtttttgcagttactggcttctcttagtaattgtcagaaagaaagcagaatatttgaaattatctgtcttgacatgtcttgaaatgtactagttgactttgcatctcctaaattactctgcactcattcaacatcacgaatcacaatgataactgacttttttgttttggttttactttcctgggcattaaacttgcttgctgtttgacctttgagcatcaggcagaccattccccagcaccttgctctatctttagtaccaaacgctcaaattattatctatcttgaggatgtaccatgccgtagaggtactctgatatttgctaatacttcccattggaccttacagacatttccagatcatgacagtgtcaattgatatcatggttttaaacattatcaaaatggcttctgctaaagaataaaaagaaaat

SEQ ID NO: 3162 - DNA, 1000 bp, mus musculus
aaaataaagaaagcttaacagcttagcccatgtatttatgatccctttcaaattccttattttggtctcttacctcagcacactgacgtccttctggtctacttctaatctgtttaaggtctgtgcctgtccatcatagttaaggtgtgctctcccattctggttcatatcaagtttattccctgctcatgttatttgctccttttgtttgtccattttttttttactagagtggtctcctattctttcctgaaattttccatccttatcctaatattactaccattagctctcagttcacacttcattttctctggcaagtgttccctgattttcagaccaagttcttctcttaagcatgtttttcttacctgaaaggaagctagtatagttgaagcaaattgaacaagagtagcaatctaatgtgaggttggagaggtaggtgtgggacaaatgatgaagcagtgcctcattggcagagacactgacaatttggttagtagtaggttaagtgcaataaaaaggcattagagagagtaacagagattttacttgatgtgttggttagatttacatggatttgacacaagctagagtcatttggaaagagggaaactcaattgagaaaatgacctcatcacatggcctctgggcaaaactatgggacatgttcttgattgatgtttaatgtccatgggatcccagctctctctgggtggtgccacccctgggttgcttgccttgagtgctgtaagaaagcaggctgagcagcccatggagagcaagacagtaggtagccctcctctatggtatcagtttctgtgcttgaagttccctggatgatggtttactaattataagatgaaaaaagttttgataattgctttctcacggcaatagaaacccaaattaagacacttgggttttaacaagagcaacaacaacaacagcagcaacaacaattcatactgtctatggacaactgtgaagaatattcaca

SEQ ID NO: 3163 - DNA, 1200 bp, mus musculus
accagcatcatgatatatgatttttaaatccgagtcttacttttccagtgtgttgtggtatccaagactgggtgatgtgggagtgctgttttctgttagtaagattcttacatttgcctttcgccatctggtaatctctggagttagttgttatagttgtctctggttggagtttattcctcctatgattcttttagcctctttcagcagacctgggagtctacctctttcctgagtttcagtggtcagagtactctctgcaggcaagctctcctcttgcagggaaggtgcacagatatctggcattcggacctgccttgtggctgaagatgaatacctgaaacagggcttgtccaagaagctgtgttgtttctgcctgtcccagaagcattgtagcttctgtattccccactcttacctgtgcagactagtctctgatggatccaggacccaagatggctcccccaggtgttctggcagagtcctcatgggccgacacctctcctctgtcagctaaggtgccaagatgtctggagcccaaaacggggtctgtcctagaaactgtgttgcttcttcccatcccagtagctctgtagcttctgtagtctgcactatcacctgcacagactagactctaagggatccaggacctcagatggctcccccaggtgctccggcagaatccttcctggtggggtggacacctctcttctggcagggaaggcgcctggatgtctggagcccaaaacggggtctgtcccagaagctgtgtggcttctgcctgtccaagaagttgtgtagtttctgtagtctgcactttcacctatgcagactagtctctgcaggatctgggacccaagatggctcccccaggtgctctggccattttatattcttaaaatgaaaactgtaaatgtatattatttgacaaaattatagtatattgtctcaagtttggggtattatatgtggttttctttttattatgtgtttatatttctctgtgttgtgacttcattcacttacacgttttgttcttttgcttagggttaaacttggagcttgatgagtaaaactaaagtactcttccactgaaatacatcaccagccccttctatctttatttttatcgtttttacttttatcataaaagaagtaatttttatattattagctaaaagtgtatgaagcaaaaaagta

SEQ ID NO: 3164 - DNA, 1000 bp, mus musculus
ttattctgatcttcttttttttttaaatactttttattattacgcatttccctcaattacatttagaatgctaccccaaaagtctcccataccctccccccctccacttccctacccaccaattcccattttttggccctggcattcccctgtactggggcatataaagtttgcatgtccaatgggcctctctttctagtgatggccgactacgccatcttttgatacatatgcagctagagtcaagagctcctgggtactggttagtttataatgttgttgcacctacaaggttgcagatctctttagctccttgcatactttctctaactcctccattgggggccctgtgctccatccgatagctgactgtgagcatctacttatgtgtttgctaggtcccggcctaatcttacaagagacagctatatcagggtcctttcagtaaaatcttgctagtgtatgcaatggtgtcattgtttggaggctaattaagggatggatctctggatatggcagtctctagatggtccatccttttgtctcagctccaaactttgactctgtaactccttccatgggtgattgtttccaattcgaagaaggggcaaagtgtccacactttggtcttcattcttcttcagtttcatgtgttttgcaaattgtatcttatatctctggtatactaagtttctgggctaatatccacttatcagtgagtacatatcatttgagttcttttgtgattttgttacctcactcaggatgatgccctacaggtccatccatttgcctaggaatttcataaattcattccttataagatcagacattcaggtgacagcagaagctggcgaggatgtggagaaaggggaacactcctccattgttggtgggattgcaagcttgtacaaccactctggaaatcagtctggtggttcctcagaaaattggccttagtactaccggaggatcccgcaatacctctcctgggcatata

SEQ ID NO: 3165 - DNA, 1000 bp, mus musculus
taaccccttacaagattcctctccacaagctgcctatcacctcctacctcccccctgaccctacgaggatgcttcccaactcacccacccactcctgcctcagcagcctagtgttcccctatcctgggtaatcaagcctccacaggaccaagggacttctctccaagtgatgctagatgaggcaatcctctgctacatatccagctggagccatgggtcccatcctctgtgctctttggttggtggtttagtccctgggaggtttgagagatttggttggttgatactgttgttcttcctatggggttgcaaacccctttagatcctacagtccttgccctaacttctccattgggctctccattattagtccaatgtttggctgtatatatctgcctatgtattagtccagctctagcagcaaatctcagggacagctatatcagtctcctgtcattaagcacttcttagcatcagcaatagtgtctgggtttggtggttatttatgggatggatccctaggtggggcagtctctggatgacctttctttcagtttctgctccactctttgtccctgcatttccttttgacaggaggaattatggattcatatttttgaggtaggtgggtagccccatctttcaactaggggacatgactatccactcgataaggtttctacaggttctacctaccctctgttatgtatttcagctaaagtccttcctgttgtgtctctggcatttgggactttccagtggctcccccatctccccgccccccccgcactgctacacacttacttccaaattcctgaccttctgtacttctcccccttctcctcccatatctgaactggcccccctttttactccccctcctctttccctccaagatacctctccccctctacttcccagagattattctcttcctcctactactgtagtatccacactttggtctgatcttctttcttcttgggtttcatatggtctg

SEQ ID NO: 3166 - DNA, 1000 bp, mus musculus
gggtctggagtattgatggagcagccttagatcagctctgattagtagactggttagagatgaagagagattcactggctgtggctccagactggccacttggggtataatttccttgacaagcaaagctgttggccaggactcacttgatgtacttctcctgggctgccttcaggttctccttcttccaccacaggcctttagtgcaaaggcctacagggctcagccataggagaaagtcaatgccccatggcttcagcaggggacacttgttgataccattgaggttgatggatgcctcctcctcactctgccctccagacaggaaagtgatcccaggcacagaaggggacactgtgcgatgaaagtttctgggtgcaagcatggttggggatgatcatgttgggcttcagcaatgtgccttccagatagtcatggtgataactcagagccttgtagacagtctccagtaccatactgccagttgcatactggcagcgcttcaagtaatggtccccatcagggataatttcaggctccacaatgggtacaatgccattctgctggcagttgctggaataagggccagaacattggcattttccatgatgtcaagggatgggagagtatgttccccaatctttagcacacagggccacttttcagtcaaatccttctttcttatactgggcacagcattcagacacccaatccagtccttgggcaggggtctcgtcattggttccttccaggggcaccacacccttatctaccttaatgcccacaacatcaacgttggacttgataacttgggggacaggatgtctatcatctgccttctggtacagtgtctagtggaagaggatcaccccccctctcagtgcagggattcacacggtcatcaggagtcagcagcaactggccctagaagcacatgttcttgttggtgttcttgctgccagtggactgcaggatcttggctatgtttccagtgtactca

SEQ ID NO: 3167 - DNA, 1200 bp, mus musculus
tttatcaaatttatatcctaaatatattaaagcaattatcagagcagtgactagaaacactgtgctgagaatgatcctttcacagtatttcatctccattttttactacatactagacccccagtttcctcttagaaaattcctacaatattattttaaaatctttttgtgatctgttgatgttcagtagttcattgcttctgataagtttaaaggatatatatctgtttttgttattgttgttatgttttgttttattttgtgttgcattttcttttcttctttactccttttttaaagtccagtcttcatgcccctcttgctctgtctcctgagtactgcccatcccatatctcctccctcagtctttaagagaatgcccccactctacccaccctcaccaggcctccccattccctggggtctcaagtctctcaagggttaggtgcatcttctctcactgaggtcagacctggtagtcctctgctgtttatgtgttgggggccgcatatccactgctatatgctgcctggttagtggctcagtgtctgagagatctcaggggtccaggtcattgagactgctggtcttcccatggggccaccttcttcctcagcttcttccagcttttctccaattcaaccacaggggttgccagcttctgtccattgaatgggtgtaaatatctacatctaactctttcagctgcttgttggccctctcagagggcagccatgctaggtttctgtctgcaagcataccacagtatcagtaatagtgtcaggaccaggggcctccccttgagctggatcccaatttgggcctgtcactggacttcctttctctcaggctcttctccatttttgtccctgaagttccttcagacaggaacaattctgggtcagagcatttgactatgggatggatggcaaccccatccctccactggaagtggactctacaagttctccctccgcactgtagagcacttcatcttaggtccctccctttcagtccagagaggaaggagtggggggacatgtcagttttataaagaaactatttcatagaagaaactagtttataaatatgtaagaaattacttcttgctactatctgctcacatgcttcaaaaaatagacatgtgtaatgattttaaaatagaaatattagctataattaaaatatgaaatattcttt

SEQ ID NO: 3168 - DNA, 1000 bp, mus musculus
gtggatattagctaaaatgtacagaatacccaggatacaatccatagaactcaagaaggttaacaagccaaaaagccaaagtaaggatgcttcaatcccacttgggagggagaagaaagcaatcatggcaggggagggcagagggaagaagcaacatgggtgagaggggacaggaaggggaaagggggaacaggatcaggtattctggaggggaaaacaggagtgaaaccctaagggctgtgaaaacagacaacctcaatcctatgggaagtaggaggtaggaggagcccctagaatgtaccagagacctgggaggtgagagattctcatgactcaaagaaaggaaccttagatgaaatgcccaacagtgggaaaagggaatttatagagtccacctccagtagaaagacaggacatcaagtggagggatggagctgccatctcgcagtcaaatcctctgacccagaattgttcctgaactgcagggacaaaaatggagaagagacaggaaaaggaggcccagtgactgtcccaacttgaaatccagttcaaggagttgttctaagacctgacactaatactgatgttgttatagacaggagcctagtatggctgccttctgagaggcccaacaagcagttgaaagagtcacatgcagatacttacacccaagcaatggactgaaggaaaggctggaagaagttgtggaagatgtgacctcataggaaaaccattagtctcaactaacctaaaaatcccgagatctttcacacactgagccaccaaccaagcagcatagagtagctgatctgaggtcctagacacatacacagtatagggctgcctggtttgcgctcagtgagagaagacacaactaacccttgagactcaagacttgcggtcccagggagtggtgagacttggcaggttagggagtgtgggagtggggtggaggacatcctcttggcgatgggggaggaggaatgggactaggaacttt

SEQ ID NO: 3169 - DNA, 1200 bp, mus musculus
tgactggacaggataaggggagtttatgaggggatgactctacctgatattcctaccagaggggaatgtagagactgcctagcaactaggcaagacttcccaatgaaggatgggggcacccatctacccataaatctttcaatccaaaatttgtcttgtctacaatatgcagggataaatatccaacaaaaaccgagggaacaatcaatgaatgactgtcccaacttgagacccaacctgtagtctcccctcccccagcctgaaacctgcttgctcaggggtggagcttcccgctcaatctttctgccatgcctactgatggaacctgctgctttgctgttctgaagccatcacatgatcaccctgctactggaccccaagattatttggcgggaattgggccccacccccttcctttataactgagtgccgaaatactaaaaattgtaccttgagcagagagctttgtcttggttccttccttatgtcccgcagcccagcccctctactcttccaggtttccaaaatgcctttctaggcaagaacccatgttgtgatctattggtcagacacaacaccaacccatgtgagaaagagagccatctcctgacactactaatgatacagtgatggtttgtatattcttggcccaggaagtggcactatgagtgtggccttgttagagtaggtgttgccttggatgaagtgtgacattgtgggggtgggctttgaaatcctcatcctagctgcctttgaaacaagatgtggaactcttagctcctacagctccatgtttgcttggatgctgccatgctcccaccttgatgataatggactgtacttctgaaatcgtaaaccagccccaattaaatgacctttataggagttgtcttacttatggtatctgtttacagcagtgaatctcttagacagatactctgtgaggcccattggtcatggacactttatattcctcaatacaggggaatgccagggccatgaagtgggagtgggtcggtgttggagtgggtgggggagggtgtggtggacttttgggatagcattggaaatgtaaatgaaataaatacctaattttaaaaaaaagacagatactctgctatactttcagacaggatcctagcagaattgtctcctgtgaggcttcatccagcaatggatgaaaacacatatagaaaccca

SEQ ID NO: 3170 - DNA, 1400 bp, mus musculus
gatttttgtgtttcctgtttaaggatttctacttgtttagcagtgttttcctgtaattccttaaagacttctacctgtttagcagtgttctgtatttttttaagtgagttactaatgaccttcttaaaatcctctaccaccatcatgagatatgactttaaatctgagtcttgttggggtatccaggactcgctgtggtgggcatacttgattcttatgttgctcagcagtcttggtttcagttaataatattcttaagtttgtctttgccatctggtaatctctggtgttagatgttctagctgtctctggctggagcttgttcctccagtgattctgttagcctctgtcagcactcctgggagtccaactcatacctgtgtcccaaggttcagagtactctctgcaggcaagcactcctcttgcagggcaggtgtccagaagtctggagctgtgatctacctcctgagtcctggggtcagagccttccctggacaccaattcccctctggcaaggaaggtgtccaggtgtctgggtctcatttctgcctcctggctgaggataaaggtccgaagggacactgtctaggaagctctgttgctcctgccatccacatgctctccagtgataccaatgttctgggtgtgctagggggcctgcggcgtggagagtcctctggggaccttgggaccctctgctgggttcacactgaagatagcaaggggctggcctggaccaaatgaatcctggctctggtcgcacagggttcctttgtcactgttcctgctggcacaagaccctccaggattctttggaactgatgttgcattacactcaccagtgaaccaaggtgtgctagggggcctgcagcatggagagtcctggggaccttagcaccctccgctgggttcgcactgaagatctagacttcttagacatcaagagagttgtcattcctgaagtagagtataatttatttcagtttactaattagtattgaaaatagtgataaaaatgtctttagttatgaacatagctttagtattcaaaatgattagtttgcaaatttacattttttgatgtttaaaacttttgcccacagtatataacacctataatagcagctaaaacataatttcagaaaaaaataattttgttcaatagagtctcactggatacgcaaattatatttcatactcaaaggcagatcccatgacaaccaatagatgggcaactcaaaactacctcaattgtagtttggaagattgtgttgtctcacaataatttattggggcattctatttttcccttagtgagtttttgcttacatattattatttctgattttgtgttttgttcacttgtctatgtatgtgtatgtgtgtttgtgtctgtgtct

SEQ ID NO: 3171 - DNA, 1000 bp, mus musculus
agaaagttatagtcaaatctggaaaaaaagaggacaggtctttttaagttatagctaaacagcatgctttttacattcatgtcatgatccaatccactttgtacctcaacttgcagtctctcagagtcagacaatagcttcctgttcctttcatcatttatgcatagtgtcactgtttttcccaaaatgaactagtgtacttttcactcaaatgactattttcttggcaagtgggttactaagaattgcctaaggctagaaggagattttgagaaggaataatatacacatcaagaatttcaggtaatgaaagcttcatagctaggaactacttttcatggaaccagaaggtgctatagaaccttccaaaagagaaaaccagccaacggttctacttagctatgatgccaatgaaccataacaagagtgcacatggcaccattaaccttaatggtacaatagctagacacataccctgataggaaccattttctaattgaacctcatttcaggaagaagcccatacctagagctggaaacctagtgaactgcccaaggcagtcatggttcttgaaggaaaatatccaactgctacttttactaactcaaaataatctctaagcatatttgaaacatctataaatctacccacaaattaggatagctccacccatcatcaaggaaaactttctttacaacacaatggagacagaaaacacaactgataaaatgcagagaacaatagaccatgcgatacacattctcatgtattgcatctacaacacaactcctgtatctaagactcagcaatcattgcagaagagtagtggggaactcatagaagccagaggaacagggagtttattgtgaagctgaaacttataaaaatttcagaaactgtaaccatggagtcccatctacatggctgcctaaacaggacttaaatatttcatcaatagacatactaacatggaaaggagaaagttcacatgacaccaac

SEQ ID NO: 3172 - DNA, 1000 bp, mus musculus
gtgaacagcaccatcttacatgtcaggagtatgaatggaacaaaagaaaaaaatgggaaaatccatctagcacagccattttccctttctgactgctggtcagcatgctataagctgttctgctctagcatgtcttcactgtagtgatgaacagaaacttctgatatcatgagccctaagacagtcttttcttctttatatttccccttgactgtatacctttccatactgagaaaacgtttatcatatacacaaccataaagatctttgttgatttgctgcagacaaagtcaatcacaaggagctggagaaaatgttcttgcagaggacataggtttactttcccgcacttatttcaggcacctcaaaacattatgaaattccattgccagcagaactagaacttgtctccccttattttccctttcccctgagacctgcaagtatgtggtatacttatgcacacacgcacacacacgcgtgcgcgcgcacacacacacacacacacacacacacacacacacacacacacaataaataaacacccactccaaagcttaacggtcatcaatcacaaaaaaaggagccaggaagactgtatgattcagagctcagggggcctagggtgagacagtaccttctggatatgagaaggtcactacatgcatgaactcacaacaactgttttgctaagcaagatcaaatcaaccaacaatgcacctgtgatggagagggattcataaattgctacacatagctggggagctaggaaaggttgatggctgcttagggagaaggggttttctttacatgtgtgggtctctgaatcaaccatgcttcagaagatgatccctgacccatgtatatatatatatataggcagaataaccttggactttgaacgttattaaaacataaaagaagatatgatgctggtagagatgaggaggaatcagttaaatctgcgaggaattgggggaggaaggaaaagtgaatatga

SEQ ID NO: 3173 - DNA, 1000 bp, mus musculus
tttattagatattttctttatttacatttcaaagttaccccctgtcctagtttcccctctgaaaatcccctccccactctcacactgcttctcaacccaccccctgcagattcctggccctggaattcccatatgctgggtcatagaaccttcacaggactaagggcctaccctcccattgatggccaactaggacatcctctgctgcatatgcagctagtgctagagtccctccatgtgttttctttgattggtggtttagaccaagggagctctggggttactggttagttcatatttttgttcctcctagggggctgcaaaccccttcagctccttgggtactttatcaagctccttcattggggaccctgtgctctgtccaatggatgactgttagcatccacttctgcactagtcaggcactggcagagcctctcaggagacagctatatcagggtcctttcagcaaaatcttgctggcatgtgcaatagtgtctgggtttggtggttgtttatgggaagaatccctaggtggggcagtctctggatagtcattccttcagtctcagctccagattttgtctatgaaattccttccgtggagaattctctgctacatatgcagctagagccacgagtccctccatgtgttttctttgattggtggcttagtcccagggggctctgggggtactggttagttcatattgttgttcctcctatggggctacaacccccttcagctcctcgaatacattctctagctccttcattgggcaccctgtcctccactgaatggatgaaagtgtgcatccacttctgtatttgccaggtactggcagagtctttcaggagatcactatgttatatcaggctccgcaaaatcttattggcatgtgcaatagtgtctgcgtttggtggtggtttatggaatggatcaccagttgggacagtctctggatcgccattccttcagtctctgctctgaactttatct

SEQ ID NO: 3174 - DNA, 1600 bp, mus musculus
ctatcccccctttccctctcccctttgcctctatgtgggtgctcccccactctcctacctagtagcatcattgctctagcatacccctactctttggcatcaagcctccagaaaaccaaggaatatttgccttttattctactaatttgaatatgaaagtaatacatatatatatatatgtatatatatgtatatatatatatgtgtgtgtgtgtgtatatatatatatacatatatacaacctgaatatcacttacaatttgaagattatgaagaaaatactatatatttttattagtagatttttgcactccatttctgttttaaatagttattatgctctagctcatcaatgtagttgagacatggttacctggtatttcacaaagcaattgtgatagattatttttattaaattatttgatttatttacatttcaaaagttgtccccttcctgtcccccccccctgagttcttcatatcattccccatagcaattgcctctgagagagtgctcctcaactctctcacgtacccccatctttcatacaccagcatccttcttgcctggtgcatcaagtttccacaggattaagtgcatcctcttaattgaaggcagacaatgcagtcttctgctatacatgtgcacaggactagagcagagtatgtatgctccttggcttttggcttagtctctgagagctctgaggggcccaggttagttgatactgttgttcttcttatgtggttgcaatccctttcagctccttcaatccctcctctgtcttttccatatgggcccacaatctcaatctaatggttggctgtaagtttctgcatttgtctcaatcagctgcctctgagagggcagcaggctctcagaggacagccatgctaggctcctgtctgtaagcacaatatgacatcagtagtggtgtcagggtgtgtgcataggatatatcccaagttaggtaggtcactgcgtggcttttcagtctctgatacaattttgtccctgcatttccttcagacaggaacaattctagaagatgggtgggtgcccccctgcctcgactgggacccatgtctatctactggaagtgatttcttctagttccacgccccccccattattggacattttggctaacgtcatccccattgagtcttggtagcctctcacatcccaggtctctgggaccttctagaggttcccctgccccctaattgactcatatttcaattctgccttcttcatctttttcctgttgaattgtcttgaatatgcttctattcttaagtaagaaaaataattagaactttctaaaattcatgaccttccttcctttaatgattcaatcatgctttctagatcttcctcattcctttttttgaccattattctttgtattacactttcttttgacatatacatgacagttttctcttaaattctgtaatcctctgcattacctacctggagaacttcacattctgtaatgcatatatcatttctaaatgtttgtatttatttatgcatgtgaatgctctgcctacatgtacataagtgctatttacagttaaccatctaattgtccta

SEQ ID NO: 3175 - DNA, 1400 bp, mus musculus
tgaataccacccatctgagtacacagttaggaagagatgctgactgatacgcctatctaaaatgtgtatttgtatgatccacttgtagatctgctcctaagacatattcttttgctttattctcattcatgcttgcagtgttacaaagtagttaaggagaaaatgattggcatccaatcggaatctgaactatggttccattatttattggttgtgatctttcacaaatcactgtacctccttaaaacttagtgccatgtgaggatttgtggagaaggagtaggtgtaggtatgtgcatggtcctgtgtttctgattatttttgtgggggttgaatgtgaaggtgaggtaatgcgtggatttgtgtgttcatgcacttgaaggccagagatcaatctcacatgttgctccgtgtgagtcttgttttttgacatagagtctcaatagagtctcagtagctctgtggctcccacctgtcccagaagctgtcagcttctgtagtccacactctcacctgtgcagactagtctaggtaggatccgggaaccaagatggctctcccaggtgctacagcatagctgtctcttgtgagtctatgccggggcctagcaaacacagaaatggatgctcacagtcagctattggatggaccacaggatccccaatggaggagctagagaaagtacccaaggagctaaagggatctgcaaccctataggaggaacaacaatatgaactaactagtaccccggagctcatgtctctagctgcatatgtatcagaagatggcctagttggtcatcattggaaagagaggcccattggacacacaaactttatatgccccagtacaggggaacgccagggccaagaagtgggagtgggtgggtaggggagtagggtggagggtataggggacttttgggatagcattggaaatgtaaatgaagaaaatatctaattaaaaaattaaagaaaaagaaatagagtctctcagtaagatctggggctcgtgtgtttagctaggctgatggacaagagaataacagcaatccatctggctctgcctttccagtgctttgagtacatgagcttaccaccattcttagctttctcaggagggttctagggctgaagctcatgtcctcttgcttataaggtcaagacattaactacaaagctgtcttcttaagatctaattactccatcttcagacatagtaagaacatctactccataagttcacccttccttcaaatgaagcacagtgtgtagagtacttatgtaacatttgacatattgtaactgaaaagtgatccttatcaggaaccatataaggtttaagtcatcaataacttcacacacacacacacacacacacacacacacacacacacaatc

SEQ ID NO: 3176 - DNA, 1200 bp, mus musculus
cagaagtgacagaaaaatcattgcagcgatagggaagttatgcacctttttgtcgagttctcaagaaaacaatacgttgccatctgggaaagcgttccattttaggtccaagcgtttgcatactggtgggctttggggaaaggcatattaatttgtatctgtttcctgcagctggatccagaaacaggcacagaggggtcaaagaccttccttctaaaagctgggagttaggaggagaaggcagaatgtcttgtaacacagaagacagcagctgtgctgagcttggctggtctctttcagcaaagaccacgaaatgtagcgacttgagtaccaaacaatatctactcagagatggcaacctaggcagcagtgatcatattaagtcttgtgcaaaatgatgggttggtaagagaactaatgatcatagaggggagtgggctcagcttgaggcctgtgtaactctctaagttctctgccctgggaaactgtggaatggaacatcagaaatccttgctgtctgggctgtgcagtttcatttggggaacaggcaatcagttctggaaggctggccgaatagagtggacagaatgatagctcaaaatgagatccatcaatgacttctttgcagccctagccaaacaatcaaaagcaaatagtcagcttcaaaaatcaatgtttcgtgagatgatgagccaaccagtggagttctcgtgaggtgggatggaaaggagaactaagagggaaaacagaaacatttttttcatactacccaccaaagccagcagctgcagttccttgaaacagcagatttggttcctagcaaaatcagacctgcagcctcctagcagaacaaaacaaaggagcagggggcaagacatttttgaaaacgggaaggcgttttggcaacaatcacaggagggctggtaagccattgtgctctagggatctatctgctgagctccagaacaccctcttctctctccacccccatctagctctcagattgcaaacacagggtcaagagctgggtcacttgtgaagaaacagtaaagtggaaaagacggactcagccagaagttgaggagaagagcccggatccaatttgttccactcatgaaggatgtggtataagagacaggaaagcccttctttttctgccatggcaagataataagagtgggcttaaataagttaatggga

SEQ ID NO: 3177 - DNA, 1000 bp, mus musculus
caccccccatcccactgtgagggagaaggctctgtttgtccctgaaaacccaaacagcagccttgaaaatcagggccagattaagatgtccattgatgaagtgtgtcgagagacactgttgtgttgctgcaagtcttttctgcagcaggcaggattaagtctgctaataagcatgacagtcattaataacatgcttgccaagtctgtttcagacctgaagtttcctttgctatccaaggggagtggatgtgcagaggtgcggggcttggaagagctgatgagtttgtctgaaaagccagtgctggtgggggaagcactggctgcccaaatgctctcctccttcatgtgcctctttaccagaagtgggagcagagagatgcttgtggaagccatctccccttaagtggctgtctcagaaagaatgagactgaagccacccagagcctgagcactttcctgagggcaaagaggctgcagtgagtgccactaaggatgcagctttagccagtcagctcctccctgggtgagagttccttccactgtctaaatggagggctacactctgactggccaggcaaggctcttccagagctgtgggcaacttctgggttttgtagtttgcaggtaaagtgcattgtaaattgctgccctgcagccttcttcatgtggtaaagggtaaggggctccccgtggccactagctggggatgactaacagcaaatcacagcatagaggtgaagggtaaggggatgcccgcggccactagctggggaaactaacagcaagtcacagcatcagagtgaatgttgctgttgcctgtggtgatctccctgtctaagcgctgaaccacttagcagaaatgacacccatatgagagcttgtgccaaatacccttctgctgctgctgctgctgctgctgctgctgctgctgcttagatagaagtagttcccttctcctctgtcctacactagctgatggatggctagcatgttaatcaag

SEQ ID NO: 3178 - DNA, 1000 bp, mus musculus
agaagcaggcctcctaggaagatgaactgaacattgcataacaagttacaataagaataggcacaagccctcatttcaagactggatgaggcaatgtggtaggagcaagaatctcaaaagcaggcaaaagagtcagagacagtctctgctcccactgttgggagtctcacaggagcatccagctccctatccataagtatgtatgcagaggacccagctcagacacatacagggtcaagatcgctgcttcagtctctgtgatcccctatgagccctgcttagttgattttatggagcatgttctcctagtgttcttgacccctgtggctcctacaatccttccctcccctttcctgtagggttcctagcacttgcttgcctgtctctgcatctgctcccatcagttgctggatcgtgactctgatgacaattggcttaggcactgatctatgagtaaagcacaataccattaggaatcatttcattgactttttttttttttgccagtcatgtttaattctatcctgggtctctgggctgccctgtctctggttcctggctatccaggcagtgtcaggggtgggctccctctcatgacatgggcctcaagttagactggtcattagttggccacatcttgaaggcagggtagattgtaggctgaaggttttgtgcctgggttggtgttcacagaaatcttgcctggttacaggagaaggctggatcaggctccaactccatcccccattactggaagtcttcgctagggttaccctggtagattcctgggagtttccattgcactaggcttctacctccacctccaaatacctacctagtgccagtcgtctctcccagtactccctcgctccacccctgacaggttccctcctgttcccatctgtccctgtcttctcacaaaatatggtatagttttaaatgtctccaatttaagcacaaaacagacatccaaaaactaacctataaattctaaaaatcc

SEQ ID NO: 3179 - DNA, 1200 bp, mus musculus
cactctgagtaagttgatgtataaatttaatgaaatttcaaaaatacctacaaaattttatggcgttagacagcctgattgcaaagtcataagagtagctaagaagatgagccgtatggaagaagctaagaagataagccaccctgagcaactgccagcctaggggtaccaccaatctcccttctctccctgactctcttccacctttaccagactcctgaaccatactggtaagcttcccttcccccacccatcttctctgctggctgagccctctaggtaaagctaagctgccctgagcagcctgccatcccagagtgggggacctctgttctctagctgccctccccctacctcatcagacttaagactcctaaaccatacagtttagcttctctttccccactcagctatcctgctctgcctgagacccatcatccttcctgtctgcatcttcatctttcagatggaacccctggcagatcaatatgcttgctcctggacaccaaagtcagcctgtctcactggaggtctgccctagccaaggacacgggattgcaggaagattgcttgaacaaggaacacaagaggtctgccctaaccagagaaagaatctgactgacacagatacagatacttacggccaatcattggaatgagattggggacccttatggaaaagttaggggaaggattgaagtgacaaccccataagaagaccaacagaatcaattaacctgaccccagggagctcccagagactaagccaccaaccaaagagctggttggtggccctcagcatgtatacaacagaggatgagcttgtctggcctcagtggaagaggatgtgcctaattctgtagagacttgatgtccgagggcagggtgatgcaaggggtgggggcgtgtaagttggttgtgaggtgggtgggtggcatgggtaggggaactccctctcagaggtaaaaggtaggggagatggggtaaaaactctgggaggagggacgtggaaggtgggcaacatttgaaatgtaaataaataaaaacattttttttaaaacaaaagaatagctaagaagaaagaagacaccagagtagggacttctgataccataataagaaaacataaactttgtggacaactgtaattacagcatcatgtcactgctacgagaatagacaaatagtttaataaagtag

SEQ ID NO: 3180 - DNA, 1600 bp, mus musculus
cactaagatcaaacccccaacacaaatctcagtgcctgctccttcccaactcatctcttaaaaacacatgtatgatcctcatccacgtgcatggagagtctctggagagagtgagaacctgccacccctacaggtataaaagctatgaatacataccagagattcatgggacacatacacacacatacagacaaaacacgtgtacacacacacacacacacacacaaacacacacactcacacacacacacacacacacagagagagagagagagagagagagagagagagagagagagagagagaaagggagggagggagggagacagagacagatagacaactgatctttgagtgatcagggatcagcgcacatacacaagttaataaagatgagaaaatccaatgtaaatattcagttggaatactccaacgtagaaataagcatctctaagagagagacgctttaaaagatattttgcccattgtattttattcttgttttctgctatgcctatgaatcatttaaaatttacatttttcttttttcaaatttatttttttaaatttgttttctgtgccccatattacattctctgcctctcatccaccctccgggctgctctacatcccataccccctccccatcccaccacgactctacgtggatgcccctacaaccatcccacctgacctctaaactccctgggacctccagtctcttgagggttaggtgcatcatttctgaattaacacagacccagaagtcctctactgtatatgtgttgggggcctcatattagctgtgtgtttggtggtccactgtttgagaggtctcaggggtccagattcattgagactgagggtcctcctgtaggatgtcccttctgcttaacttcttttagtcttctctaattcaaccacagggttcggctgctctgtccattggttgggtgcaaataactgcacctatcactttcagctgcttgttgggtcttctgaatggcagtcatgataggtgcctttttgttagcactccatagcctcagtaagagtgtctggcattttaaaccttctattttttattcctgtctttacatttacctagttttgttcacacatatcttctgattaatgcactcttttcctccttcccctcctctttctaacaggcttccatttttcttctccactttcctttcctttattcagcattgcttcttcttcttaggttcctccaccacctaattaacttcatgcatttactatttctactctgacccacattcagttttaactttacggctcactgcacactagttttgtactttctgctctattctcatttgagctgaggtagttgaatttaatcaacttcctttttattacagacatggtctgtattggtgtttcagctgttatagtggttatttctgtcctctggacagtactgaagatttagcctggaagaggaagctgttcactaacatttccaaataaaactagaagaaataccaatagcgagtgatatagaaatgagagcacagaagcacaattactgtgaaaacctggaaatgaccataacccctcaaatgtaact

SEQ ID NO: 3181 - DNA, 1600 bp, mus musculus; identical to SEQ ID NO: 3180

SEQ ID NO: 3182 - DNA, 1200 bp, mus musculus
tgttcttgtacatagttgtaaaactcctcaagaaagcattagcaaattgaatctatcaacacgtggtataataaaacaccccaagttttgttcgagtatattaacaaatttaagataaataaaatgactgtgttaccagccatgaaaaaatgctgtaaataaaaaccatttgccaaaattttagaattaaggataacttttattttctgtgttttaaaactttttagacatatttattttacatatatgagcgtattgcctggtgtgcatggaggtcagaagaattcactgagttctcaggaactagagttctgaaccatctctcctgcaatggcctggcttttaagttaaaaacgtattctctctctctctctttttaaaattttatatttttgatttttgagacagggtttctctgtgtagccctggctgtcctggagctcactctgtagaccaggctggccttgaactcagaaatcctccagcctctgcctcccaagtgctgggattaaaggcgtgcgccaccactgcccagctaaacatttctgctctttggtccactagatgtgaccttagttctgagtttgaagtctcactgggagaaagtcaggcagtgcttaagtcatactcatattttccatgtaacttttcttgaaaaaagatgtaggcagatgcgtaggtacctaaatgtgatttgccagtcaggacagggcctcgtagcctcgagaacagcagtgagctgaggtgagagaggtcagctgacccaagctaagccaataggaatcgcccaggctgagcactaagtttgaaaaggaaccgttgacctcagcctcatctgggttccgggactccgcgggacctaggaaattagtctgaacaggtgagagggtgcgccagagaaccggacagcttctgggacgggcagaagcacagagccgctgaggcagcagcctgggcgggccgcagacaaccggccaccatccggaccagaggacaggtgtccgcctggcttgggaggcgacctcagcctcagcagcagcggtcgccatcttggttccgggactcagcagaacttaggaaattagtctgaacaggtgagagggtgcgccagagaaccggacagcttctgggacgggcggaagcacagagccgctgaggcagcagcctgggcgggccgcagataaccggccaccatccgga

SEQ ID NO: 3183 - DNA, 1000 bp, mus musculus
atgtaaagacaggaataaaaaatagaaggtttaaaatgccagacactcttactgaggctatggagtgctaacaaaaaggcacctatcatgactgccattcagaagacccaacaagcagctgaaagtgataggtgcagttatttgcacccaaccaatggacagagcagccgaaccctgtggttgaattagagaagactaaaagaagttaagcagaagggacatcctacaggaggaccctcagtctcaatgaatctggacccctgagacctctcaaacagtggaccaccaaacacacagctaatatgaggcccccaacacatatacagtagaggacttctgggtctgtgttaattcagaaatgatgcacctaaccctcaagagactggaggtcccagggagtttagaggtcaggtgggatggttgtaggggcatccacgtagagtcgtggtgggatggggagggggtatgggatgtagagcagcccggagggtggatgagaggcagagaatgtaatatggggcacagaaaacaaatttaaaaaaataaatttgaaaaaagaaaaatgtaaattttaaatgattcataggcatagcagaaaacaagaataaaatacaatgggcaaaatatcttttaaagcgtctctctcttagagatgcttatttctacgttggagtattccaactgaatatttacattggattttctcatctttattaacttgtgtatgtgcgctgatccctgatcactcaaagatcagttgtctatctgtctctgtctccctccctccctccctttctctctctctctctctctctctctctctctctctctgtgtgtgtgtgtgtgtgtgtgtgtgtgagtgtgtgtgtttgtgtgtgtgtgtgtgtgtgtgtacacgtgttttgtctgtatgtgtgtgtatgtatcccatgaatctctggtatgtattcatagatttatacctgtaggggtggcaggttctcactctctccagagactc

SEQ ID NO: 3184 - DNA, 1000 bp, mus musculus; identical to SEQ ID NO: 3183

SEQ ID NO: 3185 - DNA, 1200 bp, mus musculus
cttcagcccactgcttttattaagcaataatgtccattggtgtgatgacttctatttctaggatttctatcctactttattaaactatttgtctattctcgtagcagtgacatgatgctgtaattacagttgtccacaaagtttatgttttcttattatggtatcagaagtccctactctggtgtcttctttcttcttagctattcttttgttttaaaaaaaatgtttttatttatttacatttcaaatgttgcccaccttccacgtccctcctcccagagtttttaccccatctcccctaccttttacctctgagagggagttcccctacccatgccacccacccacctcacaaccaacttacacgcccccaccccttgcatcaccctgccctcggacatcaagtctctacagaattaggcacatcctcttccactgaggccagacaagctcatcctctgttgtatacatgctgagggccaccaaccagctctttggttggtggcttagtctctgggagctccctggggtcaggttaattgattctgttggtcttcttatggggttgtcacttcaatccttcccctaacttttccataagggtccccaatctcattccaatgattggccgtaagtatctgtatctgtgtcagtcagattctttctctggttagggcagacctcttgtgttccttgttcaagcaatcttcctgcaatcccgtgtccttggctagggcagacctccagtgagacaggctgactttggtgtccaggagcaagcatattgatctgccaggggttccatctgaaagatgaagatgcagacaggaaggatgatgggtctcaggcagagcaggatagctgagtggggaaagagaagctaaactgtatggtttaggagtcttaagtctgatgaggtagggggagggcagctagagaacagaggtcccccactctgggatggcaggctgctcagggcagcttagctttacctagagggctcagccagcagagaagatgggtgggggaagggaagcttaccagtatggttcaggagtctggtaaaggtggaagagagtcagggagagaagggagattggtggtacccctaggctggcagttgctcagggtggcttatcttcttagcttcttccatacggctcatcttcttagctactcttatgactttgcaatcaggct

SEQ ID NO: 3186 - DNA, 1800 bp, mus musculus
attaagatgttaggtatggaagcatatatctgaaatttcagtatcaataaggcagaaagagaaagttcactaaatttgaagtcaatgagcagttacacagtgacagtgaaaacaaccatctgccttaaagagcccattacaagaaatgaaatcaccctgatttacagcaggtatgtgatcatgtatttgctcttctggcgtgaaaaacatttttgtttgtttgtttattttacagtattgaatacagtagaagtggaaaaggtatctatacatttcagtctttgctgtttttaaaagactagcacataaaaattaatggcatatgaaactatgatgtaaatacggaatatgattctttggagttgacgtctcaccactttcgttatcccagttgacgcagacctcgaaattcctctcacagcccaggaattgccaccacgaatggttcaggaatataaatcttggaagagggagtgaaaggatgtaatgaagaactttaaagagaaaataggaaatggttagttacatacttgaagctacctccacctcggaagaaatttatgcatcgcccaacatggaaccattgagtccagatcacagattaattcctctaccctggtcatttagtcccaaacaagtttagtagattattatgggtcacctacgtgggcggacttggagattttcttttcgttttttttcttttctttcttttttttcctttcttcttattttttttaacttttccactccctcagcagtgttagtcgttcatttctggagaggagttcgaggtggtgggcgtgccatagtctttggtggaagctgcccctcaacggtccctgcccaatttaaagcagccgctggtaattctgattggctttgaagagtcagctgacttgtctcggacccacccacgttctactctacctcgagacccgtaacttccattgtacctcgagaccaatgacctgttggcgcaatatcagtaggtttagattatgtgcctaaccacctctacctttgggttaggaattggtgattaggggttagagataaggttaggattacttaccaattaatggaaaaataaactcatataagtgagatatagccattatctggctatagatttaccaagccagtccataacttattgtcggatttagctgacaaagccctaattatttgttcaactttaatcccactatacttttttattcttttctacactaccatccaatcaaatataactttcattatcgtcatcaacaacaacaaaaactaaactaaaattccaggagaataaaagtctgtgcctacctcttatttcaaatttgtagcaaatgtgcacacttagtcttcatgtgggtcccctaagaattggagtcaggggttgtccttgactctgttccctgcgtttagatctctttccccctacttggacagcgtagttgggcctcagtgggagagaatatacctagtcctttggactagatgtcccagggtagggtggggtggtacccaaaaggggcttccccttctctgaggagaaggggaggggccaaaggggagatggatttgcaagggcgggattgggaagagaggagggagggcctgcaattgggatgtaatgtgagtgaacaagtaaattatggaaaaaatataaactagacatataaatacattcaacccacaagactgtggacacatttagataatgaaaacataaggctcagcacaaccacttgacagtgttgaaatgttgctaattataataattatcactgggtacgtgtt

SEQ ID NO: 3187 - DNA, 1000 bp, mus musculus
ttctcatactgtaggagggtttctgggctctagtggagacatattgtcctggctgttatatgtgttttcatgctagcatctaggcatctgggtttgggatgattctaactctaggtgctgatatctggccttgtccttttgggtggtgggtgttttgtttcttggtttctgttaacttcactggcttttaggagtgtgggcactgtgttttgcctggtagggagttcttctgggatcctgataggtgtggccactgggatttctggtaaaatgtgtttccagatgttgggacctaacacgtaggaatggggatgggctaggtgggggagtctgagaggtctacctgaggaagacaacagggcgtgccaccagaatctgtttcgttccctgggaattgggacaaagagtgcagagaccacaacagggctgaggatgagaattggggcttgaatttggaggagaatagagagagtgaagacttgaagctcacctttctgcttcattggcctacttgcttctctggcaggctcgcctggtaggttccagggttatttctgccagaattgggggttgggataacaggatgagaggagaagaaggttgcaggatctgtcagatgggagcaaagacgaggggctggctacagcaggcagtgcttcagagttgggagtgagactgggggattggattggaaggagaggagatgtgaagatatgcagttaggctgcctgcttccatgcccaaagtccagatactttcatacattattaatcgtgctatagacaaatacaatcattttaaagttcaaatgagcaacagtaactaacatctaataatttatttatagggtcatatataggttaagctggaggttgggcaaagtcccttacagtcagaatgcatgtgttgggtggtagatgtgagccacaaactagacactggttccccttaagcttcgctaagatccaatatccaatttgtgtcacatcaaacttcttac

SEQ ID NO: 3188 - DNA, 1600 bp, mus musculus
agaaatgacacagcaaagcctttgttttgatacaggtaatggctcttaatcagggagggattccattatcattttaaatagacacaaattatggacccagtcctcatctcatctactataatggctggggataatgggggtgtttaagaatccccaagttgaagactagcaatgagtatgctggagcccaggaagataggacagcccaagtgactttttatgttccagacttaacgagcatccaggaaggtctccaactgtttcagtccagagaatatcccaatttgggcgacttttactccaaagagaactctggtttactgtggtggtatgtgaaggaacagcagtctagacttgcttttacctcccttctcgagagacagagagcataaacagcagcaaagggggttattggaggcccccagtgtgtctgcagaacctccagttagtgtctaataccatgaattctgcccagcccctcagtttgctactggcttcctttagccaatatatggacctgtggacgaaccttctctggcctcatgtgtttccaaaggctcgagtagctacagaccttcttcagaggccttgttcctctggaaacaggcaggcacgcatgtgggcatgtgcctgtgtgtggtgtgtgtgtttccacacctcagctaacaccagaagcaaaaaaaagagagacccaggtcattgcattcctatttggacatcactcccctaacccaggggacatgggatcaggaaggctgagatagaaggaaaacaggaaagccagaggctgggcagggcctgcttcagtgaacagatccttagtctgacagcaagaactggcaccataatgtgtctttaggaaagaatgcagaagaatgcagcaacagagcacccttggctggaggaacccaggcagacaggtcctgctgtgtgaaaacaaggggggtaattagagggaggacaggctcctctgttcctgccactggggcaggaaaccctgggccagaaattctccctggactccctcagattccaacagagaaagtcaggggcctagagactgttgccatggcagcagatatccagggctgacagcctcttctctttctgcatggctgctcagtctgtattctgatacctttagtttcttctgccagaaaaggcattttaccctgcccttgctgtgtattaacatggcttgaaccattcaggaaccgtttttttagaaaagtattcaaatgcaaaattattcctgccacaatgcctaggtgttgtgttttacatcgtttttgttttcagtgatttgtatctaactcttcacagatactacatatatattcaaccattgaactatgttctcagcctctgtccagtctctctctatatctctgtgtctttgtctctctgtctctatcgctctatgtatgtgagtgtgcatgtgtgtttacacatgtgcatgtatgtacacatgtatacatgtgtatacgttgctttttcctgtgtcggtgttcagctacagcaagcacttcatcctctgagccaactcccccaaaccccatacccaggtttgacaacacattgtgggggacagtattaaatt

SEQ ID NO: 3189 - DNA, 1000 bp, mus musculus
actatcaagaggctggggagatagctcatcatagggtgcatgacatggaagcacgagggcctggactcagattcccagcatccgtgtacaatgcagggcacagaccatggcagtgtgcatatgtaaccctagtagtggaggtcagaaacaagcacttcgctggaattcattgaccagtgagcccagtcagtctattaactccaggtttagcaagagatcctgtttcaaaaaataacatgtaaagcaaccaagaaatcacttcaagtcaacctctgtccttaacatacatgtgttgtgaacacactcacatgaacaaatgcctgcatgacatacacacacactgcaatgatgataatgataatgataatgataatgataatgataatgataatgataataataataataataataataataataataataaatggaatctgctaagcatggtagcccatgtctttaatcctagcatttgggaggcaggagcagatggacctctatgagctataagtcagcctggcagatgtacataacgatttccaggccagataaggttatatagggagatctgtctcaaaacagacacctcgaaattttcaaaaataaatgaataaaaacgagcaggtaatctgagtattcttttaccaaaaagatatataaatatagtgaatatatatagaaaattcttggcattatggatcatcaagggagtgcaaattgaattcaccataaaatattataacacacctactacaacagctataataaaaactcatgtcacggacttggagagatgctttagtagtcaggacatttgttgctcttccagaggacctgggtctggttcccagcacccacaggtggttcacaactgtctgtaactactgttccagggtaatgaatgtcttacaaaatgcaatatatctccacaacagaatattattaagtcacaaaagaataaagtgctaatacatattataaatgtatgaacttgcaa

SEQ ID NO: 3190 - DNA, 1000 bp, mus musculus
gaaaaatcaaatcaaatcaaattcacacagcgcagtgcaggaagaggcacagagagacctgcgccctgccacgctgctcggtgtgggcggggcgaagggaagacacccacagaccttccctaccccacagcacaggtgggccacagatacacagagttccgcctatctccacacagctcagcgagggaggaggaagacatacagagacctgcggacttccataccacccagagacctgcctgccctctagagcacagcttgcacttcaacaggagcaccatagataagcatttgccatcatgtcatgcagctcttactgaggatggccaccctcgggtctgggagctatgtggccagtctgcagtgggaactaccataatgtgcaggtagacatctttctgaagagggatggaaatggagactctgggatggtactagagaggtgtaaacctgttgtgtgtggccaccccttctggagccatagtgaggtccgagcccaagctgttgttgtgggccatgtctgggtccatagctacttagtagcaggcaggggtcagtgtcaaagcccatgaatcatattaacactatagaaaatgaggatattctgggtcagggccgtctgccgtcactggctgcagtgctctggcgaattggtcccctcacttgggagagcaatactttgcccagatagtacagtagaggccctggtggtgggagtgtgggaaagccggcctccagggtgtgagctagggagagctggccccaccattcctctgccacgaggtggcctaggcaaagggagaagccttgccccctgcaccttaaattgttatgcagtcaggagagctcatcctggggtgaagagtgagggagagctggctccagcacccatctgttgtgaggtgcaataggtgcagggtgattcccttctcctttcccctcttgtcacctgggataattgggagagttggctctgagatagggagagctagccatgctg

SEQ ID NO: 3191 - DNA, 1000 bp, mus musculus
agtctccggacacccgcaaggacccacaaaggatcccccacaggatcctaagacctctggtgagtggaacacagcgtctgctccaatccaatcgcacgggacctgagactgcattaactaggaaagcagataacctggcctgatcaggggcacaagtctcttccggtcccctccagcaccggggttccttccctgtggagtttctggacacccccaaggtcctcacaggaccctccacgggatcttaagacctctggtgagtggaacacaacttctgccaggaggcagatttgaacaccagatatctgggcaccttccctgcaagaagagagcttgacatcagagaatactctgactacagaaattaaggagagagctagtctcctaggtctgctgatagaggctaacataatcacctgaggagcaagctctaatcagagacaactataacaactagcttcagagattaccagatggcgaaaggcaaatgtaagaatcctactaacagaaatcaagactcgacatcattagaacgcagcactcccaccccaacttgtcatgggcacccgaacacacccgaaaagcaagaccctgatttaaaagcatatctcatgatgatggtagaggacatcaagaaggactttaataactcacttaaagaaatacaggagaacacagctaaaaaggtagaagaccttaaagaggaaacacaaaaattcctttaaaaattgcaggaaaacacgaccaaacaggtgatggaattgaataaaaccatccaagacctaaaaagggaagtagacacaataaagaaaacccaaagtgaggcaatgatggagatagaaaccctaggtaagaaatctggaaccatagatgggaacatcagcaacagaatacaagagatggaagagagaatctcaggtgcagaagattccatagagaacatcggcacaacaatcaaagaaaaaacaaaacggaaaaaagatcctaactcaaaacatcc

SEQ ID NO: 3192 - DNA, 1600 bp, mus musculus
ctgatgttctctatggaatcttctgcacctgagattctctcttccatctcttgtattctgttgctgatgctcagatctatgattccatatttctttcctagcttttctatctccagcgttgcctcactttgggttttctttattgtgtctacttccctttttaggtcttagatggttttattcaattccatcacctgtttggttgtgttttcctgcaattctttaagggatttttgtgcttcctctttaatgtcttccacctgtttagcagtgttctcctgtatttctttaagtgagttattaatgtccttcttgatgtcctctaccatcatcatgagatatgcttttaaatccaggtctagctttttgggtgtgttggggtgccctgggctgggcgaagtgggagtgctgggttctgatggtgagtggtcttggtttctgttagtaagattcttacgtttacctttcgccatctggtaatctctggagttagttgttatatttatctctgtgtagagattgttcctctggtgattctgttaccgtctatcagcagacctgggagactagctctctcctctgagcttcagtggtcagagcactctctgcaggcaatgtctcctcttacaaggaaggtgcacagatatctggcatttagacctcctcctggctgaagatgaaggcccaaaacaagacctttcccagaagctgtgttgctttgtcctgtcctagaagctgttagcttctgtggtgcacactctcacctgtgcagactactttgggcggagtcccggaaccaagatggctcccattgatcctgaggcaaagggctcccgggccaggaggacacctgtcctctggccaggagggtggccagatgtctggggcctgaaaaggggactgtctcagaagctctgtggctccggtctgtcccagaagctgtcagcttctgtggtgcacactctcacctgtgcaaactaagttcggtggagtcctggaaccaagatggctcccgccaatcttgaggctggaaatcatcctttttgttgtctataatttaaaactgtataaaatgtaaattatacctttctcttgaaatctcattagaactaaactttgagctagtctttccaggaagactttcaatgctcaaatttaaaaattaagtagtattatggtagttaattcctatacattatgatttcctagacatgttcccagttttcagctttcagaaacattggtcttcagttaaatgatattattttattactgttactcgtccttatgtccacttttcatccattcatatgatttgtgttcttactgttttctttaaccatactcactagaaatttactcatttttattatatttttcctcctgatgaaagacattctggttttcttcttttactcataattaattagctttagtctttaatttattatctaccccctttttcttttggctttgtcctcttgatatatatatgtagcttgtcataggctttttgggttgtcactctttattatggctattcaatgctatattttctcctcagaatcttgcttttgtttcatccaagaagttttgctct

SEQ ID NO: 3193 - DNA, 1000 bp, mus musculus
ttcaactataagagtaaacctgtgtgaaatttctattattatagtcattttccagataaaccaagtctaagaaaggttgaagaattaattcaaagtcttataactttgagaacatattgagaagtggactttattgagccaataattctgagttcttaatagcagcaccagtcaacctgacgggtgcttatatatcatgagaaaacaattaaagagtgaagccaaactgaaccctctggaaattctagttcagttgatctgcggtgtggaatcagcactgtcagcttttaaaagcttcctggttgacttgagtgtgtgaatatgtttgggaactactgcgttagagtctacagtgtttgaagcttcatctgggccttgtgaagcggtaagctttacatggggaagagaatggagaacattccagataggaattgcttaaataacaaaggtgatgtattattttctgatttttttactgcttgagtacctcatacagtgtctttggatcaaagccatcccatactcccttgctttcaagtctttcgattccctcctatcgcttttcccttgcaactccacatacactgactggaacccactcaattcttttggtgctgctagtatgtgtgtgggtccatggccttctactggaacatgagaagcttctcaggggctatattcccaaaaacaaaacaaaataaaacaaaacaaccaatacaaaacaaacaaacaaacaacagattctccttcacttagcagccagtagccctctcaactagctcctcagctctgggtgggactttgtgaatctcttccccattcatgtggaattctgattggctttatcccatgcaggttttgtacagccacaggcactgcaattcttacatgaatgagccccaacacatcagtctgttgcagcagtgacacacaacctctggctcttagcatgtgtcttttctgcagtgatccctccactgtggcaaatacacactatacg

SEQ ID NO: 3194 - DNA, 1000 bp, mus musculus
ggcatgcatgtgtaacactatgctgcacagacataagaaagttttcttttactaataaattttgaggaatgaaaaatcagcaaaggacatgggaatttgctacagcaatatttttcccccctttggaggaggacagtctcctttaacaatagtagattggtttgtgtgtgtgggggggggattttcagtttttacaagttttgttttttgtgcatttatgcctgaatgcctatctgtgcatcacatacatgtgcagtgcctgtggaatccaaaggacagtgttacattctctggaactgtagttatatatggtggcaagcagctatatgggtgctagaattcaacctgggtcctttagaagctgtgaatgtgcttaactgaaaagctgtccttgtagctccaatttacatttttatatgtgtgtatttatttttttaattagatattttctttatttacatctcaaatgttatcccctttcctagtttcccctccaaaaatcccctattctttctcccctccccctgctccacaacccatccactcccacttcctggctctggcattcccctacactgggacatagaacctttacaggaccaagggtctctcctcccattgatgaccaactaggctatcctctgctacatatgcagctggagccatgagtcccaccatgtgttttctttgattggtggtttagtcccagggagctctgacattactggttagttcatattgttgttcctcctagggggcttcaaaccccttcagctccttgggtactttatctagctccttcattggggaccttgtgctctgtccaatggatggctgtgagcatctacttctgtattagtcaggcattggcagagcctctcaggaggcagctatatcaggctcctgtcagcaattacatttttaaagtgccaaaatgaagggttttttaggttgttgatcactagatatttttggaatttacaaccaaaaaaaatttttt

SEQ ID NO: 3195 - DNA, 1000 bp, mus musculus
tttggctaatagtttgaggatatagaaggcacgacagtaggagattaaaggaactggtcgcactaaatctaatcaagaagcacagagtaaaagatattgttactcggtggtctttctctttttttccatggagtctgatgccgtgcatgtttttatcgggcggttcaataaaattaactaaatctagtgtctttcattgacattcccagagagttgtacctgtggtgattacaggtcagagtaaattgtcaatcaagattagccatcacttggcagagcctctcaagagatagctatatcaggctcctgtcagcaagcacttgttggcatccacaatagtgtctgggtttggagattgtatatgagatggatcaacaggtggggcagtctctggatggcctttccttcagtcactgctccacactttgtctctgtatttcctcccatgagtatttggttcccccttctaagaagcagtgaagcatccacactttggtcttccttcctcttgagcttcatgtgatctgtgaattgtatcttgagtattccgaacttttgggctaatatctacttatcagtgaatgcataccatgtgtgttcttctgtgacagggttaccttacttaggatgacattttctagttttatacatttgccttcatgaattcattttttaaaatagctgagcaatatttcattgtgtaaatgtaccacgttccgtatccacttctctgttgaggggcatctgggttctttccagattctggcttttataaataaggctgctatgaatgtagtggagcatgtgtccttattacatgttcttacccgcgttctcgcgaccggccaggaagaacgcaacaaaccagaatcttctgcggcaaaactttattgcttacatcttcaggagcaagagtgcaagagagagaaaaagaaagcaagaaaaagaacaagaacaagaaagcaagagaagagagagaaaaagcaagaacaagagagag

SEQ ID NO: 3196 - DNA, 1200 bp, mus musculus
tcttaaagtgatcactataagatagtgtggcaggcattgttattcttcgttaacagaaagctgaaaccaaggctttgagaacctgtgtcatttattagaatgcagtattctttgtagtacatcagtaacttctagcctgaacgatttctgcccacgccctctccctgaggggatctgaggagataataatgagaatctatgagtcattttcaatatttgaaaggagcctaacagagagtgttcatttactttcgataaattacacaacctgactaaaatgtcaagtttctttgcttttgcctgaaattatatccactcattttgataatactggatatcccatgctgatgggaaactgattggcagttttatatgtctctgatgaatagaaatggagaaactaaatttgaaatcataaatgttgttgatctaggtttttttcttaagttttagaaactggaggaaaagtaaaattcccctttgatgctaaaatgattgaagagagctacattacaccatgcttcccattctgactcatgatgattgcaagatgggagatgtataggaagtcatggtcagagggattttcaaagtttggcagcctaaggataaattgtttttatataataagcactcttgaaatgatggtgcatataacatattctttctgcctatgagataaggaaactgaagctcaaagcagagttgtaagggattgatcaaccttggcgatcaatagggtgacagatgttgcagcagagtatagggagggatccatggctccagttacatatgtagcagaggttgtcctggtctgacatcaatgggaggggaggcccttggtcctgtggaagtttcatgccctagcgtaggcagatgctgaagcagtgaggcaggagtgagtgagtgagtgagtgagtgagtgagagtagaagtaccctcacagaggcaaaggtaaggggggaggggtggatgggatggggatgctgtagaggggtaactgtgcagggggatatcatttgagatgtaaacgaatggaatgattaataataataaaaaaggaactcatcaaactaccagaatactagatagtggaacagatgaggattttattctagtgttgtggatcaatatttcatagcctcttgatctctatcacagagaaataaagccagttcatctttaggtcttcataatgtc

SEQ ID NO: 3197 - DNA, 1400 bp, mus musculus
tgagatttggtattataatttagttcaaaacccagcttggagaaagttatgaacctttacttctgcttttcccccatccatcatttgcatataaactttcatcccatatgtataaggagagtatttgcttcaaaaacaaagtctctcttttattgaggaaattaacaaaaacatgagatatgggcctatcgacagtaagttatcggttagggaggaggttatgtgtcctaagcccttctgctaaactattaaatatttgagggggttgaaaggaggaatacgttttccattgctgtaaagagataccttgaccaatgaaacataaaagggtagcatttatttggggctgggttactgattctgaggtgaagtccattctcataatgccaggaagcatggcagtatccagacatacatagcactggaggacccgagagttctatatcctctatatcctgttctttttttttattagattttgttttcatttacatttcaaatgctatcccgaaagtccactataccctcccctcaccctgctccccaacccacccactcctacttcctggccctggcgttcccctgtactagggcatatgatcttcgcaagaccaaggggcctctcctcccattgatggcctgatggccaactaggtcatcttctgctacatatgcagctagagacacaagctctggggggtactggttagttcatattgttgttcctcctatagggttgcagaccccttttagctctttaggtactatctctagttccttcactgggggccctgttttccatccactgtgagcatccacttctatatttgccaggcactggcatagcctcacaagaaatagctatatcagggtcctttcaacaaaatcttgctggcatattcaatagtgtctgggtttggtggttgtttatgggatggattctctgggtggggcagtctctggatgatccttccttctgtctctgctccaaactttgtctctgtaactccttccatgggtattttgttccccattctaagaaggaacgaagtatccatactttggtaaagacaaagagaagactggtttccaggcagctaggaggagggtctctcaaagcctactccccatagtgataaactttctccaaaaagaccacacctcctaatggtgctattccttggtccaagcatattcaaaacaccagaaagtgctactactatcttctgtggtatactctcttaccaactcccagtacattgttctaaacccactctcacatatttgatcctagttaaaaatcccccaaaataaagtgacagtaacagcaacatttattaatgtggtatgggtatatgcaatgaggatgagaagaccatagaaataggaagggcactgtg

SEQ ID NO: 3198 - DNA, 1200 bp, mus musculus
tctccattgtgcttcactttggtttttctttattgtgtctacttccctttttaggtcttggatggttttattcatttccatcacctgtttggatgtattttcctgtttttctttaaggaattctacctgtttggttgtgttttcctgtttttctttaaggacttgtaactctttagcattgttctcctgtatttctttaagtgagttattaaagtttttcttgatgtcctctaccatcatcatgagatatgcctttaaatccgggtctagcttttctggtgtgttggggtacccaggactggctgaggtgggagtgctggattctgatgatgctgagtggtcttggtttctgttagtaagattcttaagtctgcatttcgccatctggtaatctctggtgttcgttgttatagttgcctctggttggagcttgttcctttcatgattctgttagcctctaagagcagacctgggagactagatctcttctgagtttcagtggttagagcactctctccaggcaagctctcctcctgcagggaaggtgcacagatatctggcgttcggacttgcctcctggcagaagatgaaggcccgaaacagggcctgtcccagtgctgttagcttctgtagtccacactctcactgtgcagactagtctcggcaggatccaggaaccaatatggctccctcaagtgctctggtaaaactcttctgggcaggccggacacctctcctctggcagggaaggtgcccggatgtctggatcccgaaatggagcctgcctcagaagctctgtggctcctgcctctcccagaagctgttagcttctgtagtccacactcttacccatgcagactagtctcgatggggtctgggaaccaagatgtctcctgcagatgctctggcaatggcctgctaatcgcttttagaaacgctcctttgtgggttggattagagcaattttcttatcactataatcatcatctcctgggctgggcagacacctctcctctggcagggaaggtctccagatgtctggagcctgaaacggggtctgcctctgaagctctgtagctcccgcctctcccagaagctgtgagcttccgtctctttttttttaaaatcataccttgatgacagcaaattagataagagtttaacagtcaaatgttttataaaattcattagaaactgaca

SEQ ID NO: 3199 - DNA, 1000 bp, mus musculus
ctgctttcataaatgtgtaatggagaaatagcttaattgagaatagaagctgtcccatccttctagagtctaataatggtgtcttaatgctgttgccttaagcattaagttgtgggacaatagacctggtctggaaacttgcttggtaaggtagagaaggcctttgcttcaggagctgtggtctaaatctcccatagaaggcttctctgcacttccagacaaccaccaccaagctaagacagtcatggatgagctaaactggagctcccagccccagccccaggctagatgctgtccttagcccgcagaaccccaaaagtctaagcctcgttgtggcctgctgacccccaaccctttgttactgactcctctgtgtggttcccagtggttactgggtgctccagaggtcagggaataccagctttgactttcccacatctcaaacatcactttcccaccactggggccttgctcagcatgtccctgaagcccagcaccagacaagcagctgtgtggcatttttcttccccaatggccatgcccagcagcagggcagaatgcagtcccacattaagtttcaaccttaatactcaaattgtagcaccaaaccttagttgcagtcagacaagtcagtattcttagacgaggttgtggctctatagaagaccaagtgaatctgtggtggcttcataggtggttagcattatccacctatgtagggtaccaatattcaacctccttacaaaaacttatataaaggggctggagagatggctcagtggttaagagcattgactgctcttgcataggtcctgggtgcagttcccagcaacaacatggtggtggctcacaaccatctgtgatgggatctgatgccctcttctggtgtgtctaaaggcagctacaatatacttatatatacacaataataagaagaatcttttaaaaaatgaaacattaaaaaaataaaaacaaaaacatatatataatgatatatcat

SEQ ID NO: 3200 - DNA, 1000 bp, mus musculus
aaaacctggggacctgagttcaatcctgtggcccacatgtggaaggagagaactaattcctccaaagacgccctctgacttccacacatacgctgtggcacaaggcatccaataagcaaaagaatcatgagtagatagaaaaaccatgggataagatggttactacacagataattagagagtgcatctactggatgtatgaaattgcatatatccttaagaaacagaggtaggcaaccaaggggaaattgagcaaaagactgatgagtcttccctaaaaagagggaaaatatgtaactaatagatatattaaaagtgtttaatcacattagagtttgaaatgagcttgcattagaggtgaaatccaagtcagatgaggagggcaatccataggatttaaaaatcctgatgtttgaaaatatgtaactgcatgaccattctaaagtatataatcagagacttataccatgaccactataagccaggcactattctgggttctcaggtgatatcaatgagcaaagaccctaggaacttagagatggctggaaccaatagagggacacggatctctgtgagtttgaggcctgatttatacagtgagtttcagactagccgaagcttcagaataagaccatgtctgaaacaaaaccaaccaacaaacaaccccaaccaaacaaataagcaaaaccggtggcgcttccttggtgcttaacaccacacaaattggatcctgccaacctcatctccaagtctgtgtgctgccgtctgcaaaaacttaagagaagagaaagagactgaagtgaaaaggtgaaggcatgagccctcgtggaaatcagagggatgactccataggaacacggtggagaacttccagtcagcgagcgagcgaggaaatctatgttgagtgacaactttataaacataacaattagcaacacaatcccaaaagacaatgacttactaaacggtaacaagaggcggaattagtaatcagcta

SEQ ID NO: 3201 - DNA, 1000 bp, mus musculus; identical to SEQ ID NO: 3200

SEQ ID NO: 3202 - DNA, 1000 bp, mus musculus
cacctgggcacatctaaaagggtatttctagaaaggcttaactgagggaaaaacataccccaatggatgccaccatcccataggctgtgatggttagctttttttccactttacacaaataaattcagatgggaagaggagacctcatttgcggaattctatcagctggcctatgggcctgtctatggggcattttcttcattgctgagcatgaggaggtggtcctggattgcataagaaagcaagctgagcatggtatatggagcaagccagtaagcagcaccctttatggcctctgcaacagttcctgcctccaggatcctgtcctgcctgagttcctgccctgaattctctcagtgataggaggctaaaataaactcctttctcccaaagttgcttttggtaatggtatttatcatagcaacagagaagcaaactaatacatctgggtcttgaagtgaatggaaaggagaaagcaagctaagaaacattgcttacagcttttttttttctgactgtagccacagtgtcaccagctagcacatgtctctctaccataccatgacttccctgtcatggtaaactgtacccttaaactgtgaaccaaaagtaaccctagctgctcccttaagttgcttcctttcaagcatttggtcacaacaagaagaagaaactaataaggaagcattggaatgtaaaactcaggaggatagcaaccataagtagagtacaggcaacataagggtcaaaataattttactgaggaaaagaagttgggaaagaaagcatgtgcattttgagttcccacacatttgattctaaaaccctgaaaagagaaaatatatatatatttttaattatcccaggattgagggacgtgtagaggtttgagggaaggatcaacaagaaatgttgggagtgtgaaagctaagtccgtttccctgactatgatggttcgttcatggttgtatgcatgggtctaaacttgggaaatgtattt

SEQ ID NO: 3203 - DNA, 1400 bp, mus musculus
gtactgaccagtttcaacactctaaatagtcagactcgcagttttgcaaatcaaactctatctgtacactgggaaaatgttgaactgctttgtcactatgaagatctacgtacaagccactttggacatgtgattttcatttctcttgtatgaatgcaaaagaataaatttgctgggtcatataagaatatatttaaccttataagtaacactagaagcatttgctgaagtgattgtattatattacatttccaccaacagtttatacatttttttaacttactgacttactgggtatgtaatgcaggacttacatagcatcaggatttttcctttttctttcttttctctctctttttccaactggatattttttatttacattccaaatgttatcctctttccaggtttcccctccacaaaccccctatcccatgccccctgcccctgcttctatgagggtgctcacccacacactcctacctccccgccctggcttttccctacactggggcatcaagccttcacagaaccaagggcctctcttcccattgatgcgctacaatgccatgctctgttacatatgcagctggagccacgggtccctctttagttggtggttgagtccctgggaactctgggggttctggttggttgatattgttcttcctatggggttccaataaccttcagctccttcagtctttcccctaactcttccattgaggtccttgtgctcagtctgatggttgactgcaagtatctgcttctgtatttgttaggctctggcagagcctctcaggagacagttttatcatgctcctgtcagcacgcacatcttggcatccacaatagtgtctggttttgatgtctgcatatgggatggatccccaggtggggcagtctctggatggtcttttcatcagtctctgctccacactttgtctctattttgttcccccttctaagaaggatggaagtatccacactttggtcttccttcttcttgagcttcatgtggtttgtgaaccgtatcttgggtattctgagcttctaggctaatatccacttatcagtgagtgcataccatgtgtgttcttttgtgattgggttacctcactcggcatgacattttctatttccatccatttgccaaaaattccataaatacatcgtttttaatagctgtactaatagtttttaatagtagtactccattgtgtaaatttaccacattttctgtatccattcctctgttgaaggacatctgggttctttccagcttctggctattataaataagatcagagtcacatcatgtagccccgcctggactagaacttgctgcataggctaagttggccttgaactcacagagatccacttgactctgcctctct

SEQ ID NO: 3204 - DNA, 1200 bp, mus musculus
tggataccctgatgcacaggtagagtttcgaggtcaacttaacaggagttcattttcttcttccaccatgtgggtgatagagattaaattctagtcattagggttagaggaaagcgcccttacctgctgagccacttctctggcccttacactgatatttctaagtgttttcttttagtgtggtggttctcaaccttcccaatgctgtgacctttaatacatatccccatgttgtggtgacccgtaaccatacaattattttgttactacttcttaactgtacctttgatactgttatgaatcaaatataaatattgtgttttcccatggacttgggagactcccgtgtaaaggttgtttaaattcccaaaagagtcatgacccacaggctgagaaacacggtcctagaagtttccttctttaaacacatttatattattttctcaagaacttcatacatggtattttgagcatttttcaccttcatctcctcccatatgtacctttactccataaacacccaactttatgttaaaaaattttaaaacacattagtgctatctatatacttttaggtggatggtcatccaataaaatacattagacttgtcagggtctgcacccttgaagaaaactcactctttcttttctcccctggcatctatcaactaccaaaaattctttagctagggatgcagctttacagtcaagtcctccttccatgctgagattttctcttgctgcatgctgtcacacctgctgggaatttggatgcacaaatgtcctattgtgtcaggaaaacactgtttccttgtactcacccagggcccctggctcttattctcctacctcttctgcaataaaccttgatctttgggaggaagaggtgtgatacagatgtcccacttagggctgagcactctgcagtctccctattctctttactttgactagttatgggtctctgtgttaatttccatctattgcctaaaagagaagcttttctgatgaggtttcatatatatgcctagctatgggtacagcaaccagtcattattagttggtttattactatgtctcattaccagagtactagttgtaggtgctgcttcagggcttatgatttgtcaaactataggttcttgactctgataactatatctgtgactctgataactatatctgttatggcctctatct

SEQ ID NO: 3205 - DNA, 1200 bp, mus musculus
tcccacactcctttccctttcttctctgaacatgtggtagctcccttgaatattcctccccaccctggcacaacaagtctctgcaaggctaggtgcttcctctcccactgaggccagagaaatcagccgagctagaagaacatatcttacatacaggccacagcttttgggaaagccccgttccagttgttcaggacccactgcagatctgctacatatgtgcaggaggcctagttccagcctgtgtatgtcctttggttggtgattcagtctctgagagccccaggggtacaagatagttgattctgttggtcttcccgtggagttcctatccctttaggagctgcaatccttcctcctatttttccataagagtccacaagctttatccgctgtttggctgtgggtttatgtctgtctgtgtcacttgacaggtcaggcctctcagaggacaataacgttggtgcttgcccatgggttggtgcttgcccataggttggtgcttgcccatggggtggttctcagatgaggtggttattgattggctgcaaccccagtctctgttccatactcaatccctaaatttcttgtagacaggttaaattttgggtcgaaagttttgtgggtggtttggtaactatctcgtcaccagggttcccacctggccacgggaggcaggctcttccggttccatattcctaattctatgaggcacagctaagggctcctctattgattcttggatgcctcccaatcccaggtctccgtctcttcctagagatgtaccccacctctatcccagcctcttggagatttccattcattctcatagccacacagccatgttccttgccacctcccattctcctcccaaccacctccctacccacttccctccctacatctgccttccacatccattccattcccccttccaagtgaggctcaagcatcctttcttgtgccctccctcctgtccagcttctttgggtctgtggagtatagtatgggtatcctgtattttatgactaatatcaatttataagtgagtacatatggtgtgtgtcctttagggactgggttacctcacttaagatgatattttcaagttccataaattaacctgcaaaattcatgatctttgtagttgaataatataacattgtataaatgtaccacgttttctttatctattattga

SEQ ID NO: 3206 - DNA, 1200 bp, mus musculus
aggactttttaatctataaattataggaagatgttatgaaacctatcatttgtgggaagtgacattttccactctattcgaaggatttctaattttttattatttatttattcactttatatcctgcccactgcccccttccagtctactcctcccacaattcccccttctcctctgagcaggtgggaccccctgggtattcctctgtctctgcaaggctaggcacttcctctcccactgaggccaaacaaggtagcccagctagaagaacatatcccaaagactggcaacagcttttggaatagcaccgccccctccagttgttggggaccaacatgaaggtcaatctgctacatatgtatgggatacctaggtctatcccatatatgttctttggttggtggttcagtctctgagagccccaagggtccaggttagttgactctgttggtcttcctgtggagttcctttttaaaatttcttagagtactcattctgcttggggaataatgtaatttgggggtgggtgggtgttagcattctgtctaaactccaccccacagttacctggcaacagccaggtatgctcctccccacagttacctggcaacagctaggtaggcctgattcattataaaaggggttgtttgacccttcctccctctcttgccctcttgtttctctcttgctcttctcttcttgctccttccctgtcccctagccccttcccccttcttccccattcccttcccctctctctccatgtgctcatggccagcctctaccctctagttctctactctctctgtgtctctgtctctctctctctctgtctctctctctgtctctctgtctctctctgtctcactctctgcctttctctgcctctactaccctcttaactccccttccatggcctgaataaactctattctatatgataccattgtgtgactggtccctcagaggtaagggatgccttggcatgggcctgttgagacatgcccttcccccatacctcaccacacccccatagacaatattcttctctctttatctttatataaacacatcagtgagaatatttgtttgtttgtttgtttgttgtttgtttcttatattaaactatttcggtataaatatttcacttagaggtctttctattttttttttccattttttattaggtatttagctcat

SEQ ID NO: 3207 - DNA, 1200 bp, mus musculus
gactcttgatgtcattcttctataccaggggctcgctcacaagggcatttgaccacagagttcttgaaatctctattaagttcttaaccttggctctgttgaagccacattcttggggtctgatttgggatgacagaaggtatgtgcacaaagaacgagggaatgacgtgttagcctaaggtatggaggcagaaaaccttttagcgattgtcatgcttttcaccaaaaccacatttaaaccttagccaggagcaagcactcactgcgaattctgtctgcctggcgaatctgctggagagctttctgaatgctctggctgtctcgtcccgaggtcaggacgacccctacaggtaggccctggctccgaagagcacttgagactcgattggctgtatgcatccaaatgtcttcatctgaggaaatgaccccagcatgtgcccactggaaatacttcatgacggttacaagcacccgtatcggagaagggagtgtccgagagaaggttgggaagctatgtttgttatctaattcatgattcacacaagcccaagagaaaatccctttgtcccagctggttcccaggagtgaggctgcctcgcagaagccagggttggcaggcccaacaaatcctgaggccatctgctggtgggaaatgaaactggcgagggcctttgaagtctgacagtcttcgttaagaatcacgtattcgaaggagtaactcctgtcaaatgtcttgtcccggctgattcgctcaattgctaaagcagcagcaacctcaggcagggccttggaaaagaacggatcacatgtccagggacctatgaccccgatcttgtaggggagtgcttgcccccaccgaaggagaggcaaaagggccaagaggcacaaacatctcaggaacttggaggaagggaggccatgctgtcctgacagtctgctggaaatggcaaaccaggacagaaggcgagaaaaaggccagggtccgaggaacatagcctcgctgccttccagcaaactagtgatgaaatactggagaattactctgcactctgaagacggacagtggtgtttccgagttcctgtcaagcagagggaatcatatgttacactgtttctggagtttctaggggaaaaaaaacacatcgcttttgaaacaatgcagtctcccaaggtgaaactttccgttgcccaccccaacca

SEQ ID NO: 3208 - DNA, 1200 bp, mus musculus
agaacttgtaaagctcatctcttttcattatggtagaccccaaattacattttcaatgtcttttataggaaccaaatctagtcaaatctttttgctttaattgtggtcatttgtgttggttagggaaccatctgcctgttctttatcttcatatttgttgccataagtttcagtatgtagtactcatgatcatttgaagaatgtgtctttatgtcgtcatgctttgttggttgaacttaatcttgtatgttttctgtgagctcggctgtatttaaatttgttcagcaagtacattatcattttttttttattgctatgtagaataaagtcttggatttttctcatccttcctatcttcctttaactaccactatgttattccacaggtcaaacacctcagtgtacacagataggctctgctgtaggctcactaacaagccctctctacttatttcttatttctccgctggtgctttgctctagcagtcgtttgtaagtctgctaccttctcagctaaacagagcatggcctgttctttgcagagatatgcctggtcactgcttcaaaagggttatgatgtgtacagcaagctgcatagttccacgctgggctggggctgacagttcttttggtgatggagagaggacaggattctccatgggggtttcacggtctatttcacaggggagaacgaaagcttgccagtgtcccagctgggttctgaccatgtcatttatgtgcacctttgctgacatgtgacttgctaagtgctgctactggagcctgctgctagaaaggctgcctcagcagaaaccctgtgtctgagatgtcgtgctagaattagcagggtttctacgtggctcaccacacagcaaccttgggcacggtggtcttatgaactccagtctcaccaacttctggaattccatcctggtagctttctgcttctgaaagcccccaatctccatattcctacgcacccttctctatggatgctcaactagcaacccagcattgtttgttttattgtatttatacatgcaaggctgttctttatctctttgaatctgagacacattcctttgccaatttagaatggctttttccttaggagcagtctactagtactttctctggccaccctatagaatacattttctcatacaggtttgactaaaatcaatacattctgccctatgt

SEQ ID NO: 3209 - DNA, 1000 bp, mus musculus
cctctcttaaggaaatgcttttatgagatccagctgtaaggcattttttcaattagtgatcaagggtgggagaacccattgtgggtgggttctataagaaagcaagctgagcaaggcaggggaagcaagccagtaaagaacatccctccatggcctctgcatcagctcctatttcctgacctgcttgagttccagtcctgacttccttggtgatgaacagcagcatggaagtgtaagccaaataaaccctttcctccccaacttgcttcttggtcatgatgtttgtgcaggaatagaaatcttgactaagacagttatgttacttggggagattatactccccccaagagccaaagattaccaacaggcaggcaacagaatcagagtaacccctgataagttgatgggggacccacaggaagattgagctgcttatctgctatatatgtgtggggatggggactaggtccagccagtatatgttatttggttggtgggtcagtctctaagaggttagttgtctttgttggttttcttgtggagtccctatctattccatctgggttcctcaatcctttgcccaactcttccacaagacttcctgagctccttctaatgtttggctgtgggtctctgcatttggttcagtcagctgctgggtggattctctcagaggacagttatgctaggttcctctctgcaagcatagcagagtatcaatagtgtcaggggattgcctcttgctcatgggatggatctcaagttgagccatcattggttggccattccctcagcctttgctccgtatcttctatatatgatgtggaactccacccatataatcgtagcaatgttgttacctattgggcctgcacaatgatgacactagttgatataccaatgtgtgtgtagggggaaatcacaagttcccatctctagatgaaaagctgagaggggggatgagtattcccttgaccggttatacagttccgagccgtca

SEQ ID NO: 3210 - DNA, 1000 bp, mus musculus
tgccaaggcagtttaccccacctttcttgaaactggtgtgtgtataaaaagccttcatgattttgtaatgtaaaaacagcagaaatcacttcacaaatcaggtacacagaagtaaggaggagacatcaaagcatgccagtgttaaaacagctaagaaattgtagctgagggccactaacaatcaacatctaagcttgaatcaactcaaagttgtaaaaagtttatgccaatggctggactgaaaaaaaaagtaattggaaaaaaggaaaatgaaaaaaaaaagcttgtgtcacttgaccattttgatcatcagcataggattttaagggactgtgaattgctcactcagagactgtgcatggacagcagaaagtagagttccactgtgggaatatcaagggagcttacacattcacatacgtatattgaaagtcattaatgtcttcgtttacttgaattttggtaaattgtcttattagcctttagagaggctttctctttgcttggtaaatttgagtgaatacatgagaggggaagactgtgtctgagatgatagactcctggtgtgtaccagactggcattagacatgtcctcccttacctcctgtttatcgctgctttctccataggagctgtgaaatcagctgcaactgaaaatgtctgacagcttggataacgaagaaaaacccccagctcccccactgaggatgaacagtaacaaccgagactcttcagcactcaaccacagctccaaaccactgcccatggccccggaagagaagaataagaaagccaggcttcgctctatcttcccaggaggaggggataaaagtaaagtatcaggggccgggagttcaaagggggacagtttattctttgattagcactttcttgctttcatagtctattctggagcccgggatgctccaggcttgcttgacctttcaccttgagatgttgccatttgttagaggatcatgtgtgattgacttcctgtgtg

SEQ ID NO: 3211 - DNA, 1000 bp, mus musculus
ctatgttcatagcagccttatttataatagccagaagctggaaagaacccagatgcccctcaacagtgcaatggatgcagtttctttcttatgcgtgttcgcaaccggccaggaaagatgcaacaagccagaatcttctgcggcaaagctttattgcttactcaggagcaagagaggaagagcgcggcagagagaggcagagaggaagagagagagagaagcacagagaagcacagagaagcagagagagaggcagagagggagagaggcagagagcagaggaagagagcagaggaaaagacgaagagaaagagacgaagagagggagtgccagaaccccgtcccttttaaggagaattatcctccgcctaggacgtgtcactccctgattggctgcagcccattggcccagttgtcatcacgagaaaagcagagcacatggcgggaaaactgcccctgcacatgtgcagattatttactacttagaacacagctgtcagcgccatcttgtaatggcaaatgtgagtgcggctccccacatttcttgtcgattctgtggacttaggctgagtggctgcgtgatttcagctgctaaggcaagatatgtgctgacccatggatgacacatgaagattggagggaatataaataggactagatggccaatgaaggaggctaagctgggcttgcatacagagctagctatgcaatgcttgttggtctagactcttcactgatctttgctttgctgagagagacatagccaagaacttttcctgttttccctggtccctcctgctgacttgtgctgaggcctggctgtctctgctaggtatccaccactgctgattcttgtttctcttccaactctactgaattggactgctggtgtatctgtgaagtgtttgcaagaagactgagctgcccctgctaaacagtgaaatgaactgctgatttccagacagcacagatgggagttgctccaaagaatctttataaa

SEQ ID NO: 3212 - DNA, 1200 bp, mus musculus
agatattttcttcatttaaatttcaaattctattcccaaagtcccctgtacactccccctgccctgctcccaaatccacccactcccacttactggccctgccattcttctgtactggggcatatgatcttcccaagaccaagggcctctcctcccaatgatggccgactaggccatattctgctacacatgcagttagagacacaaggtctgggtatactggttagttcatattgttgttcctcctatagggttgcagaccccttcatttccttgggtactttctctagctcctccattgggagccctgtgttccatctaataaatgactgtgagtattcacttctgtatttgtcaggcgctggcatagcctcagaatagatagctatattagggtcctgtcagcaaaatcttgctggcatatgcaataatgtttgggtttggtggctgattatgggatggatccccggggggggggtactctctggatggtccttccttccacctcagctccaaactttgtctctgtaactccttccttgggtattatgttccccattctaaggaagaatgaagtctccacactttggtctcattcatcttgagtttcgtgtgttttgcaaattgtatcttgcatattataagtttctgggctaatatccaattatcagtgagtacatactatgcgttttcttttgtgactgggttaccttactcagaatgatatcctccaggtctatccatttgactaagaatttcatgaattcattgtttttaatagctgagtagtactccattgtgtaaatgtatcacattttctgtatccattcctctgttgagggacatctgagttctttccagcttctggctattataaattaggctgctatgaatatagtggagcatgtgtccttattaccagttaaaacatcttctgagtataggtccaggagaggtattgctgaatcttctggtagggagaacgaagattttcaacttaaacggccaggaaatatcttcaacaaaattagagaagaacctaacctaaagaaaaggatgcccaagaacatacaagaagcctacagaactccaaataggctagaccagaaaagaaattcctcctgactcataataatcaaaacaacaaatgcactaaatagagatagaatattaaaagcagtaagggaaaaaggtcaagta

SEQ ID NO: 3213 - DNA, 1000 bp, mus musculus
tcagctaagacatctctctttatcagagacctaagggcacataaatctccattatgacctcctttctaagtcctcacttgagagagctgatcctgtgacacagcactccatacccaaatacagccaggagggagctgatttcctaggagtgaggacacgcctgttggcacagataagaccaccacttctgttgaaattcctggcccaagagggaccctcccagagccatcaggacacaggaaccaaggaacagcccaagacaggatccttctggtttctgtcttcactctggagcagaccctgtgccatagctctccatacccaaattcctcccggagagaactagtctcccaggagtactgatatacaggcttgcatgagggacaagtcacagtcagagacaacaagaacggctaacatcagagataactggatagcaagaggcaagggcaagaacataaacaacccaaagcaatgatacttggcatcatcagaacccagttccgctgagccctggataccccaacacaacaggaaagcaagattctgatttaaaatcacatctcacaattatgatagatgattttaagtaggacataaataattcccttaaagaaacacagaagaacacaggtaaacaggcagaagcccttaaagaagaaacccaaagttctcacttgaatgagaagaacttggacagggaaaggtataatgagatgttcctgatatactcatgctggataaatgataaacaaaatgaatgagtaggctaatgtggaatattaaagtggttagtggggtgaggggacggcagtgtggctagaaacttttcatgaactctctgtctcatggataaggattggtgatggtgacatggggtagtatgatgatcagagctgaaagaccaggcacacattcatagctatgctccagctctccttaactctgagcttggtgttttgtccaaatggacatgtgaagacatttgtgaaggctgagc

SEQ ID NO: 3214 - DNA, 1000 bp, mus musculus
tggcacctttcctgtactttgaagtatcaatgatctttgcctctgcttgttctccttccactgtttcccactgatctctctgtctctttcttcccttatgtttgttgctactgagactaccctattagatattttttcttcctaagagagagggaagagtatgtcaaatttagctcctattctatgggtagtgaaacaagcataaacagagagtcttatagaatctatattactagctcttagtactttcatgttgtttacttatttggaggttcttggtggagttgctgagcctattacccattaggatacagtcaatcacagctctatttttttttaaaatataaggctttttcaaataattaatttttaaggcctggagacatggttcaacaggtaagaacacttactgttcttgtacaggacccaggtttaattctttatagtcacaccaagtaactcccatccacctgggcatctgatattctctggcgtttttgctgcacttccatacacgtagtgcatgtagacttatgcagctttataaacataagcaaaaaataagttaatacatatgagtctgtgcatacacacatacacacacatatatacacacatacacacacacatatatacatacatatacatacacaatacatacacacacacaaacacacacacaccacacacacacacacacacacacacacacacacacacacacacacacacatatcagaaacaggacctagagatcttgagctggatttgatgaggactagcttccttggttagcagaaggtgcaatgcaagctttcaaaggagggaaacaaccaacagtctttctcagctacaatgactatggatcacaaatagcaacagccaggatggcatgataacctcaagttaatgtacaagtgcagtagtgacacacataccttggtgatagttaatagttctctaattggatttaaggcctactcaaggaaagtggaatcat

SEQ ID NO: 3215 - DNA, 1000 bp, mus musculus
aaaagaattgcaacaacagcaatgggaaaataactcagcagcaaaagataagtcacaaagcagtagataagataaatagctctctggaactgactggcgtgacagtttagatgaaataaactccagaatcaatgaaagactctgtggacattatcagaggaagacatgccacatagatcccatttttcgatatgcatgcatatagtcatgcacacacccatgaacacgtaaatatacatacaccccacatacacaagtatgcagtaatttggcattgaaatgtaaatagaatattgaatggactaatttacagagggtgaaaatttgaactaagttttcatgattagtttaatgttctaggtaatatggcatgatgtgcatgttaaattattcccaggatcatccaattctctattaaaaaaaaatcagtaatacagcaatgagacattttcatacctaaataacccattccttttacagtatctaaattccaatgtgataaaatgtggacatctttttttttttaatctgctagtttttctttttaaaattaagacaatcatttcacatcccaggctttctctttcctcactcaaatctcctccatgcctttcttaacatctcacccattgatagccttttttttttcttccttattattgttaatcgcacagaagcttctgttgttatgagagatttacaacaggaagctttcatcccattaccagactaaattgatttgtttttgtattgtgattagagcatacaataattccatcaataggatcttaacatctagttctggttgggcagcaaaaccagtattgtctctactgacctgatgacctcagggaacttctaggccatccagccctaggaaggttgcccaagcctggaactgggattcatatttaataacctaatacttctggaagcagtattatctgtctatacagagtacctcctctcaaactgtaaattagtttactaatcatcatat

SEQ ID NO: 3216 - DNA, 1200 bp, mus musculus
gatgatgttcttaagtaaattataataatttgttaaatattatcgaagttacataacaaattgtgaggctgtgaactgtgcacagatagtccggcctccagttgagcacaggcctgaaacccttgagacctggtgagtggtgacttctgccttcatgggacagtaggagtttggccatacctcctgggaccctggatcctgtccctgctacagccctccacaaccccctgcaaagaggtgtgtggccatcagtcacataggcaatacccgaagctcctggtattctgtctgaatcccaaccccacagttacctggcaacaacaaggtagcccagccacagcctgctataaaaggagctgcttgtaccccctcactcccttacctcttattctcttgctcattactccccctcactctgccttccctttccccctcttttcaagtagccatggccagcctctacttctgtacacttctacctctctctgtctttctataataaacaccttaaaaccatggaccttctcttctcatcagatccactcggctggagcaatggagcaggtttccctctaaggaacctcacctctaacctccagtcaggaagcctccctgtgctccagccaaggccaccaccaaccctagtcgccagctgagcaagcagcctgagctagccagacgcttgatcccactgtaaccagctggagttcttcttcaaaccttttcccttctgcccctgggccagagtccacctaagggtccccactttgttctcagctcttctgtgacataaagaggcacctgggatatctgagagtgagaacctgatgttcctggtctccgtgtgtctcagggaccccagaaccagctcttctgtggtgcccagcagtctgtggtgcccaagagtggctcttgcagttccgcgggggtcccagactgtgccctttcctcacccccagagcaggatcccaaggcttccaacagtccaacgcccacctgatggttctgtgggggttacttgcagtcagactccctgcgtccgcccagtggccctgccccaatcagacacaggactccattttttgccccataacaaatatgttgataaacaataatgatcagcactttgattactattggagaagcagaacacaggccatcaacttgaaccaagaatttgacttttagtcttttgtttta

SEQ ID NO: 3217 - DNA, 1000 bp, mus musculus
agttattaatacctttcttaaaatcctctaccagcatcatgagatatgattttaaatctgaatcttgcttttttggtgttttgaggtatccaggtcccgctgtggtgggcgtactaggttctgatgatgctgagtggtcttggtttctgttagtaatattccactgtttgccttttgctatctggtaatctctggtgttagatgttctagctgtctctggctggatcttgttcctcctgtgattctgttagcctctgtcagcagtcctgggagaccaactctcttctgactcccagtggtcaattcagtctctgcaggcaagctctcctcttatagggaaggtccccatatgtctgggtctcagctctgcctcctggctgaggatggaggccagaagagaccctgtccaagaagctctgttgcttctgaggcctcagtgctttcctgcgtggactggtctctgagagactcaggatacaagatggtgctcttacctgattcctggggtcagagccctttctgggggccgactttcctcagtgatcctaagatcttgagtgtgctatggaagctgcagagtagagtcctctggggaccatgggatcaactgctgtgttcatgcccaaggttgtgtgggtctggccctgaccagaatgaaccccagccactggtcttgtgtgttttctgtgtccctgttcctactggcagtagttttggaacagatgttgagttccactcaccagtgatcctaaggtcttgggtttgctagggtgcttatggtgtggagagtcctctggggagtgtgcaactgtctgccaagtttgtgtccaaggtggcgtggggatggcactgacaggaacctgtactgtatttttaacgtgaaatattctggcaattacgtttttctcatagtttggaaaagaattattgaactttcataatcatacattcatttggcatttacacttacctttatggactcaaacatcaatacaatact

SEQ ID NO: 3218 - DNA, 1200 bp, mus musculus
ccaccaggaagtgcaactccaatgaaagctcatgagggtctttattcaagctggagcttgggccatcaaccttcctaatgcaacaggataggaaaatcgatggtgtggtctaggggaagaggtttttaaaggaaaaaaaaaagcagctgggcatggtagtgcatgcctttaatcccagcactcgggaggcagaggcaggtggatttctgagttcgaagccagcctggtctacagagtgagtttcaggatagccacagtcaggaaaaattcccacatactctctgggtagaaataaaccagtgataacattatgcagaatagttcgatttcaatagcaaagtaaaataggaaaattttcagaataaatcagaaaagattagagtccactccggaaacattgacatggtttggaaacttttgtctgttcaatgagagagttcaacagacagatggattcacagctaactccagagaattggtattttacattcagtgatgaacactttaaacaacagaaatagaagaggcaggcaaaagttgtgcacaacagcagcaggatagacactcttcttggaaactagaataaaggaaagaaaccatctttaaaaagacctctacctgctttatcaggctcctgtcagcaagctcttgttagcatccacaatagcttgttgacaggagcctgataaagctgtctcttgagaggctctgccagtgtctgacaaatacagaagtggatgctcatagccatccattggacggggcacagggtccccaatgaaggagttaaagaaagtacccaggaagctgaaggagtttgcagccctatagcaggaacaacaatatgaaccaaccagtaacccccgagctccctgggactaaaccaccaaagaaaacacatggtgggacacatggctctagctgcatatgtatcagaggatggcctagtcggtcatcaatgggaggagaggtccttggtcatatgaagatgctatgccctagtataggggaatgccaggggcaggaagccaagtgggtgggttggggagcaggggggagggaaggggatgggggattttcggagggaaaactaagaaagaggataacatttcaaatgtaaataaagaaaatgtctaataaaaaagaggggacctctacaggaagggagggtgatattgagacataaagctaataaataaa

SEQ ID NO: 3219 - DNA, 1200 bp, mus musculus
tgttggtgatactgacatctgtaattcctgacctttttttaggttctacatttccaggtttgcctccatttgtgttttcattattgtttctatttccacttttaggtcttggactgctttattcaattccttcaccttttttattgtgttttcctgcatttatttacaggatttatttgtttcctattttagagcttcaatctatctactagtgtttttctgtatttctcttagtgagatatttatatcctccttaaagggtactattatcttcatgagataggatttaagtcagcttcttgattttcaggtgtgctggtgttttaccagctttctgtggtgggagaactgagttctgaaggttcccatctatattggcttctcttgcttatggttttgcgcttgtctctcaccatgttgttatctctggtgtttgctggtctgggtgactctgcctggagtctgcctctcttcagaggggcagagaagctgctgatttgttgccctggctgcagtagatctcctggcaggcattcaaattgttgggtcttctgttgtcccgagtgaagatgttctccaggggccctacagactgtggtttctgtttccctgggtgaagtagaacttcggggaggctttcattctgtcggacaagttgccctgaattccacagagcccaagggaagtctccaaaccatggttgcctattttccctgtgtacagagaagctcctgggatgcctcaggctgtggtgtcagattcccaactgctctgagtgcagaggatcttctgggatggctcatgatatggtgtcaactgatctgagtacaacgggttatctagaatagctcaggatatgatgtcttcataggagcagaccagctagcagtctgccccagcagaaaggacagggttgaaggggtggaaagggagtggtattcagtggacagggattttgttgggggatgtatccctagtccaccaggctcccagtaggctgctctgggacttggggggaggggttcatacaaactgctctgagtgcagagcatccactaggatagatcaggatatgctgtcttcacagaagcagaccaggtaggagtctgtcccagaagaaaggagatttctttctcttttaaagctaaaaaaatatactactgtatatttatattaaatttaacacacatttagctataa

SEQ ID NO: 3220 - DNA, 1600 bp, mus musculus
gagttcttaccagtgaggcatcacacaatagactcataaatactgtagggaattgccagtattcttagatgtacttggtaagaccccattgctcagtacaccacatatgaagcttcatcttcacttgctgaaagctattatggtatcagaagagaaaagtaatcttcagtcttactcagctgtgaatcctgggacctacagtaataacttgccttccaacatatgtccattagtgcaatagtggcacaaatatcatgggagcaaaacaagcatttcctgaatacatggaagcagtatttcataggtcaaagaatgtatggctagacaggtagtggctcttagaaagaatctattataaatattttgctaagtatacatttgcctctgtgtgtgtgtgtgtgtctctgtgtgtgtgtaatatagattctcctcgatgttatgtggatatcatcatctcatgtaacaacaaaggaacttatttggtggatctaatgtggaagattcagatgctggcctggaaatctctctgtgtgcatgtcactatcttccatgagcacccatggaagctatgctttatgtctattactgcagaggctcccaggtgattctactgagaaggctgtgaccaaggaagaatttcagggcaaatggactaggccagctcctgcattttcactgctgtttaagcagaggtggcaggctggtcagaaggtatgtagatgccctctgtatccatctagcagttctctgctgaagactggagtgcccaagcagccaccaaggactggtcagcatctcccacagcacaggtcaccaaataggttggaattaccacttagtggtcctaagttgctctgcagacacctgaacaaagacagaatagtgtatacaataaataatttctgaaaatcctggggaaaattatctggtaaatctcatctggagagtttagaattagcttttactgtctgccctccccccccgcctgacacatacacatacacaattgttgtatactaattgttcagggcactttatattattctatttatttttcttcatttgttatggagactatacttttatattactctgaaaagtatttatttactttgaaacagataagtttctgattaccaggactttggataactgtggtgtcttatattttgttaaggtgcaattctgaaaatctcagtatgttttcaaatctcccacaaacatgaaaaaaatgacaatacatcttctaaaagcttctcatgagaattaaaatttttctttctatgtttcataatgagattttaccttaggctttatcctatgtcagtccttcttaaataatttcaatagactacttctttttactcaacacattttttgtaacctttgacatatagatatgtaaaataggtaagcagattcaacatctacttagaagatataaaaactaactttatttatttatagccttgaatttgtccctgaagctcacctcaaaaatcacacagatttatctccttctgcctcccaacttcaggaatcaaaagtatgaggcaccatacttggcatgaaatttgtttaaaacaattgcttactatac

SEQ ID NO: 3221 - DNA, 1400 bp, mus musculus
gccagtagcccagcacagacttgggagttgatactgtaaccttgactcttctcgttgagcaggttttaagctcaaaaaccataatcaatatgtggaagatagcatcacaagatcaaaacccataagcaggtgggcaacttaagattccataagagggaatatcaggttaatgataggcttctgagtcttgggatggttttgtaattcaatcctagaagagggagggagggagggagggagggagggagggagggagggagggagggagggagagaaggagagagagagggagagaaggagagagagggagagaggggagagagagagagagagagagagagagagagagagagagagagagagagagagagagaacgaacctgctgtaccttaaatgatgctcaagcaccagcaaatggatgactggcttaagatggcagtgctctccatgtatactctttggttggcagtttagtccctatgaactctaggtggtccagttaattgatattgttgttcttcctatggggttgcaaaccccttcagcagcttcagtccttcccctactcttccattagggtccctgggctcaatccaatgcttgcctgggagtatctgcatctatattagtcaggttctggcaaagcctttgagaacagctatatcaggctcctgtcagcaagagcttcatggcatcagcgatagtgtcagggtttagtatctgaagattggatggatccctaggttggtgagtctctggaaggccttcagtctctgctccatttttttgtgccctcacttcctttagacaggaacaatcctggattaaaaattgtgagataggtgggtggccctatctctcatttgggtcctgtgcctctctactggaggtggtttctacacgttctaactccccactgttgggtatttcagctaatgtcatccccactgggtcttgggatactcacaaattccagggatctaggactttccagtggcttccctctggctccctcgttccccaaaccccactgctcatatttctattcatttccctgactttctagacttctctagtgtctcttcccatacatgatcctgcctcccccctttccctgcccctcttccctcccgccctccatctgcctcccataattatgttttatcacccttctatatgggattgaagcatccactttggccttccttcttgtttacagcttcatatggtctctatgttatatcgtaggtattctgagcttttggtgtaatatccacttatcagtgagtacataccatgtgtatccttttgtgtctgggttacctcactgaggatgatatcctccagatccatccatttgcctgcaaatttcatgaagtcgtcatttttaacagctgag

SEQ ID NO: 3222 - DNA, 1000 bp, mus musculus
agccatgattgaaaaaataattattcttaatctaaagacacaaaaacatcaaaataaattctggaagttttcctttaacttttctatagctaaatctgcacgtaataaaacataagggcatttagctacctttctgatttggtagatatggaaatttctgtatgcacagtatacaaagttataattatgctgttggattattactttcccttttctctcttttttaaattagttttatttttttacagtccatccattatcccctctcagtctgctctcccacagtttcacatcccattcctcctccccatcttgcttcttggtcatgatgtttgtgcaggaatagaaaccctgactaagacaggggccaaaccaggcagtgctctgccatatatgtgtcagtgacctcaaaccagctaatgtatgctacccagttgatggctcagtgtctgagagatctcaggggtccaggttagttgaaactgctggtcatcctatggggtcacccttgtcctcaacttcttccagcctttccctaattcaaacacatggtcccagaattcagtccattggtcccttctcttttgtatctaattttgtcctaagaaatagaatgtagcaaacacaccactatagttaataaagaactttatctttctaatgaagagtccggaaccttagtgatgcatcatcgaagagagagtaacaggttggacattgcagcgaaaagtcaagtaaaacactgactatacaacagagatggagatgaaagcataaatatactgcaatctctgccactaggggaagagaatttgtgaacctctctatccaaagaagacagctttttccagaaaattctccttaaacatcagctaccctcctcctcttcctcttcccctcctcctcctcctcctcttcctcctcctcctcctcctcctcctccttctctttttcttcttctttaccattgtcagaactgggaataatttttttaatctct

SEQ ID NO: 3223 - DNA, 1000 bp, mus musculus
cccacaagaagtttccaaggccccagcctgttaatactccctcatataaggaagggataagaagggtcatcagaatctcacctgaggttcctactgctctttcttgtgtcccagtcctagttatatgaattctcccccaaactgtacgtggtctcggggaggggctagccaactatgtaaagaagattgaaggttaattgaaggagggaacatcatatgcatagctgtgggggaagtatcaactatgctgtggtgaaatatttagtgaagtggctatttgggggtatgccccacactcctgcaagtaactgctcactcatgctgtgtgaggaagtccaataaacttatttgttcaccaagagacacttggatagaaacctttggtttgtcattagtgccatctctaagattctggtttacattcttccaaggaaaataattaagacaacagccaggaactgcaaaagtatcatatgttcttcctataaagcccataaaccggtaatataactcagattttacaggttacataaaatagtttatgctttgcttcatgttgttatcagaaggtcacataggtaaaaagtggaaaaacaacaccaagcattcacttacccatgcaataagtatatattgaaggattattctgtgtgaagagtattctccacatatactatatgtagcaagttactctcttaactacaaccaggaccctcaaaagagattaaataaccaacaatatacaaaatgtaagaatctaagagtaatgttagttaattcgtggataatcatgagtaaagattgcatcttttacttaagtctgtaacaggatatattgtaatgtttaacattttgattttattcgtgaaatgacatactggtgctggataattaagaccaatatgcaaaataagtcaatctagacttatgaaatgaatgataataaatcacaaagaataaatgacacattccaaagattatacaaggaaaacaatgaggg

SEQ ID NO: 3224 - DNA, 1200 bp, mus musculus
gcctaacacagataaatacctgcattcaatataatggtacatgcttataatccccttccagtaatggaacttagttggtgtaggtctgaatgttgtattcacaagaccctcagtttcctactccaggtccacagagagattgttttcaggctcttcataaaagactggacgtggaggctcaccctgtacccagaagactggggcaggtgaaacaggtttatataattttgagtaaaatctgagctgcaaagtgatacctggtctcaatgatgtgcaaaacatacacttttaaaaacagggttctttggttttgcttttcttttctttttaaatgaccatagtatggcttgtaaaacaacatcttgccaatccaaatctgtgctcctttggatgctgtggctacggtgatttggggacagcgtttgtaggatccatggctctaggtacatatgtagcatagggtgggcttatctgatatcaatgggaagggaagccattggtcctgtggaggtttggtgccccagtgtagggggaagctagatctgtgaggtgggagtgggtgagtagctggaggagcacctcatcaagtcaaaggagagtggggagaggggggaggtggagtttgtggaggggtaacagggaaggaagatgcatgaaagggacaataaaaataaaatgaaatgaataaaataaaataaaaacaggagaactgtcaaaggcctttatttgtaaactgtgtttgttcagaagtagggtgcagcttagttggcagagtgcttgaccagcatgcacaaagtactgagtttgatcctcagcacaaccaaccaccatgaaaagcagcttgcatccaagacagcttggatgttgggaagtgcttgctgatgttaacttgatatggctgtctccagaaagactgtgccagagcctgacagatacagaggtagatgctcacagccagccattggactgagtttggggtttcctgatggaggaattggagaagtgattcaaggagctgaggggttttcagcaccatagagggaataacagtgtgaacagaccagactacctccccccccccgaagctcccaggaagtagaccaccaagcaaagaatacacatggaggaacccatgttgctggtcacatatgaggcagagtaggatgagaggtctttgggcctgaggctgttcattgccct

SEQ ID NO: 3225 - DNA, 1200 bp, mus musculus
aagttagttttgtactaacaggcccataacactaaagcaggactcccagtctcacgttcaaaagggatccatttcctcaagtaaattccatctcttctccctgatcatttctcaccactttcagttttttcaatttttccagtttgtttttactttttttactttttttttttttgacagggtcatactatctatctgcaactgacctggaatttgctatgtgaccttgaactcaggtgtcccctttcctctgccacctgagtgctgctggcattgaagacgaatgttcccatgtcttttttttctcactgttattttcatcttgtaaaactggcaatgttttcattacattcatacagatgcaggaaggtgaatccagtgccacatctgcctgcctccctccctgcctgcctgctaccactctccagtggaatggccttggactaaccctctaaacctgtaagctagccccaattgagtgatttctaagtttcactagttatgttgtcttttcacagcaatacaacagtaactaagagaggaagggggaacaggaagagtaggagcataactgatttctttccccaatggggagaattctaccttgtgctttattctctacaactgtccctccatgaatcagagaagcctagatattcctaaatggcacattttccttattcatttgatttctatttctctaacctccataggcaaccaaatacctgtctctgactctacttctatagaatctgatacaagataacaaatatgcttctcagtatcaactcacctggacccccagcatctctcagacactgagccaccaaccaggaagcatacacaggctggtccaaggcccctgacacacataacagaagaggactgccccatctggactcagtgagagaagatgcatctgaccctcaagagactggaggccccagggagtggggaggtctggtagaatagtggtgggggagtggggacatcctcttggagacagggagaagtggggtgggggaggaggaatgggaggtgggatagtcagagggtggaccagaagggggataatgactgaactgtaaaaaaataaaaagaataataattttttaaaaaacaaagatgcttctgtgtagcaagcaattgtgacagaatgttattcttatcaggcagtatctcagagaatactgaaagtgt

SEQ ID NO: 3226 - DNA, 1200 bp, mus musculus
ttaattaccctttccaattataaaaccatagtctgaattctatactcctttatgaagccctgggtcatatcctgttttttttcacctctgacaccatatagttaagaacattgggtgggctgtttcctcaaacaacaaggattgattcccagcacatggctcacaaccatcgattccaggagaatcgagtgctcttctggactgcacaggcatcaggcacacacttgagtcacaggcaacacagagataaaataaccaaaaagatgaactgagaattcaaaatgaacataaataaaacaaattggggttagtgtgaacagaattatttagagcccagtagtaatgatcaggatttccctactatacaacagagaatacatttaaggaggtggtagaaaagcgtgtggcatgatgaagttcttcgaagttatccaggccagcagtggaactgtgtgaaaatgcccccctcccgggagcagagtagcaggaatttgaaaatagatgatttccccgcccctcacttgggattggaggcgtggtgtggcctggcataggctgaaatctgaccaatgagcctctgcaacagtgcaggaagcacagtgattggaggacgcctttagggaagtgttgagagcctctggctggtccggggaagacacacctcagcaagtggatctctgtgctttgaggttgctgggactcccacaggaggtggcaaactgatggcgaaccgtgaagctaaccagttctctctaatttgagagtagcagtgtgtcccctctccctgctcaggattcccactggtccaaaaagaatgttgactgggagatctccaaataacccaggccactaaaaatggtgccttgtggtgtggagctttccagagagggctctggctctgtctctcctcttttcctcatttgaggaggggcttttagcctttctggcacagtgcccctatacccccattaacctctctattctagaagggaaactttaaacttcctggcaattaatgttttatttggatggcgtgtcagtaaaatgaccataatttttgagtgaggagagggggcttgcagagttcccaggttgaggatcaaatagctggagcctagggttagccttctaggaatctgggaattagaatgccagaaaggtatagcacacaatttttttaagtttgggaggggtgtctgg

SEQ ID NO: 3227 - DNA, 1000 bp, mus musculus
ccagaggtgggaaaggtgccctctgaggtccccacagacataccagagttggtctctgactcttggccacaacagacaccgctgggtaccagggagtgccacttctggggtttgcaaggagaccagaggtgtcaggttctcagtcttgaacatcatagacaccctggatgttgaggaagccctgaaaatgaagtgggggagggcagcgctggcgggccctgaacagggccctaaggaaaagggatagggaagagagagctccagttaggtcctgtggcgaggagacttggttggcggtggtttggtttggtggcagctgtggctggagggcaggaaggccaccggacaggaggttagatgaggctcattaaggaaagaccagcagggcaggtccttatgagaagagatggtccatggttttaaggcattcattgtagaaaggcaaagagacagagagagtagaaaagcagaggctggccatggccacatggagaggggaggaaggaaaagcagagaaatggggagaaagggaccaagggatcaagagtaagagcaagagaataagagagggagccaggggcaaacagcccctttcatagtgggtcaggcctacctaggtgactagggagttggtgtaactgtgggtgtggagttcagaaggaatgctaggagcttggatcattgcctacatgactgatggccacacacctctctgcttggtttggaggaactgtgggaggctgtagctgcaacagaagccagggttccaggaggcataactggacacctgccatcacttagggtcaccagggttcaaggccttttctcaaacagggactgggctgtctatgcgcagctcactgtagacaccagccagatgtggagacaccagggtaaaaacaaaatgaacaacatcgagcatggtatgtctacatttgagcccagctatcctactacagcaggccctgatatctcaaagccccaaagcacaagaaaatac

SEQ ID NO: 3228 - DNA, 1000 bp, mus musculus
agggaaacacaatgaccaggcctttcaggagaagaaacctaatgcctagaataccctaaggagaaatagcaatttaaaaagtaaaacattctaagtccacagaccctgaattataaggcaggaacctctagaatgcagcaatcaatggcatcatcccagcaggcaaaaacttcaacccctcctttttttcaaacacaaagggtgggtgaagcgatgcatggggtcacatcctagggcaatattactacctaatgatcacagaaaccgacccacataaatcagaagaatggcttatggaaatgacatgcccaagaaaatggttgattggccaaaacctttacaaaatgtgtttaaattatgccaagtggacccagaaaatgatcctcaccatatataaacttcccctgctgtggcccttggaaccaggaaatttctgattcacctcatcagaactcagctgttcctatccaagaattagcaggccttgagcctatgcagaaatagctagtgaggtcccttcaactctctttctcggggctcaccaagacataccttcccaatgtgcagttgctggtaggctgatggatgagactgctgatcttcaggaacagctgacccacccaccatcatataccagtcctttggacaggcctcccactcaagccagccttggaatgcattcttcaggaggagactcagaatctttcaatactaaccctaactagccaacatagagccaaggacacagagcagaaggccactggaccctcctagtcaagaaccttctggcttctggttggtatatctgccctttgtcataccccaggcagcaggaaagactgtctttctgtcacagtcagtaataacaggtgtcctgaatgtatcggagtccttagacaaagacaagaaaactataagcttttaaaattatttaggtttatttccacataactgaaaaagaaatcatatacactataccagagcaagctttcattttaaa

SEQ ID NO: 3229 - DNA, 1000 bp, mus musculus
cactttttattttccattcatttattaattcattcaccttacatcctgatcatagtcccctgtccccatttcccctctcatagtcctgcctcacacatacctcattccccttcacctctgagaagggggaggtccccctctgggtactaacccaccctggcacctcaagtcactgcaggactaggtgcatcctcttcgactgaggccagataagacaggggaataggatccccaagcaggcagcaggcagggttacccacatcaagtgttgggggaccctatgaagactaagctatacatctgctaaatatgggggggggacttaggtccagcctttgtatgctttttgtttggtggttcagtctctgggagcccccaagggcccaagttagttgactctgttggtcttcctatggaatttctatcccttctgggtcctttagcccttcccacaactcttctacaagactcccctagtttcatccagtgtttggctctgggtctgcatctttttctgttagctaggtggagcctctcagaagacagttatgataggctcctgtctgcaagcataacagagtattaatagtgacagggattgttgcttgcccgtggcatgagtctcaagttgacccagtcattggctggccattccctgcattacttgtaggcaggataaattttgggttgaaagttttgtgggtggtttagtgactctattgctccactgagagtcttgcctggctacaggaggtggccacttcaggctccatattccccactgctctccttcactggatctccctccacccccacatctctcactttctaatatgagtactataaattttcctcttaggactgcctaggttgtgtctcagaagggaggttctagtaggttgttctcattttgttggtgtctaggaattttaaatttccctttgaatttcctggatagcacactgttacttcaaaatgtatcacttagtccccaaatatt

SEQ ID NO: 3230 - DNA, 1000 bp, mus musculus
ggtagcagctttgaactgacagatggcttgccttttcctgtgagtcgggacagtcccacttggtttgcatttatgtacagagaaataggaaaaatactgtaaagagaagtaaaccttataattagaaaacacgagcaccttagatttaaatgtgtgtaatagatgaaccctgtgaaaagttgggttggaggtgggcctataccaaatcccatgagatggttcaccaggtaaaagtcttcttacaatttaatctcaatgagctcagcccctagaacataaggtgaagaaaaccaactctgcatgattgtccctgtcttatgacatctgcacatatttactctctctcccttctttcctccttccctatttcctcctccctgtcccctaatccttccctctttcccctctcagcaataacaagtctctcactcacaagtttaaaggatttctttgaaaataagagagacaagaaaggttgggtatgatggtgcaaactttttaaatcctagcaccggggatgcagaggcaggtagatatctgagttccaagaccaacgagggatacatagggagaccctgtctcaaaacaagaaagaatttaagcaagaaagagaaggagacaattgtttataattttttcatataccacaaagatagagaaatttaatacttgagtttgggaagtagcatttaagtatcctattttggtctagtccttggtaacctctaaagcattcagtggccattagtgaggttgagttctaggaaagatggtaaaaggtccaggcaagctgcctttgtgccttgtatggcttgtccagttagactcagatatctcataactgttcatgatgccaagcagagtctttggcaaggccatagtatcctttgctaacaatattgcattcaagcaagatctggcttgggtaccaggtttgtgagatattaaatgccacgtaatggtagacataccaagtttttacaggactcagatgttaaca

SEQ ID NO: 3231 - DNA, 1000 bp, mus musculus
tgaaatgcaaatcaaaactgccgtgacctcacaccagtcagaatggctgatgctgccaaggatgtctgaaaaagaggaacactcctccattgctggtaggattgcaagctggtacaaccactctggaaaccagcttggtggttcctcaaaaaattgggcatagtactacctgaggatcccgcaataccactcctgggcatatacacagaagatgctccatcatgtaataaggacacatgctccactatgttcatagcagccttatttataatagccagaagctggaaagaacccagatgtccctcaacagaggaatggatacagaaaatgtggcacatttacacaatggagtactgttaaaaataatgaatttatgaaattcttaggcaaatagatggaactagaaaatatcatcctgagtgtggtaacccaatcacaaaataacacacatggtatgcactcactgataagtagatattagcctagaagcttggagtacccaagatacaattcacagaccacacaaagctcaagaagaaggaagaccaaaatgaggatgcttcagtgcttcttagaatggagaacaaaataccctcaggaggaagcatggagtcaaagtgtggcgcagagactgaaggaaaggacatccagagactgcacctcctggagatccatcccatatactgtccccaaacccagacactattgtggatgtcaacaagtgcttgctgacaggagcctgatatagctatctcctgagaagctctgccagtacctgacaaatacaggggtgggtgctctcagcccgccattggactgagcactgggaccccaatggaggagctagagaaaggacccaaggagctgaaggagtttgcagtcccataggaggaacaacaatatgaaccaaccaatatccccagagcttccagggactaagccaccaaccaaagagtacacatggagggacccatggctccagcctcatatgtagcagagg

SEQ ID NO: 3232 - DNA, 1600 bp, mus musculus
gctatttgatgttttctctgacttttctgtaattctccattgaatgttctctctgtgtaactcagactcttcggagcaaactttgtcacaggccattacgttccctgtgcctgtcagccttaagcagctctgatctggaagtataccgaaatgccctgggttgtagccaggtgacttaggtcactgcacagacaccttgaacaggctgcactgctaagccatatgtgtgtctattccagttgttgaagatgccctacctgccagggtgttttcaagtagctttaagagctttctgtttgggttagcattttggcatctcataggcctggatgtattccttagaaggccgtacagctatttccacccaggccagagggcaatacaccccctggtagcccagcaggatggctgccattggtccagttcataaagttccattggcatgaaagattgtgctgttactggtgcaaacatatttgccacacccctattcttactgtgtgagctggcagttgcgtttactttttggatcaacttgccctctgctgctgtaatgttaggtccactagaagaatggcaactgtggtcttgtctgaccacttttagggtgtgaggttttgtttttcatgacacacaggcctaagctggtagcctgaagaggagacagaaggcaggtgaagcagcagcctcctagaaacagcatctgctatctgctgtccctgcagaggcagcagctcttgcagtagcaccagtggccacaagagggcagtgggagagttcttgagagagagaggctggggcagaaaggatgtggagcaggagaggatgcagcaagggacaacagaaagacagaggagccaccagagccttaatgctgaagaaagacagaaggccgtgaggaatcatggatgagaaagggtggggtctacctccctgaaagtgctcaaggagcctggaagggccagaggtcttcaaaatctagatcctgggtctttgacagtaatccctgtcaggggccaagtatcccaacactgtagaccctagatgtaggaacagagcatcctaagaaagaaatgtcaaacttgtgagtgctacctagtctgcttttgtaatgatccgagtcacagacagtgggggtttaaatccttgaagaataaggctcaaactaaagaagtggaatccaaaggtctctggattctttagtgtggagtaatatcctccaccccgcaacacctgggggctgtaggactctgggtccgccattcctgaccataggctttcatcagacagaatcccagcagcgctaattccagaggatatctttcccacctactcacgatttctccaggtagagttaaaagcatcttgtgtttttgaaaacctttctcattgttgttgttgttggtggtggtggtggtggtggtatgttttacttgatattctaccactttgattttttttattatcatcctgagagtcatttggtcaaaccaagctttcaaaacacacgtgttgctgtatgttttgaaaaactttctcatttgtgtgtgtgttccccttgatattctacactttgattttttttttttattatcctgat

SEQ ID NO: 3233 - DNA, 1000 bp, mus musculus
ctactgctttggggattagtttgttcttgtttgtatagtgtcttaaggctcacgagcaggttgtttacttgagatcgttctgattttttaaattgaaaacatatttttcatgaaatatattctgattttgacttccctatccccaactcctcccagatcctccccaaccccatgctactccacctaattccacaccctctctctctctctctctgtttctctctcattagaatactagcaagcatttaaaaaataaaataatatccacttatcagtgagtacatatcatgtgagttcttttgtgactgggttacctcactcaggatgatgccctcgaggtccatccatttgcctatggcctagttggccatcattgggaagagaggccccttggacttgcaaactttatatgcctcagtacaggggaacgccagggccaagaagtgggagtaggtgggtaagggagttgggggagggtctaggggccttttgggatagcatttgaaatgtaaatgaagaaaatacctaattaaaaaaataaataaaataagataaaataaaaacaaataaacaagaataggatgaagcagggaggcagaaacaaaggaaaaacacaggaatgtatatagatgcagggatacatattttcacacacagagagatcctgtaaaaacacaacaccagaaatcataacatatatgcaaaagacctgatctgtaaggaaaaagaaaaataacccccagacaaagcattatgagaaaaagaacttagtgttggccatcttctactgggcctggagcctgcccttaatggtggatttgtatgcctgtgagaagtgtttgtcagtcagagatagcttttgggttagggataggagctcgtgtccacttcccttctcagcactgaaccccatgtgggtgtgcaggccttgtgtatactgccacagtctctgtgtgtcttgtgtgtctgaggctaatgccattctctgtgatctgaccct

SEQ ID NO: 3234 - DNA, 1000 bp, mus musculus
aaatgcacagggccctaatcatagggagtagtgaaaacggctagctggcaggtgctgaaattgcaaccttctcctttaactctgagcagcgagtgggcggggccgcgtccatcagtgtctaggtgcccgcaggccgccctaagggccaatggcgcggaaatgagagcccgggccacgtgatggcgggtggcactctggctttcctaaagcagtctctatggtattcttccaagcaaacccagggcccccccaaaagggtagcggcacgtgacaggccctgggactacggcaggttcccacgtgatcctggcctgcagtagcgtggttgcggtgaggttcttgcgctcctgaagggcgggcgcggaagtaagagcatcctcaggcggaccgtgactggcagcgaggtcgggaggagccaccaggcagtgaccgctttgcttctgcagctccgctccgctcattccgttatctcagcctttgcagtctgtacagaagctgaccaagttacctttgggtcttgagaccttggcgagtgaggcccaaactcgggaccaactcctcatccaccttgccctccctctcctccatctcttcctttgcacgcaccgaatcgaatcgcttgctcctttgggctggcctgctcggctgtgcctggagactaagttcgggtcggtaaaggtaactgtgggaaaagcggccccccagtggacaaaggcggaggcagggatagatcaggccccgcgggccctgggtgctgagcgtaggcaggtgagccagaagaacggtactgcggatttagaaggcactgtgaaggacttgttgcacgatggaagaatctgactccgagaaaaagacagagaaagagaatgtgggcccaaaagtggagcctcctctaggggagccggaaggatcgcttgggtgggtaaaggggattatgttgcacctgggagggagggcatgctaattgtaaagagtattgtgagatgcaacaacctctaac

SEQ ID NO: 3235 - DNA, 1000 bp, mus musculus
ggaaacatccctctaaagacaatgctgcccactaaattataaataaaatacgacataaataaataaaaagaatccatttgattaactaaaagcttgatccacagacagcattacacttctggctatggtgtttgtaggatggaaattgtccttctggtctgggcctgtgccctaggcagaccttgggagcgaactctgcagccagtcccacaataccaggaggaagatctactcccaaacactctaacacttccaggatcacagaataacagattccctgagcagaccttggatgctaactctgcagccagttctacaacaccagaaaatgctccactcccaggcactttaacatgcccaggatcacaggatcacaggatcacaggatcacaggaacatggtcacaccagaatctcagggtcccaggagccctgacacacccaggatcacagaatcagaggtgccctgagcagaacttggatgctaacactgcacctagttctacaacacccaggaaaagctctactcccaggcacgctaacatgcccagaaccacaggatcccaggaacttgttcacaccaggatctcagggtctcagaggcagcttgactcccaggggctctgacacacacaggaactcaagatcacaggatcacaggatcacacagacagctgaactctgtcaagttctgacacaaccagattcacaggaaggacagactccagtcagatatagcgagggcaggtagcactagatggtaggagtcaagtttaagaacataagcaacagaaaccaaggttacttggcattatcagaacccaattctcccaccatagcaagtcctggatacaccatcacaccagaaaaaaaaagatctggatctacaatcacttctcatgatggtgatagatgactctaagaaggacataaataacacccttaaagaaatacaggagaacacaggtaaacaggtagaagcccataaagaggaaacacaa

SEQ ID NO: 3236 - DNA, 1600 bp, mus musculus
cctccctcccccctctctctctctctctctatatatatatatatataatataatatatatataatctgtgtgtttatacatttatctatgtatatctatacatagatataagtatatatatacatatatatgtatatatgtacacacatatacatacataaacacacacatatatatgtgtgtatatatatgtatatatatatatatatatatatatacacatatatataagtacatgtgcatgcatggttgtacatacacacaaacacaccctcccccccccacactttcatctttgtttgttttttttctctctggttattgttgttactccctgaggtccaatttaattcctatcccttagttctatgatatgtcaaagaactcaatctacgaataagtacaacgtcaacatattttgctttacttcctcagacatttcaacatttgtaagatttaaaaatcactctagtaaatggctgtgttaatttgaacttatttccaattcctcaggctttagctatttggttaaaatggccagggcacaagtcccttctgaggcattttgggtgcaaactggcgggaggtcccacagtccccagaggactcttcactcaatcttaggatcactggtgagtgaaacacaacatctgtttcaaaccacttgtgccaggcctgtgacagcaggagcaaggacacgggagccctgactgattagaggcttgggttccttctgatcgctactggtataccctggtttcgaacacaccagacagctccacagtcctcagaggagacaccatttccaggtgctataaaacgcccaggatcttaggattccaggatcccaggataacagaagctttgtcacatcaggatttcagggtctcagaggaagcttgactgccaagaactctgacacaccaagaatctcaggttcacaggagtctggaatcacaggagcacagagaaagctggactctgaggagtcctgaatcaaccgggattataggaaaaacaggctgaaatcatatactgagggaagcaagcacttgagataatcagatggcaggaggcaagcataagaccagaagcaacagaaaccaaggttacttggcatcataagaaccaaactctcccaccacagcaagtcctggatataccatcacaccagaaaagcaagacatagatttaaagtcacttctcatgacaatgatggaagactttaagaaggaaatacataaaatacaggtaaacatctagaagcccttaaagaggaaacaaaaaaattccttagaaagttacagaaaaacactaccaaacaggagaaagaattgaacaaaatcatcaaggatctaaaaatggacgtagaacaacaaagaaatcacaaagggagacaactctggagatagaaacccaaagaactaaatcaggaattatagaatcagcaatagaatacaagatagaatacaagatagaatacaagatatatatataatacaagatagaatatatatatacatacaagagcaatacacatatatatacaagagcaatagaatacaagagatggaagagagaatctcaggtacagacgatt

SEQ ID NO: 3237 - DNA, 1000 bp, mus musculus
ttagcctttaggacacatgtagaattatagcttatatttaatgccatatccttcctcttggttgtctctttgcagaagcttttagcgttaaaaggggttctcatatttattctgccttcatgttttcctccttcaaattgtatatttaaattgactggctgtcaggagttgctttttgttttcttttgtctgttttttaagcagccccatgcacagtctcttaaacacacttttcaaggaggttagtcattttttcactttttggataaacatttttcccctctgaaaactcctattcccctccccctgctcatcaacctacccattcccccttcctggccctggtattcccccatacaggtgcatagagccttcacagaaccaaggccctctcttcccattgatgaccaacaaggacatatgcggctggagccatgggtccctccaagtgtactctttggttggtggtttagaccctgggagcctgggggatactggttagttcatattgttgttcctcctatgtggctgcaaacccattcagctccttcagtcctttctctaattccttcattggggaccctgtgctcagttcaattgatggctgtgagaattgacttctgtatttgtcaggcactggtagagcccctcaggcgacagctatatcaggctcctgtcagcaagcacttgttggcatccacaatagtgtctggaattggtaactgtgtatgggatggatcctcaggtggaatagtctctggatggcctttccttcagtccctgtgccacactttgtctctgtaatgcctcccatggatattttgttcccccttttaggaaggactggagtatccacactttgctctttctccttcctgagcttcatgtggtctgtgaattgtatcttgggtattccaagctaatatccacttatcagtgagtgcataccatatgtgttcttttgtgattgggttacctccctcaggatgatattttctag

SEQ ID NO: 3238 - DNA, 1000 bp, mus musculus
aacttaagttttagaggaaaaagccaaactttacactgaacacttctcaaagtctgatgtgactgactggaatttcagtgactggggaggttggaatgttgcaggtccagggtctaattgcaagttatcttggattgctgcgcccacctcggctggcaaggaagacacaacacggtcggattcctctcaacagcctttattgcaggaacgcctcaatgctgctacccagggaggtctacttatatactctcagcccccatctactcaggcacacagcttcagctaatcagggtggcaggggcatgtctccaccaaatatggacttgtttacaccgccagcatcatggtgcacctgcgcagctctcacgatggtcgtggctgttttcaggtgtatgagaaagtcaggtgcaagtcatataagacttagctgcagtcccgggcgccattttgggactgctgccacacctgctcctcacattggattatctgtagagccctaaatatccatttattgtctacctttgtatatgacacaaattcttatcactatgacttgaaacctttggaatgtattagttttaggaaccattagcttctaccaactcaaaagctaagaatgttatcatattgcatctgagacctatagcagaggtttccctgctttgcctacctactgtttctatcaatgtatttaattgattgactgatttgtttacttttgagacaaggtcttattctgtagccctggctacactggaattcatatgaccaggttgacctgaaactcaccctgcctatgtcttctgcatgctgaaattaaaggtgtacaccaccttatgtggtgaacatgtgaaatatatgaaatatgtggcaccagcaacacatttcaaaagcatttgacttatgtttttctttattctgttcccattaaaaacttcattaacatgttattatgttgaaacttagatttataataaggaaaattcatgttcctgggaca

SEQ ID NO: 3239 - DNA, 1200 bp, mus musculus
atttacaatttctactaatattactacttcaattggacactgagtttagtaaaaattttgcatgttaatcccataacatttgtgaaacttacacgggtgtatcatccaaacaggtcactgtagttctaagaacttgcatctctgtgtttttgctgcttataattattctgtattaaatactccagaatcttaaagtgtgggaagcggtttccgctgtgcctgggtggcgtagttggtaaacaagcaatgtgagcatgcacgagagtgttttcgtgccaagtcacggcccatcccggggcgtggtgatgaggctctcggagagcagctaatctggtttggacacgccacaccaaggtgtatataagcagtgcctttttgtgcttggggtcttcctcttcatgttgaaactggtgtaataaagttgctgcagaaggatctggtttctcatgcatgtgttcttgctggcgagacaatagcgtgtgtgagaattagtgctgaaacccgggaactgccttaccatcaccggcactgaggagaccctctgttcgcggggcggattcagaactgcagtcaggttggttttttaaggttctgagaggcatgtttggttctggtctttctctacaattggaaggggcaatggaagcctttgtaattgtttttgcagcacttagccttttccttatagtggaagcaggacagggagtgctggaggaggttcaagacagcatgtcagaaacagagcagggtaaaagattgggagctcaaagaaaaaaaggtatccctacgaaacaaggcccttccaaggattctggatctgaggaagagagagaaaagggaaaggacgccctggtagagaaaaaggagaagggagagagaaagaggaggaaagataaaggggagaagagaaaaaagaaggggaagaagttcccccaagaggaagaacctttattcgttaaaagaacttgagggtttaggacttgatagctcaagttcaagtgaagaacttagtccctcggaagaagaagacttagaggaagaagcagcccactatggggaagaaagataccaccctgatgagggtagaaatagtgagccaaggaggaagttaaaaggaaatggtggtttaagtcagggcatggttcggtctccgggccctagcgcccctccaccttatgcagaaaatttctgctcagattc

SEQ ID NO: 3240 - DNA, 1200 bp, mus musculus
catctttagtattcccaaaacaagcctaacaatgctgtatgcacacctccagatcatgtttctctagactcatttgtttgactaccagtaatgaaacatattgtctagctttgagattctcagaatctttgtctggattctatatacctagtaatcttgcataatttttcatcagatttcatatcatgtggaacagtttgccaaattcttctattagatgtgatggagtctcaccatgacagtttgttctgtattaccttgacacaatgtagaatcatatgagaacattcttccatgaaacattcactaaaaagcattttgagagctatctggagtaacgatactcatggaagtgtggaacacactatgggtgttaccaagatttgcaaggtagattgtgctgtaggagaatgaaagacaaggaatttcgtaattacaaagcattgtgtagtgtttcttagtggtatctgttcttgtttcttacttgtcttacttgattcctgatcagtgttcttacagtaactgtggagagccgtgtagcgagcaatcgcgtgtgtgccgtgagcaatcgccattataagatggtgctggcttccactgcacctaactagtaaacaagccttatgctcaagtgcaagagtgaactcacgcctagtcactgcccatctcacggcttagtaatggggtgatgggcgagcaacgaatcaggagctgtcacgccacatcaggggctgaaacgtcatgctgcgggctatataagcagcgccattttcccggttcagggtcttccctcctgataagtaagcaataaaagctttgctgcagaagatcccagttgtcctgagtgtgttcttgccggcggggacaaaatctcgggcaataagtagcgctgagaaacccgggaactaccatcacactggcgcaagggagatccctcattcgtgaggcagaaccagaactgcgggacacattacaggtttacgacgtatgtctggccttgaactttctccagtgttagaagcctttttgttccttttcacatgtcaacaagtggttaaggcaggacagagaattctggacgaaattcaagacagtctatcagaggtaaagcggggagagagagtaggagcaaagaggaaacatggtgcaccaattaagcatacaggcctttccacgggtcttgaacccgaggaaaagtta

SEQ ID NO: 3241 - DNA, 1200 bp, mus musculus
tgtctaaaaaggtaaccttataattgtttaggagatggagtaaaattagggaatagatgcaactgatttgtaacctgaaaatctagtggtccagttccaatgctgttcagtagaagagatcaatggctggactaaatttcagatactaccctcacaataatttaggagctgataaggttgaactgaggaacagcttgggacaggatccttccagtttccttctgtgcccaaagctgatcctgtgtcacagcgctccatacccaaacaatgttgggagaaagcaggtctcacaggagtatggacatgcctgtgagcacaggtaaaaccaccacttctgctcagagtgacctgaccagagcactcaggacacaggaactgaggagcagcctgagacaggatccttccagtattcatcagcacagggagctgatcctgtgctgcaggactccagtctcccaggagtgctgacgcacctgtgaacacaagttagaccacaacttctgctcaaattcctggcccaatagtggccagtccagagccacaggacacatgaaccaaggaacagctggggacaggatccttccagtttctgtctgcaccctagagctgacactgcgccacagctctccataactgaatttctttcagagagaactggtctcccaagagtagtgacccacaggcttgcagaagggacaagccatactcagagacagcaagaccagctaaccaaaagatacccagttgtcgaggggcaagggcaagaacataagcaacagaaaccatggttacttggcatcatcagaacccagttctctcaccttgttaccccaccataccaggaaagtaaatctctgatttaaagtcacatctcatgatgataatagagtactttaagtaggacataaataactcgcttaaagaaatacaagagaacacgggtaaacaggtagaagcccttaaagaggaaacacaaaaatgccttaaagaattacaggaaaacacaaccaaacaggcaaagggactaaacaaaaccatccaagacataaaaatgaaaacagaagcaataaaaaccacaaagggagacaactatggagataaaaaacttaggaaagaggtcaggactcgtagacacaagcataacggaaagaatacatgagatagaagagagactctcaggatcagaagattccatagaaa

SEQ ID NO: 3242 - DNA, 1400 bp, mus musculus
ttctctatatctggaatgaattcctttcttcaaatcttcttgagaaaacacatatgacacaagaggcatagtgagtagcacaaaaaaaaaagatgacagaaagaaatagccattccctcttctgtggtgaggataggtgtgcctctagtaattgtaataattatgtgtgctctgttagggatacaggatatccactttactttgagacatctccctaaggttgaacggacccaaggcagaattacaatagtaacagacatgaggaagcaaacatctttgtttacatgagacacagcatcaaaaatgcataaagacagaggatgatccaaaagttaaaaacgtttctttttgaattttaaggtgagggaaataagagaaaacagggaaaaagaagcccattaggtcagcaaactgtactatgttgcaaaatttacatgatgtacaagatgctgttgtgagttttcgcatgaacaaaacagccagcaatagaggtgctgaggaaaccatctgtgcagcctctgggatggcaggtggagaagagagccctagaagggtaaattgatcaggaggtgggagttgaggaccatagccaaaaccaaactgtggtggagagcctaagtcctgtggggagaatcctccaactagttaggatactatataggtggtaaagtttgggcgttgggcagggtatgggctcctttgccagacggtcatgggacatagctaacaatgccctatcctgctgacacctcattcattgtgggccctatccttgttaccatgtaaacagtgtttgttcagcccggccagtatagttccccgatcgccaataatgttactggcaggactaggaaagtttctgctagggttgtttggatgcctggaaccagatgctctcctacagtggcccctctgagctctgccgctgatggtgacagtgtcttcagatgcatgaagaaccacacagtgtactgctccattcctacctgcactatccagggtgatggatccaggggaagctttggaaatactgaactcctgataaatacacagtccagacaaaattaatgagccctggacagaatattaggggaaggtggatcagctgcaaagtcaatatctggacagaagtcttaaatacgtatatttctgacccattggcacaatggaattaagtcactggttcaacatcagggtttaaaaatgccatcaagtttaattcagaatttgcaatttcattgtcttcttcctttttccatattgtatgataatgtcatacctagccttttgttttcccatgtattgaaatattgaagttaacggaaaatatatttacactattgtgatttttgacagaaaatttctgcatcatgtcttagactatactttatatgaagcag

SEQ ID NO: 3243 - DNA, 1200 bp, mus musculus
tgcaataataattttaatttatattattataaatgattttgattttgattattactaatggaagtcatattcattatggaagtttctgattaaagagaagaggattttaaaagtcacctgctatcttaatactcaggaaaaacagttgttggatattttattgcaaattcctccaggggctatagaacatatagattctcaattcctatatattaagctttcttctatcctctagttagtcttgatcatctctaggagaataattcatctctgaaccttagatttgagagattgcaacatgagcaagggaacttgagccatgtgctcactctgcatttatgaacagaacccattgcggaataaatacccatcttctttcctaacttgtgaaatcatactttacagaaactacatatagtcattttaattttttctgtcttcttactttctcatgagaatcaagacagctgcaacctccagataatccactttcttgggaactcttccttggttggctatacaaatgtaaccatccaatagtttgcatctcttcctactaatctcatccaggggagaatctggagatagggataaatattacctgggttatactctcatggaaatctttaacttctaagaatgggctattgcagtctcaacatgagcaatctcgtgttctccttgaggttagagggaacaaaaaatggttgatggaccacttgtgtgtctgcttttacctcaccctaccatgctccagctatgtgctgaagggcaagtgatcagtatcaggtaaaccatttatcccttgtgtaactacacagagctccaggagcaaaaggatgacacataattcccatcctgcctctcccttgggatcaaatgccttgctcagaggaggacatattgaaatgtaccactaacatggttccaaagcacctttaagctatctctaattcttaacatcaatgaaattgatcaccagcccttgctgatattgctaataatttctgatagccattgatctagatgtgttggtatatctcaaatgttacatcacaagccttgctatcatttagagctgtacatacattctgcatttccaacatgtgatgtctatcacctcatttgggaccatctttgcttagtgatcttgcctacctctttctatctctctcttaatttttttccatacgactgggt

SEQ ID NO: 3244 - DNA, 1200 bp, mus musculus
atggatactttattagcctccatttcttagcaattgaggatattgttgcaacaaactttcagattcaaattctcctacatacactaatttcatttcctttggttatatattctcaggtggaattcctgcatagtgtaacaaggctattttaactttttgaggaaactttacactgtttaccacaatgcctgtaccagtttacattcatttttttcttttttaaaattaatttatttttttacactgcatgttccattccttgccctccatccaccctccaacttcttcacattcctcaccttctctgcacacccctgtctctacatggatgaccccaacccccaccccacctgatctctaaactccctggggcctccagtctcttgagggttaggtgcatcatctctgaatgaacacagacccggaagtcctttactgtatgtgtgttgggggcctcatatcagctggtgcccactatctgtttggtggtccagtgtttgagagatcttgggagtccagattaattcagactgctggtcctcctacagtatcacccttctcctcagcttctttcagccttccctaattcaacaacaggggtcagcttcttctgtccattggttgagtgcaaatatctgcatctgacactttcagttgcttgttgggtcattgagagggcattaatgaaaggtccctttttgtaaatgctccatagcctcagtaatagtgtcaggccttgggacctccccttgagctgtatcccattttggccctgtcactggaccttcttttccacaggctcctctgcatttccatccctgtaatctttttagacagggacaattatgggtcagagatgtgactgtgggatggcaaccccatcccttacttgatgtcctgtcttcctgctagaggttggctctataagttccctctccctactcagacatttcatctaaggtccctccctttgcttcctgagagtctcttacttccctagtctctggtgcattctgtagcgtccccctaacttcctatttccggaggttgcctgtttccattcttttcatcctcatgaacaatgtacatgtatcgtctttgcattctcaccaagatttaatattttttgtatttgttaataatcattctaatataagtgaaaagatttttttccttgtttgttgaagtactttccaaaag

SEQ ID NO: 3245 - DNA, 1000 bp, mus musculus
tatccatcccttataagttattcataactacctatggctatttaaaaccacatggaatctggattgtcttcctctccctccaccatccttccttctctttaactcctctttccctgtctcctccttctcccccaaacttttcagctctacctccccttccactgcccaatcaccagctctagcctttattttacaagttaaggcaaggttgaagtttctcaatgagtcacctgagtatgtgattcactccttgttagcaaccactcctggtaaaagcagaattagcatcaaaatacaaacagcaccaggactatgcacaacatatatgtatgtattttttatgtatatgtgaagtagaaacttaagggttctttggaaagttggttggatggtgttttgcttgggcaaatatgtgaagaaatattttgttacagtggacacaggtgtgcaaggctaaagcagagtcatgaaggagtgtttcactgaagcagacacaggagagaggatgttcagctaaagcagcacgtgaaaggacatgtgatgatgcactttcttgctacttcctctgattcaggctgatttgtagagtgatgtcagctgaaacaagtgcacatgctgaggcaagacccttggagaacaaatgatatttggatagagtatcaaaggactcaacagagagtgacaggggtggagttaggcttgctggtagggctagctcagcagtgcttgtgggtcttgcatcttcactgatcctcactttcctgagagaggcacagccaagaaagtctggtgttcctctgggtccctcctgctgactagagctggaggctgaggccttgctgtctctgctagggagtgccagcagtgctgatccctatctacagtcctgagtgagtctgctgaacaggactgctggtgtatgcaggaagtgtttgtgagtggatcacatgctgctaccctgtgaaatgaactgctgatttccagacaacacagaagggag

SEQ ID NO: 3246 - DNA, 1000 bp, mus musculus
tacattttaaatgttcaacatcttcccaatacccttgtaatcaagcctttaccacatgggcttttgaggggtatgccacatctatttaacagtactatgaagtctggcctttgccaatgggtaaactcagttgcaggaaaattaatttatttacccagtcattatgtggctgagccatgatttcaaaccccaggaatctgtcacagaattcatattcataattacatctaaatgattatgtagaagagtttaaaaacacaataagatggactgtgaagtagaaaatctgggttttatttgttttgtaaagtcaattgagttggatggtgttttgctggggcaagcaaatgaaggaacattttgtcagagtggacatagctgaatggctaaggcagactcgtgaaggaacattctgatgatgtagacacaggagaaaggatgttctaaagcaagcacatgaaagagcatgcatgtattggtcctccttacgttgcttagttaagctccatttgtcatggctacatagaaagaaaagcaccaaaaatcttctgttgatgtgctgcagtttcttgctgcttccatggactcagactcataagctgaatgatgtcagctgagacaaactgatgtgctgaggtaagacatgtgcttaggtaagacccatggacacattacaaccttggcttgcttagagagctagctgtgtaacacttgttgatcttcacttttgctgagagggaacttttctttgcattccttttagccctggtccctactgatgatttgtgccaaggatgaggcctgactgtctcttctaggtggtggtaccactcatgatttatatttgctatcccaatactaccgaactgactgatggtatatccatgaaatattcaagagtgaattgagctgccactgctgacctgtgaactaaactgctgatttccagacaagatagatggaagttgctcaaaaatatttctaaacaggtccacttctc

SEQ ID NO: 3247 - DNA, 1400 bp, mus musculus
aaggaaggaaggaaggaaggaaggaaggaaggaaggaaggaaggaaggaagacatcttagtgacttaacagcacaattggaagctctaggagaaaaatagaagaaatttcacccaaaaggactagacagcaagaaacatttaaacttgggcctgaaattaataaaatagaaacaaatactaacaataacaattacataaaaatcaataaaacaaaaggtgtgttctttgaaaaattcattatgattgacaaaacttttgacaaattaactacaaggcagagagtgaaattcaaagtaacaaaattaggaataaaatggggacagtaagaacagattctgaggatcataaaggcaaattgtattctgagaggctctacccaacagtcaacagaaagagatgcagagattcacactcaaacagatggagagcagggagccttattgggagagcaactgagggacccaaagaggatgaggactctacaggaagaccaacaaaatcaactaacctgggctgggcctaggcatattgcacatatgtagcagatgagcagctcggtcttcattcgagtttcccaacaactggagcagggaatgtccctgagtctgttgcctgccagcttatggaccctgtacccctaaatggactgtcctgtctggcctcagtgggagatgatgttgggagatgatgtacctagtccttcagcaacctgatatatggtgggggagggggaattgttagtgtggaggtgacactgggataggcttctccatttcaaaacagaagggtaaggaagaatagggggaagacttgcatgagcgggtactgggagatgaggaagggctgttgttggctagtaaagtgaataaatcttaaaaagaaactatcaatttgagagtaggaggctgaaggaagttgtaaggaggggactttggaggggcttgagggagaaaaagaaagagaaagtgaagtttattttaataaaaatgtataaaaataaaaaataaaaatctttgtattaggaaaaaagaacctataatatataccaggtactaaaacaaaaacataaaatatttgtcttttggggtctgagttattctggtgaggatttgttctaactccatcctttcacctgaaaattttatgtttttatttttgtaacagttgagtaatattccattgcataagaataccacattttctttattcatctgttgatggatatttgggctgtttgcaatttctggctattatgaatacagcaacaataaacatgtttgaataagtgtctctgtactaagaaagagcattctttgtcctttggatatttgtacaggagtggaatagccagaatagcactcttactaataatgggtgagtgtgtagtttatttatatcc

SEQ ID NO: 3248 - DNA, 1000 bp, mus musculus
gtccctaactatgatcctaataatcttttttatattttattttaagataggatcttgatgtgtagcccaagctgcctttgaactctcaccttaggacagcatatctagaactcaagatccttgctgggattgcagggctgtgctaccaagcctggttttcattttaattcatgtttacttctcttccttcaacttcctgcttctgttcctgccttgagagatcttcctgacacatgccagacttggataatttacaaggtgattcatgactctggggggaaagaacacatgtgttgtgatgagatcagcttaacaagggagaacggaaagaatgatgcagcatacctgagatgaaacaggggattttgttgacacatacttggaaaactagtacgttatgtatgagaagccatctctagttatttttcaggtattttgttatttcggttttgactttaaaagtaaaaatccgggaatacagaggccagcagtttctgggataggcaagagccacagagcttctgaggcggtgccattttcggctccagacaactggccatcttcctggtcagagcacaggtgtccgcccggcccgggaggcttctgcctcaggttccaagggagcaaccttggttccgggactctgagggaagtagtctacacaggtgagagtgtggactactgaaacaacgacttttgtgacaggcaaaagcaacacagcttctgggaaagatcctgttttgggccttcatcttcggccaggagaaggtccaaacaccagataactgtgcaccttcactgaaagaggagagcttgcctgcagagactgctctgaccactgaaacacagggaagagagctggtctcctaggtcgctgatagagggtaacaaaaacaccagaggaacaatctctaaacagagacaactataactactaactccagagattgccagatggcgaaaggtaaacataagaatcttactaacagaaaccaggacc

SEQ ID NO: 3249 - DNA, 1200 bp, mus musculus
tatactcactcataagtgaatattagccataaaatacaggatactcatgttacactccacagaccctacaaaactaaacaagaaggaaggcctaagaaagaatgcttgaatctcacttagaaagggaaataaaatagttataagagatagatggaagaaaggaactgcggtgggaccaggaatggagaaagaaacgggggacgtttgaggatcaggtgtgagaagagactgaggagatagccagatggccatgagactgaatggaaaactgtagttgttgggggatgtcccagagacctgggatagcgaaacctcccaagatcaatgggcatgactttagttgaaagtcacagtagtggggatatggaagctgaagaggccacctcctgtagccagacaggaatcccagtgaagtgatcatgattgggacaccaacctacccacaaaactattgacccaaaatttatcttgacaacaagaaatgcatggactgggatggagcagagactgagggaatggccaagtaataaccagcccaactagagagtcatccaattgggcaagcaccaatctctgacactattaatgatactctgttttgcttttagacaggaagttagcatggttctcctctgagaggctccactcagcagctgactcacagccaaatattggatggaggttgtgaactctttggaaagttgggggaaagattaagggccaagaatgaggtagaagtacacaggaagatcaacagagtcaactaacctggaccctttggagctcttagagtctgaaccaccaaccaaaatgcatatatcggctagacctacacctcaccacacatatgtagcaggtgtgcatctcagtcttcacgtggatcagaactgtagcaggtgctatccataaaaatggtgcctatctagtggacaaactagggtgtcttgtctagcctcagtgagggaagaagtacctagccctgtagagacttgatgtgtcagggtcaaggaatacaggggagggggaaggtccactgtctcagaggaaaagaagagaagggtgggtggacgaactgtcggaggggaaccaaggggactgcaatggggattcaaagtaaataaataaataaataaataaataaataaattactttaaaaaagaacagagccactagaagtttggataatgtttttataagca

SEQ ID NO: 3250 - DNA, 1200 bp, mus musculus
cacagagtttgtctcctttaatgtccttgcttaaggatgttctgacccaaaggagttgtaacacccacttttgtctattgtggaacagtgaaccatgccgggaaacttggtaaggtagagtgggtctgagacccagcactcgggtacacacctgagacagcaggtgcctccctgctccctactagattcctggccaggaacatgtgtccataatcctcacagcaatcacaaagcccagaacagagttctccatactaataagcttcccttcccagacattccttcctcctaaaggtatttaacctctggtacaccctgaggaattggtatgcatccattttccacgatgaacactcaataaatggtatggataaatgtggactatcttttccatcgaaacctccatggggagcatggagaagaccttcgtctgtagagccacagcctaagtctcctgtagaaggcctctttgcacttccagaaagccattgccaagctaaggacaatcattgatgagctaagccagagttgcatttcccatcctggccttgtcgaaggccatggaaccttggtccttcattctaactcttctgtgcgacactctagcagtgactagatgtctgggaatcagggaaacctaactttggcctcccccatcttagactgcattcttccaccccttgagcagtatctcgatgcttccctaaagccgagcacccgactacatcatcatggggtatgtgtcatctccccagtggcatgtcaccacatgctaacagtggagcagaatttggacccaatgtctataatgtattttcagtggaagaaaatgtcttagttagggttatattgtggtgaagagataccatgaccatgacaacttgtatagagccaatatttaattgaggctagcttactgtttctgacgtttagtccattatcatcaaggcaggaaacatggtgttgtctaggtagatatggtgttggagaagaaattaagagttctacctcttcattcacaagcatcagaaggagattgtgtgccacactgggtgtatctcaagcatatttaagacatcaaaacttatccccacagtgaaacacttattccaacaaagccatacctactcctataagaccacacctcctaacagtgccactccctatggccaagcattcaaacctatgaatctatggggc

SEQ ID NO: 3251 - DNA, 1000 bp, mus musculus
cccacaactgaacatgcaccatgtattctttcaggccatattcagaatctgtctaattctcccagtctctctatccaggccatacagacaaggacatccatagtattttgtgagcacccgactcgccagcaagaacgaagccacaataggatccttctgcacacatttattgggagagctcaatcacagaggcaaaaagatcctgagccaagaaatggtgctgcttatataggcctaggagtgtcgtgtccatacctgattggttatgctaccagtacctcattaatatgtgttgggccaggcagtgactcggcaaaaaactcttatgcacatgtgcacattggttgtttacccgtaatcatgggtggtggccagtggtagccagcgccatcttgtaatggtgtttgcggcttcccacatctccccctttttattttaataaaatgatgctggactaggcctatgcaattatgtccatctgccacagctcctgttttaggtcgttcctctatgttacagccttacccgtcatagggtaaccctattgccaccaggccccatgtcttaggttggtctgtgcatgaggaaagttgcccgtctctggacaccgcaatgctgtgtgacagtaattgctaaatgacctagggcgagctctacaaaagaggccagccaaattttttaaggaatgaattagtggagaaatcatgatcactctatcgcgtgcaatgaggaaacgtcagcgatgtgcaagggctgatcaatgatcgttgaatctctcttatcccagtgcaatggatccacaaatccgtggggtgcaagagcagagaactcagatgccaaataattcttgagcatagataaccaaacttcaggggaggtgccattttcaatggctaaaagtgcctgagttataatcaccttgtcaggtttttgttgagttctgaatttgcaaaccaaccaaagcatgaacatcagtccacagcatatagcagcacaaaac

SEQ ID NO: 3252 - DNA, 1400 bp, mus musculus
agtctatccttcctcctggccccttattaagatatgcaacctctgtggttagtttgactgtaatacacataacaaaagcttaacagctgatatcacgtacaagagaaaacatacaatatttttcctttagagtctgagttaccttactcaggatgatttattttcatggtccattcatttatctgtgaatttcatagttcatttttttcttaataccttgacattattccattatgtaaaggtacaacactttcactatccatttaccagttgattgacatctagactgtttataatttctggatgttatgaatatagcagaactcctctcctcaaggctcaggaacctatgtagaagaaaagacagaaagagtgtaagagctggacaaaatagatgattccaaggaaacaatgctttccagacaaaacaggattgatgcacatgtgaactcacagcaactgtggcagcatgcacaaagctttcactggttcaagccagactgtatcccagtaatgttgaaagggaagtggatatcaggctagcacccctgaccaagaagctctgtgtaattgatacccactggaaaagtaatatcaatttcctccaatggagtttcaccaggtttatcaatccaatcacagagcacagcagttcccacgcccaggagtagttgaccaacacaaaatgaactcagtggtaattttgtggacttgttttcttttgctttgtctaggcatttttttgtcttattgatctttttattgttttgatttttatttttgtttctttctttgtattttttaagagagaagagaaaacaagcataaagttgggtgggtaggaagatgtagatgatctggattgaacatagaacagagagaggaaaaatttcatgataacgatatcttgtataagccaggcacggtggtgcacacctttaatcccagtacttgggaggcagaggcaggcagatttctgagttcgaggccagcctggtctacaatgtgagctccaggacagctagggctatactttctcgaaaaacaaaacaaaacaaaacaaaaaaaaaacaaaaacaaaaacaatatcttgtataaaaatagtttttcaataaaaaatatctgtcagttgtaaaggtgctgtttttcttttacttaaagtatctcttgaaataattatacttttaaaagaaacattataagaatttgtgaatatttaccaaaggtcatcatctagatttcctgattgttggtattttttatatatgttactcagaagtctccttaatagatacagagacagaggacagacagacagaagatagtgatgatttgaatctgttaagagcaaacctcaggaataatgcccctttatttctaatacttcagaatatattgca

SEQ ID NO: 3253 - DNA, 1400 bp, mus musculus
aaaaaaaaggaaatgtcattctgtgccaatgagtccaaggcgctttctcactttctcttctattagattcagtgtatctggttttatgttgaggtccttgatccacttggacttgagcattgtgcaaagtgacaaatatgtgtctattttcatttttttttttacatacagactgtggggccatgataggcaacctattttggttgaatgaggcttgctcctgcgacccgatagaaaactctacaagggacagaaaagtgagccacattcccagagtcgagtgcctgacaccacagaacccccaactccatgattctatgactataagtcatgaaaacaatgtcccaagcttctggcgttctggctagactccacccccacagttacctgactgtagccaggtatgctccttcccagttacatgatagcccagcccactataaaaggtactacttgctccctccttgctctttaagctcccacctttcttactcgcatctctagccctccttctctctctccttttccccttctctccacgtggccatggccagcctctctctgtcttctctccttatccctacctttctataataaatctctaaaaccatagactgtctctgctcatgccgtgcttgaatgatgggataggctttcccctaactagccttgtctaacctcccgcctgaaggccttcttgcactccagccacagatcagacaaaggactcttgcccacatgggaaccacccagtgccctctccccctgccctctcctccctttggcctttggggctgattgagcagccccagggcccccattctgttctcagctcttccccagtgtccaccagtggggactattggatgcccgaggataagaacctggtgtctaggacttccccttgtccaccactcatcaagctggagtttgtggcttcatatagccagacacccacctgggaccacatggaaagtgtgcagcagtcagttttcccccacccactttatcccctaggtgcccactgccccacaacagacagccagttagaccagtactatttattgaagatgctttcttttttccattgtatatttttggtgcctttgtcaaagatcaagtgactgtaagtgtatggttttatttctgggtcttcaattctattccattgatcaaagtgtctgtgcaaataccatgcagtttttatcactattgctctgtaataaagtttgaggtcagggatggtgattcccccagctgttctcttattgttaaaaattgtttttgctattctgggtttttttgcctttccagatgaatttgagaattgctctttccatttctttgaagaattgtgttgggatttagaatggggattgcattgaatctatagattacca

SEQ ID NO: 3254 - DNA, 1400 bp, mus musculus
aaaaaaaaaaaaacaagttttaatgaaatagataatgaggtagtctgaggttggatgaagcaggatgctataataaatatgtctcagcatctcagcatccttgaggacaaatcttgtcagggacttcattgttgtttgtaaacataaacgtccacaggtattacacagtttggctttagaatatatatggaatgtgtggtatgcacaattggctaaaaatgattctatgctctgtgttaaagcagataaaacatgtttttctttttttcttttaaaaaattttagattttattgttattattttttaattggatattttatttgtttacatttcaaatgttatcccctttcctagttttccttctgcaaatctcctatcccaccgcccccccccttaccctgcttctatgagggtactcctccacacacacacccacctactgctctaacattcctctacactgggggaccaagggcctcccctcccattgatgccagataaggcccctttagctccttttgtccttcccccaactcctccattggggtccctgtgctcaatctgaaggttggctgtgagtatccacatccgtattggttaggatgcagcagagcctctcaggagacagctgtatcaggcttctgtcagcaagcacttcttggcgtcagtaatagtgtctgggtttggtgtctgcatgtgggatggatcttcaggtggggcagtctctgtttttctttataagttactttggattttataatcaaatttcgtttgtatccatgctatttgaaaggaaagcatgataagtcctgaggattctgtagccaacaatagttactggccatgcttagcttaagtcctgactgaagacatttcatgtctcagccagtctcagagctcttcccatgtagaggaatcagcaatacatgttacctgacccatccagcaggtccagttattcgagggtctcgaggggaccttcccctaagaaccaaatgtgtggtgggggggggggggagaaaagacggacaccaagtgcaaggacaccaagtgcgaggacaaggaaccattctgaatagcatcaaggtgtcactgtattagcaaggcttaaatgcacaagcaaaaggggaagtacacagcaggaggaatggggcagtggaaatgcacaagcaaaggaggaagcacttctcagcaggaggaatggggcagtggaaatgcacaagcaaaggaggaagcacttctcagcaggagggatggggcagcggaaatttttcttttggtgactatacggggaagcaggaacttggtggtatcagggtacatcttgtggtcaggacatccggcgctgacttagggctggagcaatctgtggttgttctcagagcggtgcgttggtggc

SEQ ID NO: 3255 - DNA, 1200 bp, mus musculus
gaattaggagctttttgcattttctttgactgttgtgtcaatgttttctatgatattttctgcacctgagattctctcttctatctcttgtattctgttggtgatgcttgtatctatgactcctgatctctttcctaggttttctaattctagggttgtctccctttgtgacttctttattgtccctagttccatttgtagatcacggatggttttattcatttccttctcctgtttgattgtgttttcctggaattctttaatggatttttgtgtttcctctttaagggcttctagctgtttacctgtgttttcctatatttctttaagtgagttatttgcatccttcttaaagtcctctatcatcatcatgagaagtgatttttagacccgaatcttgtttttccggtgtgatggtgtatccaggatttcctatggtgggagaattgggttctgatgatgccaagtaaccttggtttctgttgcttatgttcttatacttgcctcctgccatctgattatctctagtgctaccttccctcactatatctgactgtagctttttcttcctgtgatcatggttgtgtcagaactcctcagagttcagctgtctctgtgatcctgtgattctgggattctgggatcctgagatcttgggtgtttcagagctcctgggagtcaagctgcatctgggaccttgagatcctggtatgaccaagctcctgcgatcctgtgatcctgtgcatgttagagcacctaggagaagagcttcctctgggtgttgtgggaatggctgcaaagttagtgcagttccttcccagactggtcaggtggagttccttggtgcctatgtcccactggtcccagttactccctggtgttggggcaggtgttgtgtcctcttcacatctgatcctatgatcctgggattattagagagcctgggagtggagcacctctggctgctctgatcctatggttggcttttcaagataggatttctttgtgtaactcttgtctattctggaattcattctgtagaccagaatggcctcgaacacagagatttgcctacctctatctcctgggtgttgggattaaaggcatgtgccaccattgccatgtgttcaattcctattctttaaaacactgaaaaataaaacatcctaggctagtcatggaaaaacaaacttaactgaa

SEQ ID NO: 3256 - DNA, 1200 bp, mus musculus
cacatggctacccccacactatcttcagggtaatctcggtggagggccccaaggtccccagaggactctccacgctgcaggctccctagcacacaaggatcttgagatcactggtgagtggaactcaacatcacttccaaaaaaacctggtcttgtgctagcagcaacaggtcaaaggacaaaggcagaccctagcacacccagaatcattcgatcactgagaccagtctatgcaggagagcacgtgggcagcagaagcaacagagcttcttggacagggtcccttccggccttcatacccagccaggagacagagctgagacccagacccctggacaccttcccggccagaggagagtcggcctccagggagggctctgatcccaggaatcaagaggtgaatcttagctccacacttttgtgcaccttccctgcaagaggagagcttgcctgcagagagtgttctgaccactgggacacaggagagagttggtctcccaggagttctgacagaggctaaagaatcacaggaggaataagctccagccagagacagctagaacatctaacaccagagattaccagatggcaaaaggcaaaataaagaatcttactaatagaaaccaagaccactgggcatcttcagaaaccagtacacccaccacagcgagtcctggataccccaacacacccgaaaagcaagattcggatctaaaatcatacctcatgatgctggtagaggattttaagaaggacattaataactcacttaaagaaatgcaggagagccggtcatggtggcacacgcctttaatccaggtactcaggaggcagaggcaggcggatttctgagttcgaggccagcctggtctacaaagtgagttccaagacagccaggactatacagagaaacccagtctcgaaaaaacaaaagaacaaaagaaagaaagaaagagagagagagagagagagagagagagagagagaaagcaagcaagcaagcaggagaacactgctaaacaggtagaagcccttaaagaggaagcaaaaaaaatccctcaaggaattacaggaaaacactccaacactcctaaacatatagaagatcttaaagaggaaacaaaaaaaatcctttaaagaattacaggaaaacacaaccaaacaggtgaggaaattgaacaaaaccatccaagatctaaa

SEQ ID NO: 3257 - DNA, 1000 bp, mus musculus
gaagctctgtattgagtgaagtcctgggtgaatgagtactgttgacatgggcatgccttgctcccatgggaatggaaaagccttccccaggcgagattcacagagatggaaacatctccttcaggggtctgagtgctagtgactgatccatgtatacaaaattagcaacaacttcttcctcccagatgtctgcaacctaccaagcagaaacctccttcctatgtagtctagctaacttctccccgctctgctgcacataataaagcacggtgaggttccacattaagtgaactttgccagaatgccctcagccagtcctggcaaggctctatttggttgtagagcctcatatgcttcctcaattaaactgcatgagactttcttttagttgtggaaattgaggggaacttctacagtaagtatgctccccaaagcccaagtcattgaatctgcactgccttgtttgagcaggttccaccatcaatatcctatataaaacagaggcctgtaacctcctctgtagtgggccagacagaccacattttagacagcacagacggtgaggcctcctcagcaatcctcactgctgctggagcacaaaacaaacaggctgtttattaagaagtgacaaacagaacaggcacgcacacttggaactgtgtgtataccctgccttaagctagcaagcatgcacaggctttgctcccagtgggaagaggaggaaaacaggacaagctaggcctttcagtgtctcggtattctaacttctctccagcagcattattctcagatcccatgaaatagccagaataaactagagtgtgcagataaacacttcctccggaaaaaaccgaccgctacctcatctagatatttaaatagaccaataatcaatagaagttcatcgataggttctaagtaacagttcaataggaaatttctgccacgaaattacacagtatagggttgactatgctaatgattgtacagtgtatatttc

SEQ ID NO: 3258 - DNA, 1200 bp, mus musculus
caatgccaggtattccttcaggaggaaatttctttcctgtcatatactcagaataatcggggggtgactcaccagcctgttcttcagctatgggatcttctttttcattaacatcgtcccacatggtgaagggaaattcgccatcaagaccatcgatctgcttctgctcccactgtttgtcacccaggtcagcgttcacgctttcttctgcaccggcctctataaaggtcgtcaaaccacagagattcccttcataggggctgagctcaccttgaccattctctgccgccagaaagcccgtaaaagaggcagtggtcggctggagatagtcgtcttcattaactggcaaaaccatctggcttccaaattcaggactgaatagtaggttgtctgagtcttggtagcccaccacctcctcctctcgtgtctgaacgacaaacatttccttatcatgatctctactactcaggctgctgcccacaagcggctgcagagcaataacaggagagtggtattggctaccatgcgcccaatcgacacctacatctccatatacttcgatggtttggcctacgctggtttccagagaaaccgcctcgatatcaccgatattatccggtggcagcagctccacaaaatcagcaggaatctctgcgctttctgtgttaagacacagaagtttctctgtctcagaggccatggcggagacccgcggaccggtcctgggtagcaagcaggtgggagagagctgtggagtagagaaaaaatcagggaagaaaagcacgcgctggcgtgctggataaaaccaaaacaaaacgagaaaaaaaaaaaacccaaacgacaaaactacaacaaaaaaacaaacccgagagagcctgacgaaagccgtgcgcttcggagaaaagccgccgtcgtctgaggcactacggtgtttccggaggagcttataggtgtttccggaggacaagacgcatgcgttgaacgtgtcactggatacgtcactgggcgcgccactggaaacgtcactaaactgcgacagaccggcaagaaagcttcttttgcgcatgcctttttgattgcacaccttccttcaggagttgcagaaccttccctgggtttcctgctattttagtttctaactgaacatagatttcctttctgagcttttctatattttatttcattagatttcttacctac

SEQ ID NO: 3259 - DNA, 1200 bp, mus musculus; identical to SEQ ID NO: 3258

SEQ ID NO: 3260 - DNA, 1000 bp, mus musculus
atattttaagtatgcctaagatatgttgctacattagaaaaatggagcaaccgttctttccagaactctgaagatagattctgcattggcatgagggtgatatgatttataagaaatggctcaggtgttgagacttttgttagagatggatgagagcaccaattgctctgtcttacctcttcattaatataccagtatagggatgcatcctttaggacaaaccagtacttcttccatttctgtgaaaaatagctctttgcatctttctttttccaaagccatccttcacagtcaccacggccaagatccttgcaagaaattcttcttttgctcttgcctgatatagctcctaaagagagtgagtggtaatactttatacattttggaaaatgcaaagaattaaagaataatctgtagattctgaaagcaagtcagatacttattattcataaaagtatcatttctgattatgtaatcctcatctcaagactttttgagaccatctgttatcaaagatatatgcatggcaactgatctaaaaccacgttgacttcaagacaatgagaggattaatgaaatgtgctggggaatatcactgtacaaaagcaagtttaaaggttcattttcttttattacctttgtttttcttctttgatttgtgctgcagagaggactgttgaaatgtctgaaatgaaagacaggggaggttagtatgctcagagtgtgatacagaaaactcatagggttacaacaatgactctcagtccaggttagagaagtcattttcccattaatatttcaaacattactttattttcccatctcccttgaagcaggagaaggcctatgtgtcctaattttgttggcagattctagaataagacacattgtgaaactaagtgttcttaacccctccccctgacacacatacacaactgttcaatttgagagatttattgtgtttccaatacatctcgtcgtattctcacataatctgatg

SEQ ID NO: 3261 - DNA, 1000 bp, mus musculus
gaaaatatacgatttttttttgactgtggtagagggatagggttgccatcccacagtcaaaaattctgacccagaattgttcctgtctaaaagaagttcagggacaaaaatggggaagagactgagggaaagaaggtccagtgacaggctgaaattgggatccagctcaaggggaggctccaaggcctgacactactactgatgctatggtgtgtttacagatgggagtctagtatggctgccctggcccaacaagcagctaaaagagtcagctgcagatacttacacccaatcaatggacagaagccagggactcctgtggttgaattagggaaaagctggaagaaactgaggaagagggtgaccccatattaagaccagcagtctcaactaaatgcgaccctcgagatgtctcagacactgagccaccaaccaggcaacatacaccagatgatatgaggccctcaacacatatacagcagagagaggactgccaggtctggcctcagtgagagaaccctaaccctcaagagacttgaagccccaggaaatgggaggtctggtggggtgggggtgggggatggggacatccttttgaagatgagaggggaggggcggaggagggaggaggaggtatgggatgagaaacagtcagaaggccgactgggagaggataatgacgggactgtaaaagaagattaaagaatattaaataaaaagtgtttaacaatcaaaatagaaaacatctgaatttctctaaataactatttaaataactattctaaactaaagagcaaaattgtaatgcatccagaatctacttagtatgtatttttatatacagtgatcatatgctattgtagtcaacattttacttcaatcatgtgaaatgcacacaaatgccaacttaattgttttcatacttacattttctgtggtcccggtaattacatggaggccatcatatgtggatttaatatacataccctaagaaaaagac

SEQ ID NO: 3262 - DNA, 1000 bp, mus musculus
actgtcatagtgagcttctggtgtcaacttcacacaaatgtaaaatcaccctgggaagacgaaacctcaattaaggacatgccttcatcatcttggcttgtgggcatgtctgggggtgggggtcttaattgctcattaatgtaagagggcatagcccactgtgggtgctgccatcccaaaacagatgggtttgaaccaaataagcaaggtagctgagcaggccaaaaggaataagcctccgggcaacagagagcaactaaggaaggcactggcagggtatcctcatatttagcctactttatttacttaattttgtcatttattttattaatttgttcatttatttggcaagaaaacatttatagaagattaaccagtgaaatagtctttgtgatttgcaggaattgttgtggtttaaatactgggccagtattgagaatagagaatctaaattaattctagtcagatttaaatttagccaaatctcagacagagtatttctttagaggtataaccaagtataaaatgtatctagggaaacacctgatttgggcctattattcaaatgtgtggtttagatttattttatactgtcaatctaaattttgatttgtttattacacattgctgtagaaatattgtactcatctttcaaggctgtagtctgtcttttcttattccaactgggttagaacttttgttttattataaatttggtactatggcaatgttcaggccttctgtgttgttattttgaagttgctctcataaagaagcagggcacatatccttaccctatgaatatcatttgtcttgtgacttgctcttgtcaataggtgtcactgggagtgttagtgagccagcttaaagcttagagtttaagaaaccttgtggatttcatatccttttattttcttggctcctgaggaaagtcagagcagaggaaaaagtgctttccattaggccttcacacactgatcaccttgccaggttgattgta

SEQ ID NO: 3263 - DNA, 1000 bp, mus musculus
gttgctctggtgcctgcatacccctacatgtactagcatctttggtactagaaggtactctgaatactacgaaaggagaaatgtaaacaccaacccaatctcaaaccctttgatctacaggggtatactacctgcaagatatgttgctgcaatggttacacaaacctgttgtgggttgccttggtgctgtttgtattttgatgttaatcctgtccctgatcaggaccagatcatgtaatcaggggattccatgtgaacctgctccccattttaactggtcaaataaaggttaaagcctgtgattgggcagtggaagggaaaggtggagctggaagttttagagaaggagagagaaaaagaagaggaggtagaagatgaaacagaaccatgtggcctggagaagctgcaagcagcaagggatctcctggctgggaaacagagtagtgtagtaggaaatctgcccaatttaggtacacagtttataaatattatgtgttgtgtgtttttttgcatgggcatattggggtaggatattctttgcccagcaattgtgctatctggctgattttaaagtgttagaaatgtctgatgtttttgtcagagactcaggtgggcaggagagaaagaacacagccaaggccgaaatcgcccaggctttagaatgagaggattgggcaaaggactgcgctctaggagagaggtaactacagtggattgtggattggtgagacagtgatctcagaaccctggagaggcaaagccagtgtttgtgggagaggcattggctagcaggtgggtggatgctggtcctatagcctacccagaccaggcatgggtttttaaaaattacacacaacataaaccttgtaggagtaactaacaagtatctaatttgatttaaggctcagtccacaagatggaagccatacctgacactgcatcagcgaacaagaacctgacactagatatcccagagacttagtgtaaaagcaaatactac

SEQ ID NO: 3264 - DNA, 1800 bp, mus musculus
tttactgaccctttaagttgaaagtcttcattctcatctataccgattatccttaggtttggtcttctcattgtatcctagatttcctcgatgttttgagttagaatctttttgcattttgcattttctgtgattgttgtgcccatgttctctatggaatcttctgcacctgagattctctcttctgtctcttgtattctgttgctgatgctcaaatctatggctcctgatttctttcctaggatttctatctccagagttgtctccctttgggttttctttattgtttctacttccatttttagattctggatggttttgttcaattctttcacctgttcggtagtattttcctgtaactctttaagggatttttgtgttttctctttaaggacttctagctgtttacctgtgttctcctgtatttcttaaaggagttattgatttccttcttaaagtcttccatcatcatcatgagaagtgactttagatccatatcttgcttttctggtgtgatggtatatccaggacttactatggtgggagtgtttggttctgatgataccaagtaaccttggtttctgttgattctgtttttatgcttgccttctgccatctgattatctcaagtgcttgttgccctcaatatatctgattggaacctgtccttcctgtaatcctggttgattcaggactcctcagagtccagctttctctgtgatcctatgattctggtatcctgtgaacctgagattctgggtgtgtcagagttcttggcagtcaagcttactctgagaccctgaggtccttgtttgaccaagctcctgggattctgggatcctgaaatcctaagatcttgggcatgttacatcgcctggaattggtgtctcctctgtgtaccatggggcggtctgatgtgttcaaaatcaaggtataccagcactaatcagaaggaaaccaatctgctggtcaggcagagttcctgtgtccttgctcctgctgtcatagacttatcacgatgggtttagaacagatgttgtgttccactcaccagtgaacctaaggtcctggatgttgtagggcacctgtgccatggagaatcctctggggaagtgggaccatccgctgagtttgtgcccaaggtctacactttgtcttgaatattaatgtatcatggtacacttcccacattgatggttatttttctctcagtacttggaaaacatataatgattctgttgccattgcaaagaaatatattcactttcagtttattcttcatgcctcagcactttgtattccccttgtctatatcgaggtggtgagacctcaataatttttcatcatgtctcccttcacctgaatctgttttcttgccttaaccacccattgaactttgttccctttagtaattatatttctatttctagaaatactatctagttgtattaatctgtctgggaatatttggtactgggccttctgttacttctgtaataactttaaacattcttattttgttgtaaatagttgttcttttatctgaattttaggtggtgtaattctgctgattcttcttcacagtactccctaccccctacataccataagcatcatctagcttgggattgtgagtgcctacttgatttgcctttatcgatgaaagccttgtgatgagtagaacatggtttttggaaaggtttgtgttttctttgattgggcaaactcaaaatgactttaatttcttctattgattgagtttctcctaagagatataattgacataaatttgaacatttc

SEQ ID NO: 3265 - DNA, 1000 bp, mus musculus
tgggtgcagagtcggcggacacccccaaggtctctagaggacagcttctgaggaagaccctatttcaagctccagacatcccggcactttccctgccagaggagaggtatccgccccacgcgggagggctttgcctgagctcctaggggagccatcttggttcccggatccctctgagacagatctgtgaaggtgagagtgtgcactacagaagctaacaggttctgggacaggccaaagcaacacagcttctgggacaggcccagtttcaggccttcatcttctgccaggaggcagatccaaatgccagatatctgtacaccttccctgtaagaggagagcttgccttcagagagtgctctgaccactgaaactcaggagagagctagtctcacaggtctgctaatagaggctaacagaatcacaagaggaacaagctctaaccagagacaactataacaactaactccagagattaccagatggtgaaaggcaacttaggaatcttactaacataaaccaagaccactcaccataatcaggacacagcactcccacctcacccagtctggggcaccccaacacacctgaaaagctagactcggatttaaaagcatatctcatgatgatggtagacgacatcaagaaggactttaataagtcacttaaagaaatacaggagaacactgagaaagagttacaagtccttaaagaaaaacaggaaaacacaaccaaacaggtagaagtccttaaagaaaaaacaggaaaaaaacatccaaacaggtgatggaaatgaacaaaaccatactagacctaaaaaggaaagtagacacaataaagaaaacccaaagtgaggcaacgctgcagatagaaaccctaggaaagaaacctagaaccatagatgcgagcatcagcaacagaatataagagatggaagagagaatctcaggtgcagaagattccatagaaaacatcggcacaacaatcaaagaaattgcaa

SEQ ID NO: 3266 - DNA, 1200 bp, mus musculus
actctaaatgaacgtttctcaagaataaaaaacagacaggatgcagatttcaatcaaacgaaatcaaattcagatccagaatttcacaggtaatgattaattactgtcttttcacttacctcagaagaatagtccagctttctgagctcgctttccttctgagcttggtatagaacctagaagtgcactttgtacgtaccaaaagcagtctgagcagctgctggacccatacacagtgctaacttaccactgtttgaaaagaaagattcacttgctctcattctgctatgtctgtagtagctgtctactgaagggaatgctggaaaaggtcagccattgaaatcagggcttactttaagtggtcacaaatgattgttctgaggtctgatgaaaacatgcatgccttctgtcggtacttgtctgagcagagggtgcaccctgtatgcagtactgagatgaatcaatgttataattttatccatcaccaaaattgagtttgaggtcacactagtgattggagaaccaccaagacttccctacaatacacccatagggtatgtatggcttagtagactgccatgtaggtgaaagcctatcatggcgtggtggcacacggcattagtcccagcacttgggaaacaggcaggcagatacctgaatttaagggagtgagtttcaaaacagccagggctacattagaaagaccctatcttaaaagacaaaagaaatgaaaagctacctgacagcaggttgttttggctttttctaagacctactggtttatttctaattctatcctgtagtaaaagaatcagtgtataacacaattagcataattatttaattatgtgcctttattattttaggcgaatagatatgtctttggatgattttcagaataaatatacgatggtatatgaaccagataaggtaagtgagtacaattattattgctatagtagtgggaaaggagttaaaggtctataaagaaaggatgacattcaggaatataaattgaaaaagttctccaagtgactgatggcagtccaggatggagtgagatgctgaaaaggacaaactttttctttgggaggcatggttagtaagcataacaactttgaaaagttgatttaaaattacattgaatactcatccccaaacttctcagagtaaagcttatagaaaatatggttgatagcc

SEQ ID NO: 3267 - DNA, 1200 bp, mus musculus
cgtgttcacccacttattgaataatgctcctattctcatgcccttggttttctttttatgctttacttagatataatgtacacagcataaattccacttgtcctaaacatcactgtctttcttagtgatttttaataaattatagagttgttcagccattgcactgatccaatattggactatttacatcacttcccaagctgcccacttgcagacagtccctattctttgttttgttttgttttgtttttctcgagacagggtttctctgtatagccctgactatcctggaactcactttgtacaccaggctggccttgaactcagaaatccgcctgcctctgcctcccaagtgctgagattaaaggcgtgtgccaccatgcctggctgacaatccctattctttccctcagcctcaagcaactgctaatctttacatattttatgccttttcatgtagataaactgtatattatgtattattttgtgcctttctttcacttagcatgattatttaaaaattcatctatgatgtaactgcactcgcagtttaattctttttttttttttttttttatgtatagcattccattgtgtggatattccacatctttctcgctattcctcagtaatacacacttatgttgtttctactttttggctttgaacaatactactgtgaacattccagtacaagtatttatgtagacatgtattcattttcttggagcttcctggttctttgtcactagtgtgcatactctaaaggtattctggagagactggtctgcacaggtgagagtgcagactacagaagctacacagcttctgggacaggcagaagcgacacagcttctgaggcagaccccatttcgggctccagacatccaggcaccatcctcgccagaggagaggtgtccaccccacccaggagggctctgccagagcacctgggggagccatcttgggtcctggatccctcagagactagtctgcacaggtgagagtgtggactacagaagctacacagcttctgggacaggccctgttttgggccttcatcttcagccaagaggcagatccgaaggccagatatctgcaccttccctgtaagaggagagcttgcctgcagagagtactctgaccactgaaactcaagagagatctagacacccaggtctgctgacagaggctaataga

SEQ ID NO: 3268 - DNA, 1200 bp, mus musculus
cttggatggttttattcaattccatcacctgtttgtttgtgttttcctgcaattctttaagggattttgtacttcctctttaatgtcttcaacctgtttagcagtgttctcctgtatttctttaagtgagttattaaagtccttcttgttgtcctctaccatcatcatgagctatgcttttaaatccaggtctagctttttgggtgtgtaccctggactgggcgaagtaggagtgctgtgttctgatgatggtgagtggtcttggtttctgttattaagattcttacgtttacctttccctgtctcgtaatctctggagttagttgttatagttgtctctgtttagagattgttcctctggtgattctcttaccctctttcagcagacctgggagactagctctctcctctgagtttcagtggtcagagcactatctgcaggcaagctctcctgttacagggaaggtgcacagatatctggcgttcggacctccctcctggccgaagatgaaggcccaaaacaggacctttcccagaagccgtgttgctttggcctgtcacagaagctgttagactgttccacactctcacctatgcagattactttcggtggagtctcagaaccaagatatcttcctctgatcctcaggcaaagtcctcccgggccagatggaccgctgtattctggccaggaaggtggccggatgtctggagctcgaaaaaggcgctcaggcattttcttaattggtgattgatggtggatcacccagcccattgtgtgtggtgccaccctgggttggtggtcttgggttctataagaaaccaggctaatcaagtcatgagggagcaagccagtaagtagcacccctccataggctccatatgtgctcctgtctccaggttactgtcctgacttccttttatgatgaactgtgatgtggaagagtaagtgaaataaaccctttccttcataagttgctttgataatgatgtttttatcatagcagtagacaccctatctaagataacttctttttcagtttttagatgtaagctttatatatcaaaacatttaaactagcagtattataatagccagaagctggaaagaacccagatgcccctcaacagaggaatggatacagaaaatgtggtacatctacacaatggagtactactcagctattaaaaagaatgaat

SEQ ID NO: 3269 - DNA, 1200 bp, mus musculus
acaagaatgacaaggaccccaaagtgggttaacacagcagcttcttgtagctttttctctttcagctctcttccccagcagtttcttcttcccctgtccttcttgcagcaagggctatactcctattctctttgcaactgacctcatctcgcttcacaccacctcatccaatcagaaccacacacactccatgtatgagctcaggtcggtcacagataggctgacaggtccagatcatgagggatagtctagcttggcaggcagcttcactatgcatgtctggcaaggcagtagacatgtggggttcacggggcctggcaatgagccagggcgccatcttggtccatgagaccgcacccacctcctgcagtatctatggttccagatttctttcctagggtttctatctccagcattttctcactttgggttttctttattgtttctacttccctttttaggtcttggatggttttgttcaattctatcacctgtttgcttgtgttttcctgtatttctttaaggacttctacctctttagcagtgttctcctctatttctttaagtgagttattaaagcccttcttgatgtcctctaccagcatcatgagatatgattttaaatccgagtcttgcttttcgggtgtgttggggtatccaggactggctgaggtgggagtactgtgttctgatgatggtgcatggtcttggtttcttttagtaacatcttatatctgcctttcgccatctggtaatctctggagttagttgttatagttgtctctggttgaagcttgttcctcctgtgattctgttagtctttgtcagcagacctgggagtctagctctctcctgagtctcagtagtcagagtactctctttaggcaagctctcctcttgcagggaaggtgtacagttatctggtgttcagacctgcctcctggctgaagatgaaggcccgaaacaggcctatcccagaagctatattgcttctgcctgtcccagaagctttgtagcttctttacagagccctcccaggagaacacctcttctctggcggggaaggtgcctggatgtctggagcctgaaatggggtctgtcctagaagctgtgtagcttctgcctgtcccagaatctgtgtttcttcctgtagtccacaatctcacctgtgcagactagtctctgagggatctgggacct

SEQ ID NO: 3270 - DNA, 1600 bp, mus musculus
ttttttgaaaatctaatgtaatttggctatttcattactatcttattatttcagtctttgcaacttaaaccctttaattattcatattagttttgattggcaaatcacaattctatacacttataggtacagtgtagtgttttgaccaattatgcacatacaactttggaagaataaattcaaataattatcatatccatttccttgctcacaaatacttttgtgagttatttgaaatttagtatcgtagtttttatagaaaccagatagcatagcttaagttgtagttcatcaaatttcatactgaatgaagataaatattttttatttatatacagtattttagatgtttttaaaaacctagaaagatctaagggaatgatacttaattcaatgactctcagttggtgcctcaactcttcttatatccacactttctgccccttaaacaactagcatgatgagcagtatgactgacaatagcattaatttttcatatattatatatatatatataatccatatatttttaaaaattttatgtgtttaaattaatttatttattcattttacatcccaatatcaacccccctccttccagtcccagttttcacagttcctcccattcctaccttctcttctcttctgaaacagggaaccttccctgggtgtcagtgcccctcccacctccactttccaggcacatcagtcactttaggactaggcatatcctctctcactgataccagacaaggtggtccagttaacagaatgggatccacaggcaggcaacaaattcagtgacaacctgcctctagttgttagagaaccttcatgaagaccaagctgcacatctgctacatatgtgcagttggtgggggtgggggtagggcagctaggaccatcccacactttctcttcggttggtggttcagtctctgtgagcccccaaaggtccaggttagttgactcttttggtcttcctgtggagttcctatctcctttgggtttctcaatccttctcccaactcttccacccctggactccatctaaggtttgtctgtgggtctctatatctgtttcatttagctgctgggtggagcctctcagaggatcttgtctgcaagcataacagaataccacttacagtgtcaggggtagtattgtagatatatatagtcatgctgctatgcaaaaatctcaaaattcagttttcctttctatctgaaatatttataccctttgatcaattacttcccattggctccccccatgtcttcattaaatgcttaatattttactctctacttttatgatttcaattttctagggttttacatagaagtgatattagattatgcagcactctctttctatgtctagtttattttacctaacacagtttattccaggatgatccatgtcatttcaatttacaaggtttcttccttttaaaggctgacattgtatatacatattacattttctttatccattcatctgttgataggcacttggtttgtttatatattttggctgttgtaaataatgaaatacaaatattgccttaaaatattgatctaatttactttctatata

SEQ ID NO: 3271 - DNA, 1200 bp, mus musculus
taaagactttttagaatttaattaaaatgaaggtacaacatatccaaccttatgggacacaatgaaaggagtggtaagaggaaaactcatagctctgactgctgccaaaagaaactggagagagcatacactagcagtttaacagcacacctgaaatctctagaacaaacaaaagcaaatacacccaagaggagtagacagcaggaaccaatcaaacttagggctgaaaccaaccaagtagaaacaaaaagaactatacaaagaatcaacaaaaccaggagctggttctttgagaaaatctacaagatagataaacccttagccagactagcaaacaggcacagagacagtatccaaattaacaaaatcagaaatgaaaagagagatataacaacagaagctgaggaaattaaaaaatcatcagctcctactacaaaagcccgtactcaacacaagtggaaaatctgcgtgatatggaaaattttatagagagattccaaatgccgaagttaaatcaggatcagataaaccatctaaacagtctcataccacataaaggaataaaagcagtcatgaaaagtctcccaacctgggtggggctgtctctgtatgtctttccttccgtcttaggtctgaaccttgtctctgtaacagggcccctaataaaggagctagagaaactatccaaggagctaaaggggtctgcaaccctgtaggaggaactaaccagtacccccagagctgtgtctctagttgcatatgtagcagaggatggccttgtcagaggagaggcccttggtattgcaaagatcatatttcccagtacaggggaatgccagggctaggaagcgggagtgggtgggagtgggtgggctggggagcagggcaggggggagggtatagggggctttgggatagcatttgaaatgtaaatgaagaaaatatctaaaaaaaaaaaaaagaaaagaaaaaagtctcccaacccctccccaaaaaattaaaaatcctaagaccagatggttttagtgcagaattctatccgactttcaaagaaaaactaataccaatactcttcaccctattccacaaaaaataaacagaaggaacactacccaaatctttctacgaagccacaattatactgataccaaaaccacacaaagacacaacaaggagaacatcagaacaatttcccttagg

SEQ ID NO: 3272 - DNA, 1600 bp, mus musculus
atgctcctcaacagaggaatggatacataaaatttggtaaatttacacaatggagtactactcagctattaaaaacaatgattttctgaattttgcaggcgaatggatggaactaaaaaccatcaccctgagtgaggttacccagtcagaaaagaacacacatcatatgtactcaatgataagtggatattagcccaaaagctcagaatacctatgatacaactcacagaccatgtgaagctcaagaagaaggaagaccaaagtggggatgctgcagttccacttagaagggggaacaaaataatcatgggaagtagagggaggtatagacctgggaggaagagtggaggggaagggaaaagggggccaggttcaggtatgggagaagacaagggagaaatacagagggtcaggaaattgaacagaggtgtgtagcagtgggggatagggaactggggggtagccactagaaagtcccagatgccaggaaatcaagagactctcaggactcaatggggatgacattagcttaaatgtcaacaaaggggagatagaacctgtagagaccttatttagaggctaggcatagcctacagttgagggatgggggcacccacccatctttaaaatattaacccagaattgttcccatctaaaggaaatgcaggggccaagactgaagattgaaggaaaggccacatagagactgttccatctaggaatccatcccatctgcatataccaaacccagacactattgctgatgccaggaagtacttgctgacaggagcctggtatagctctcccctgagaggctctgcaagagctgaaccaatgcatatgtgggtgcttgcagccaacaatcagactgagcatggggaccccaatggagtagttaggggaaggattgaaggaactgaagggatttgcaatcccataggaagaacaacaatatcaaccaaagaactttcctatccctcagagttcccagggactaaaccactaaccaaacagtacacatggagggacccatggctccagctgtatattagcagaggatggccttatctggcatcaatgggaggggagcccattggtgctgtggaggttctatgccccagtgtaggggaatgttaaggtggtgacagcaggagtgggtgggtgggtgggggatcaccctcatagaagcatggggggggggaatggaatagggagtttgtggaggggaaaccaggaaggggaataacatttgaaatgtaaataaataaaataaccgggtcgccatcttggttccgggactcagcagaacttaggaaattagtctgaacaggttagagggtgcgccagagaaccggacagcttctgggacgggcagaagcacagagccgctgaggcagcacccttggcgggccgcagacagccggccaccgtccggaccagaggacaggtgtccgcctggcttgggaggcggcctcagccacagcagcagcggtcgccatcttggttccgggactcaccagaacttaggaaattagtctgaacaggttagagggtgcgccagagaaccggacagcttctgggacgggcagaagcacagagc

SEQ ID NO: 3273 - DNA, 1000 bp, mus musculus
acagtctatgtgtatccatataaatatataagttagatgaagttacataacttaggctggcaatgctccctgaaacagccatagactatatcttagactcatgtagtcaaatgcttggcccatagggagtggcacaactaggaggtctggcattgttagaggaagtatgtgactgtggaggtgagattttgaggtcttaaattcccaagcttgcctgtgtgaaaaagccagtctcctcttggttgcctttggatcaagatgttaaattagtggctcctccagcagcatgtctgcctgcaaattgctatgattccagcaatgatggtaatggaccaaacttctgaaactctaggctagccccaattaaacgttaggctttttaaattttgtcttggtcatggtgtctcttcacagcaatggaaatcctaactaagacagactatcaacaaaaccccaaatactaggcttgagatatcctcattcatgttgtttttcagaggagtccaattgattctcaaaataatgtgcgctgttgctgttgctcttggtggtctcccagagacacaatgcacctcagacacaagacccagaggacataacatataacttgcatggctgtcctttaagaggcccaacaagcagctggcttaggcagatgcaaatacttacacccaaacattggactgaagttggggaccatggtggttgagttagagaaaggctagaagaagctgaggaggagggcaccctcataggaagactagcagtctcaactaacctgtacacctgagatctctcactcactgagccaccaaccaggcagtatacatgagctggtctgaggctcccaacacatatatagtagaggacttcctggtctagattcagtgggagaagatgctcctaaccctctagagacttgaggccccagggagtggggaggcctagtgggcatgggtagacatcctcttggagacagagggaggaggaattggatgag

SEQ ID NO: 3274 - DNA, 1000 bp, mus musculus
gcaatatgccatccaacataaaacacccatacacacacacacacacacacacacaaacacagagagagagagagagagagagagagagagagagagagagagagagagagagaagcaagaaaacaggcaaaaaacccaaagcatagaaaatgtggaggttgtagtgtgttacagtgtgttccatagtaaattcttcagtccatacatcttcacttacaaatgttcattataatgaggccttaatctagttcaagatctctggcttctgtgacaccatcaatattggatccacactgagtctccttccagttatcctgttattgctctgtatcatggaattcctatagctttggaatagcagcactgggccttttacatgccccagtctttcacaaataatatagattttgggatgggtcaattcagagccctggatctgggtctgggtggtagctgagctgctcacatcacctacctgcagactctcccttatccatactaccatagcaagctctccagcactgctccagcttggccacccatgggcaggaggcaggctcagctatcctgttttcatgtccttggagccagctcacctgtgtcttagccatcacaccactgccactgggccgcctctactgcattgcccaggcaaggtgtaggggcggctaatcagtaaagtacaactagtgagctgtcatgatcccagggtgtgctctcctggctactgcaggtattggaaggaggacacgggcatcaccccctcacccataccaccttttgctagatgagtggtgggactcctatgttcttgccctcattttagctaacctgtgacccttccctcagggccaagtctcctatgctccccagataaaatacaggatcccactttcctgaatgctgcagcaggtgagggaaaagaccaggccacttgctctcatgaactcagggccagttctccagactggacttacagaagtggtgatgggtgaggcag

SEQ ID NO: 3275 - DNA, 1400 bp, mus musculus
attttctatggtaacttccatacctgagattctctctatctcttgtattgtgttggtgatgcttgcatctgtagctcctgatctctttcctaaggtgtccatcaccagggttgcctccatttgtgttttctttattgtttctatttccatttttagttcttggaccgttttgttcaattccttcatgtgcttgatttcttaaatcctgtatttcttaagggatttgtttcttccttcagggcttataactgttttcctttgtttttctgtatttcttcaagggtgttctttatatcctccttaaagtcctgtatcatctttgtgagacaggattttaggtcattatcttgcttttcatgtgtgttagggtagccagggcttgctgtgtgtggttgagttctgatggtgccaaattgcatagagttctgtcatttaggttcttacacttgcctctgaccatctggttctctctgttgttaactgccctgggtgtctctgactgaatcggtctccttggaggcaggttgactctgggaactgagttagggctagtttccttggaggcaggcagtgttgtctctggttagggtgggcctcccatgtctctggttaaagcaggcctcttgtgcccctggttacagtagaccagctgtgcccttgattactatggagctcctggaaggctctcaggctgtagctcaggctgtaatgtttgagcaggtatagggtcactgatctgaccccaggtggagaaatgggccagaggaaggtagagctctgtgtcctttgtcattatagacctcctgggaagcatgcagcatgcagtattgccaggttgctgatctgggctggtggagaagtgcctaggaaggaaagaagtgcttgggggttggggagagaagggagtgtagttcctgagtcagctgggctgtgtgggtatcctagctgatgtgggtatttgggtgaaattctcacccgtggccttggtcactgtgcatctccttggaagcatgtgggcttcagtgtttgggtatgcatctgtcaggccactgatctggtccggtggggggtaaatctgcatttttttaatgattatgggttcattgttttcttggtattcagggttttttgtttgtttgtttgtttgtttgagttctttatatattctagacattaatctattggatcctctatagcttctcaaatgcctttacacttttctttggtctgaagtatttcagtaaactctgtagagctgacctagtgatcataaattgctttagtttgtcaggaactttttatttcgcttttaattagaatagataattttgttgggtataatagctaaggttgatagttctgttctttcacaaactgtacattatctttataagcctttt

SEQ ID NO: 3276 - DNA, 1200 bp, mus musculus
gttgcctccatttgtgttttctttattgcttctattttcatttttaggtcttggaccattttgttcattttctttacctgtttggttgtattttcctgcctttatttaagggatttgtttccactttaagtgcttttacctgtttggctgtgatttcctgtacttctttatgggaattatttatatcctctttaaaggtttctatcttcataagatggaatttgaggtcagaatcttgttccttgggtgtgttgggataatcagggcatgctgttgtagaaagagctgtgtcctgatgttgactaattgcattggtttctgttgattatgttcttgtgtgtacctttcactatcttgatatccctggtgttagccggcctggatatcctagattggagaagtcctctcaggatgcaggtggagctgtatgtcctgggttagatcaggcctccttgttggaggcagtgctgtgtctctggttagagcaagcctccttgaaggaggcagtgctttgtctctggctatcataggcctcctgtggctctggttacagcaggcttcctggcagacagcaggcctgtagggtttgggtgtaggcacactgatcccctggcagagcaggtagagatgtagactggaaagagatagggttatgacagggagggacagagcccctgtaactgctgggctctgtggggtcccagctggcttggagtttgtggtggggatctcacatgtgtccctgattagagcagtaatcctgggagacaggtaggcctgggaccagggggtgaggaaactattttctaaagagaaacaatgttgatttatttggagggaaggctgttcacttaaaaaataaaaaaaccttcctttctggaccctatttctttatagaaggaataggaaataaagaattataagattgttcctataaaaggataatacagctacagtcactgttcttgtccttcatgaaaggtcagatagcaaatacttctggctagctcttcaaatctaccattgtataataacatccatgtataatgcaaaagttaaaaggcacagttgtattcccagatacttttaaacaaacagctgccagatttggactattggatgttgaattctgatccctgatctatggtattagctaaacatataaccagatgattacatgctttagaaagaaaagagtct

SEQ ID NO: 3277 - DNA, 1400 bp, mus musculus
atgtttgtgtgtgaatctgtataagcacataacttcttctgctttaccaataacatgctaaaaccccaaataaaaatcttgtctccatgaagaatttactcagaatctattgtcttctttcagttttagaaatatttgaaaggacttccacatcatgtatgagtcttctctgatccagttacagatttttacatgttttaaaagtctgtcttttctatgttcaatagctgtatttctctataataaaatccacatatatgtatattttggttagtttaattttatttcagatgttcagtagaaattctaaaagcataaccaaattcaattgagtacttttaagtgaaataataattattattctaaatttctatactatagagcaccataaattgtaaaattgtagataatggggaaactagtctgaacaggtgagagggtgcaccacagaacaggacagcttctgggacaagcagagccacagagccactgaggcagcacccttttcgggccacagacagccggccaccatcctgaccagaggacaggtatccgcctggctcggaaggcctcagcctcaggagcagcaggtgccaccttggttctgggactccaccgaacttagaaaactagtctgaacaggtgagagggtgcaccacagaacatgacagcttctgggacaggtggagccacagagcaactgaggcagcacccttttcgggctgcagacagccggccaccctccctaccagaggataggtgtccgcctggcatggaagacctcagcctgaggagcaggggacgccaccttggttccaggaatccgctgaacttaggaacttagtctgcataggtgagagtgtgcaccacagaagctgacagcttctgggacctgccaaagcaacacagcttctgggaaaggttctgttttgggccttcttcttcagccaggaggaggtccaaatgaagaataaagataaaaaattactgaactcttcctcaccccagagcctgacccctcccatctagagattgttcccagaacactcctgaactcttcaccccagaatgcattcctgaactcctcaccctagagttcgaaccctcccaactaaagacttttccaagaacatttttgagataagggcctcctggaacaacctcagaatgaaccgggtacattgccaaataataggacatgaccccttagttacatagaattcccttggcagaaccccttgtcccttggcagaaccccttagttatgcaaacttgtactttccctgccccgctctccccccttgagtttttcctatataagcctgtgaaaaatttggctcgaggtcgattctcctctacaccatactaggtgcatgagtttcgaacccagagctctggtc

SEQ ID NO: 3278 - DNA, 1200 bp, mus musculus
gtcctctagggaccgtgggggtgtccgctgactctgcgcacaaggtgatccggtgctggccccgacctgaagggacttgtgatcctggtcaggccaggttttctgcttccctaatgctgtctcaggtcccacacgattggtttggaacagaagttgagttccacacaccagtggtcctaagattgcatggagagtcctctagggaccttgggggtgtccgccaactccgcactcctgttagtaagattcttatgtttgcctttcaccatctggtaatcactggtgttagatgatctagctgtatctggctggagatttttcctcctgtgattctgttagtctctgttggagctcctgggagtccaactctcccctgagtcccagtggtcagagcactctctgcaggcaagctctcctcttgcaggtaaggtgcacagaggtctggcactcagatatgcttcttggctgaagatgaagaccctttgggcccctgttcaagaaactctgttgcttctctggcccatgagctctcctgtgtgaactggtttctgagagacccaggatacaagatggtgctctcacctgagtcctggggtcagagccctctctggaggccaactctcctcagtgatcttaagatcctgggtgtgctagggcacctgaggtgtgcagagtcctttggggacagtggaactgtccgctgagttcacacccaaggtggccaggggctggcgccagattcagctactggtcaggtgggtttcctgtgtccctgttcctgctggcacaggcccctcttggttgttttggagcagttgttgtgttacactcaccagtgatcctaagatcctgtgtgtgctagggcacctgtggtgtggagagtcctctgagaactatgggactgtctgccgatttcacgcacaaggtggcccagggctggcactcaccagaatgaaccccagctgctggtcccattccaattattttttgcaagcaactatttgtagtaaatttacatctgctcaaaatacctagagagcttcctttcaaggaacttattagaaattatatctgtaatttcacctctaatttctatcagcaaaaatgaaacataagcaaccagaccacagagctctcaatctgtggctatgtatcctccccagttttctgttgttttatttagctaacaatgaaataagt

SEQ ID NO: 3279 - DNA, 1000 bp, mus musculus
gaagcacctgaaaaaatattcaacatccttaatcatcagggaaatgcaaatcaaaacaacccagaaacttagactacccaagatataagatacaatttgcaaaacacgtgaaactgaaaaagaatgaagaccaaagtgtggaccctgccccttcttagaattgggaacaaaggatggaccatctagagactgccatacccggggatccatcccataatcagcctctaaaggctgacaccattgcacacactagcaaggttttgctgaaacgaccctgatatggtgaaaagtctcttgtgatgttatgccagggcctagcaaacacagaaatcgatgctcacagtcagctactgggtggatcacagggcccctaatggtgcagctagagaaagcacccaatgagctaaaggggtctgcaaccctataggtagaacaacaatatgaactacccagtacccaccaatgctcctttctctagttgcatacgtagcagaatatggcctagtcgtccatcagtggaaagaaaggccctttgggtttgcaaaatttatatgcctcagtataggggaacgccagggccaagaagggggagtgggtaggtaggggactgagggcaggagggtatgggggacttttgtgatagcattggaaatgtaaatgaagaaaatacctaattaaaattaaaaaacaaaataacaaaaaaaatagaaaataaataaaaagttgccatcgaagaaggcagaaatgaaaaaaaaaatgtatgcactgaagccattcattatctctcctgagtcagttagttgataaagcaaggtatgaaattcttctgttccatgtgcttacttaccagttgggctgcagttgtttggaagatatactggaaatgaagcattgaagattgtgcactgagtattgctcgcagttgagactgagcacaggctcccctagagcttctgaataagatgtgctggtgctcctccacagagctactcactgagat

SEQ ID NO: 3280 - DNA, 1000 bp, mus musculus
gagggggaggggagggggaggaggagaaggaataacaacaaagtaataataatccttttagatagagaaatgccataaaaacaacacaaacttgctgccaacccttcaccaagcttcccctaacattcgtttgcataatcatagctcagtgattaaaaccagcaaactggcaccagaacagtgctgttaactaagctaagctgtttgttcaaacctcactagcttttcttccaagggcctttcttttattttattaggtattttcctcatttacatttcccaatgctatcccaaaagtcccccataccctccccccactcctctacccacccactccccctttttggccctggcgttcccctgtactggggcatataaagtttgcaagtccaatgggcctctctttccagtgatggccgactaggccatcttttgatacatatgcagctagagacaagagctccggggtactggttagttcatatttttgtttcacctatagggttgcagttccctttagttccttgggtgctttctctagttcctccattgggggccctgtgatccatccaatagctgactgtgaacatccacttctttgtttgctaggccccagcctttgtgtagcagaacgctgtgcagtaacccacatgacatttacttgtcgtagtcccttagcctccctccccatcatagttccttactctttctatggctttcaacttcaactcaaatacaacaacaacaacaataaaacaacaaaacaaagtgcaagaaagaaaaaaatggacaggatctggcatagtcatgctggcctcagactcagtagataaccaaagctcaccttgaacttctgatcctctttcctctaccttcttcagtgctggggttacaggtgtgcaaatactctgctcagttttatgccatgctgaggacagaactcagggtctcacacatggtaggcaagcatgctaccaaatgtgctacatccctagccctt

SEQ ID NO: 3281 - DNA, 1400 bp, mus musculus
aggagttgaggcataaaattcacacattaaaggcctgtctatatcaccaagagataccaaagccaccttgggtaacctagccagaaaatggaaacaacctaaatgtcccgcaactgaagaatggatgcagaaaacgtggtatacaacggaatactattcagctattaaaacaaggatatcatgaagtttgtctgaaaatagatagaaatagaacacctgtgataaccaagaccccacagagacaaacatggtatgtactcacttacaagtagatgttagctgtaaagtaaaggttaatcatggtacaatccacagacccagagaggctaagaaacaaggaggatattaaagggagacacaaggatcttcccttgaagggaaaatagaatagcttttgtgggtgggcatggggtgggtgaggatgaaaataggggtaatcaggtactgggggaagaatactgggagagacaactggaattgaggagcatttctggagtgagggagaaacctagtgcaatagaaacttcatggaatctatgggggtgacagtagcgaagagacccagtaatgggggacatggagactgaactggctatcatttgtaaccaggcaagtcctcaagtggagggactgggacactactacagcaacaaaatctccaacctagtttgtcatacctggagaatgtgctgggaccagagcctagaataatcattatcagatagaccagagagacttcattcagcaaacagtgggaccagatgcagagtcccacagtcaaattttaggcagagcttggggagtcctgagaaggagggtagaaatgattggaggagccaaaggtatcaaggataccacaagaatcaactgacaaagactcaagtgggctcacagagatcaggaagcctgtacagggttgacctaggtcctctgcatgtatgttatgcgcgtgtaagtctgtgttcttatgagattcctaacagtgggagcagtggctgtttctgactctttttcatgcctttgggagccatttcctcctattgggctgcctcatccagtcttgatatgagaatatgtgtttggtcttaagttatgccatatttggttgatgtccatggaaggcttggtcttttctaaggggaggcaaatggggtaattctggaagaaagaggagttagggagagagacggggaagaggagagaaggaaaactgcagttgggatgtaatatacgaaaaaggaataaataaacagtaaaaaaataaaaacatcataggcttagttctaggctaaagatcaataacaaaaaagcatgtaaacaatcattcagcataaattgtaaatcatatactgtctgtattctattgaccatagaaatttatcttgataaggattgttaaa

SEQ ID NO: 3282 - DNA, 1000 bp, mus musculus
atcagcacttctcaatttcatcttgtccccctcccattatgaagtacatgaggtcttgggttgtagaaaacacactaaatttagattttcttattgtcagaaaaaatggaatgcactttaaattttttattgtgtatgcatgtacatgctgtgtgtatgtgtcaaggtatttggcagcaaaggtaccagttcttcaggtgtcagttctccttccaccctgttgaggtagggattctcttgttgtgaatgctagccatgtactccaggctatatgacccctaaatctgcttcccctctctctgcaagaatgcgatggttatctaaccacagtcgcatatgatttcaaccccagcacttcagaaatagagacaaatgatgttgaggccaacctagtctacataccaagttccaggccagctgtggctacatagtgagaccctatctcaaacaaacaaacaacaacaaaaagaatgctgggatgatagatgtatgccactacagctagattttactgatgtctttacatacattccagggattgaacttaatatgttaagcttaaatggcaagtgcttttacccactgggccattttgccgaccatgctttttttgataccttgcttgcttgcttgcttgcttgcttgcttgcatgtagtgctgaagattaaacacagggcaagtgctctaccactgtgttacacctccaatccaaaaggcagaattttaattatttctgttttgggttacctcaaaatggtactaacaatagttacttaatgatagctgagtctcagccttaaacaagatatatacgctatcccctcacagaagagtgagttggaaagaatgtgaaagccagattctaggaggaaagctgacaaaatgtcatgttctggcaagacagggccattgtaattatgaattcacagttgctagggttacctgcagtgggcatgcacaagaatgcccagataaccatcagtcatggatggtgaagga

SEQ ID NO: 3283 - DNA, 1200 bp, mus musculus
tcaatgtatattttttcctaagtgaaaaatgttttattaactaatgcttctcaagggaagtttaccttaaatccttgccctcacccaaaagattcagagacaatatcttttaattagttaggattttagtttattacaaaaggtttagcaaaaactaaaaaagcttttataattgttattaattatattcattggtaattaaaaatattagctgtgcccaagacaattccttggccagaaaaaaacattgtaaagtcatttttctcatcctcccagtggatcgttggcccacgtgggtccaactagctgctggctgctgctggtcagggccttgagacacacagtttcccagagctatagtactgcgagaggccaccataggcgggcagccttacagcgaattcaggagagggccgcgttcacatttgccccgagcctccacgtgtcctgaccagagtagccatattttcagagtagccatattttcagagtagtcatatttttccccgctaaggcccggggtgttctgtcacccttgtttgagttttctagcctgagaaaaaggccgaggtgcggcggcagtaacaagagcggctgtggcagcagggccggccccgccccagtgccaggaccagagctgccccttgacatagtggcgcatcaggcgcacactgctttctccgcttcaaaattacaggtctcaacagcgagttaaaatccagagtcattttcaaagtgactccacatgccagggcgtcaggcggccagggctaaagacttagggcaaacgccccccaccccccaagtaccctgtgggtgtcaggccctagaccacagagccaagactaggcaggtgggcagggccgaggtagcactcccctcaaaacagtttcatcatcctattaaaaccactgtgatactaataaaaaattgtaaagtgtattcgtgtattttagaaaacctataacaaaaattatgtcttaaaaacctgacttagtgtctgtcccttgttccaaacagcaattaatttggttattacaaaatattaatgattgacctattatgcaccatcatttttaatagattaacaatcaatatcccaaagatgagttgattgtttttatacgtgctttttatatcttctataaattcatgcatgcatacatcccaattattgtgtttaataacaacccctatatg

SEQ ID NO: 3284 - DNA, 1000 bp, mus musculus
tttttttagtaagcattatgttgctgttgctggattgctattgaccattctctcagcagcacagattaaatgagaacttgcattcccacctccaatctagagaatagggaacatgggagcaggatcttcaaactgctttcttacaaactctctagtgactccgatgctcaaagtttcagaataggtggagaggtcttcggtgcttttccatagatcctactctctacctatcccctacagagcacttacaagcagaatttggaccagatgcaacccaggatatcctctcactgggcccatgagcagaaggtaaacatggaacagcgaagacacccaagacttcattctctttctaagagtggcctatggctagagctaaagtttctttttttagaagttctctgccagagtgtccttctttactgccatggtgaaagaagttaagatatcgaagcttaggatgtttcatgctgacaaatataagagtagtttcaaggtcactgattcaacgttcactcttctagtttttacgtgatttatgtgtgtgcacgtgtgcgtgtgtatacatgcatgttgagggcagaggtgagcctcgggtgatatttctcagatgccatccaccttcttatttgagactgagtctgatgctgacttgcagttcaccaagtagtctagtggacggccatcaagtcccatgaattctgtttcaattactttagcactggtatttcaagtgtgtgttatcactcctagctttctgtgtggattccaggtagtgaactctggtctgcatgcttctatcgaacgtacgttacatgctgatttatttcccctatttcttaatatgattcttacagcagaaaggaaagagacgccttcacctgcacacttctgcagagtttgaggtgtatccatgggatcatgcaacaagtgcgctgttgttaatgaatcttgggtaccccaactcaaaaggagttgggagcccctgatccaaactggt

SEQ ID NO: 3285 - DNA, 1000 bp, mus musculus
ctgtagtagggtacctgtgctctaaaagtatcatattaccctggcttttgttgattgtgttgttttgaaggccttttgctatctggattgctttgatcacggtatgttcctgttgtagtagatattaagaggggagttaaccttgatgctcctggtgtggcaggtctctgatgggtatccttgggctatatggttccagatctactgggctgtatgtttcagtatcctcaggtgtatggttcaggattaacatatctgaagaaggtggagggagagctggcagaagattggacgtctgcctgggctaggaggctactcagggcagcttggcatgtcccagaggactcagtgagcagggaagatgggtgggggaagggaagctaacctgtatggttcaggagtctccagtctgatgaaatgaggaggagaggtggcaggaggatgcaggtccaggggacatagtaggctgctcagcacctcttggtgtgcttagaggactcagagagcaggaaagatgggtgggggaagggaagctaacctgtgtggttcaaggtcagcagctctgatgaaggtgagaggagaggtggcaggagagtggaggttccccagggataacagctgctcacagaagctttgtttgcccagaggactcagtgagcagggaagtaggttgcggaagggaaactaacctgtacggttcaggctcagcatgtctgatgagtgtgggagagcacgtggtgagagaatggaggtctcctgggaacaatacattttttaaaaaaaatatgttcattgctgtatttgtttattctcacatattatatcccaactgcaatttttcctccctttctttccaatcattttaggaggaaaaaaaaagaagatgaaaatgattatttttaaatgacaatactaacattgtaaaattttgtaagtgcttgaatttcagcttaacatttggaagtatagatatttctaaaatgccctctttctttcagtt

SEQ ID NO: 3286 - DNA, 1600 bp, mus musculus
gaccagaaggtcggtcgacacaccggccgccgtccacctctaatgtgtttaggaaggacagacagacatatttagacgtaaagacttaaagggagtgtgatcgccaataaaggatcactttaaaaagaaaacacctgtggaccacgagcaaatctcaccgacaggcgatgtgattttcttttttttctcggcaggtacgccatcggcctggcgtacagatcggcgccgaaacacgagtggatcgggaagaacgcggcgtcctgggccctctgccgctgccacaaccactgggcggtgcgacacgacggcaaggagacccccatcgcgccggcccctcacctcaggcgcgtcggcgtcctgctggactacgacaacggctccatcgccttctacgacgctctgagctccgtccacctccacaccttccacgcggcgctcgcgcagcccgtgtgccccaccttcaccgtgtggaacaagtgtctgaccatcgtcacgggtctgcccatcccggaccatctggactgtacggagcagcgaccttgagggacccggccccacagcggccccggggagggacacaggtggaggccgctgtttatggggtcgagaaactcaggcttccagagcgtcgtgacatcttccccaatctgtccagaaaatcactcacagtcatccccctgcctcacacggtcactcagggtcatccccctgcctcagaaaatcactcacaatcatccccctgcctcagaaaatcattcacagtgatcacccccgcttcagaaaatcactcacagtcatccttctgcctcagaaaatcactcacagtcatcccactgcctcagaaaatcactcatactcatcccccagcatcataaaatcactcacagtcaccccctgcctcagaaaatcactcacagtcatccccctgtctcacacggtcactcagggtcatccccctgcctcacacggtcactcagggtcatccccctgcctcagaaaatcattcacagtcatccccccgcctcagaaaatcactcacagtcatccccctgcctcagaaaatcactcacagtcatccccctgcctcacacggtcactcagggtcatccccctgcctcagaaaatcactcacagtcatccccctgtctcacacggtcactcagggtcatccccctgcttcagaaaattctattccatactgaggccaggctgggcacgaccgcttagaagaaccggatagacggctaaagcagaagccgtcttgagcctaataaggaagcccgcgggcttcctcactccgatgtgagtggagacatttcagctgtgactgtatcattgatacccagatgaatattttgatagcgacttaaaacgacttcacatcttaaacacggacacctcggtggaaaatgtttcattttcctctgaaaatttgtgagaacgtctcgacgacgacgacgccagcaagagaaacgtttggaaaacagcgcttctcgtcacgttctcgattctgccaccccggaagacatctggcctcatctggagtcgatctcgggcgtctgtcccctcctcgtcgctttcccctcgcagactccgaccc

SEQ ID NO: 3287 - DNA, 1600 bp, mus musculus; identical to SEQ ID NO: 3286

SEQ ID NO: 3288 - DNA, 3800 bp, mus musculus
cccccgcctcagaaattcactcacagtcagccccctgcctcagaaaatcacccacagtcacccccctgcctcagaaaatcactcacagtcatccccctgcctcacacagtcactcaaagtcatccccctgcctcaaaaattcaatcatagtcatagcctggcctcacacacacaatcagtgccatccacctgcctcacacagtcactcacagtcatccccctgcctcagaaaatcactcactgtcatccccctgcctcagaaattcaatcacagtcatccccctgcctcagtcacttcacttcattcccctgcctcacagttaatcgcggtcatatccctgccatggcgacagggaggagacacagagccgctcccgccagggggtcatggaggcgtccagcggcctggggggaggggagcctcagacgttcactcgcagtcatgccccagccttatacattcacccacagtgatccccccgcctcagaaactcactcacagtcattccactgcctcagaaaatcactcacattcatccccctgcctcagaaaatcactcacagtcatccccctgcctcacagtcacacatcaacatccccctgccccacagttactcagcttcatctccctgtgtcagaaaatcactcacagtcattcccctgcgtcagaaaatcactcacagtcatccccctgacttagaaaatcactcacagtcatccccctgcttcacacagaaactctctaccatgcccctgcctcagaaaatcacacacaggcatccccctgcctcagaaaatcactcacagtcatccccctgcctcacacagtcacacagctgtgacacccacaggcatccagcggcctggggggaggggagcctcagacattcacccacagtgatccccccgcctcagaaattcactcacagtgatccccccgcctcagaaattcactcacagtgatccccccgcctcagaaaatcactcacagtcagccccctgcctcagaaaatcactcatactcatcccccagcatcataaaatcactcacagtcatcaccctgcctcagaaaatcactcacagtcatgcccctgcctcagaaacacactcacagtcatccccctgtgtcagaaaatcactcactgccattcccctgtgtcagaaaatcactcacagtcatccccctgcctcagaaacacactcacagtcatccccctgcctcagaaagttttttggtttttcgagacagggtttctctgtgtagccctggctgtcctggagctcaggctgtagaccaggctggcctccaactcagccatccccctgcctctgactcccgagtgctgggattaatgacgtccgggtaccaagatgccctgccctgcctcagaaacttacaggcaaccccctgcctcacacagcgtcatgcccctgcctcacaccctcactcaacctcagaaacacactcacagtcatccccctgcctctgactccagagtgcagggattaatgatgtccgggcaccacgatgccctgccctgcctcagaaactcactcacagtcaaccccctgcctcagaaaatcactcacagcgatcaccctgcctcagaaaatcactccttgtcattcccctgcctcagaaaatcactcacagtcatccccctgcctcacacagtcactcaaagtcatccccctgcctcagaaattcactgacagtcatccccttgcctcacacacacaatcagtgccatccacctgcctcacacagtcactcacagtcatccccctgcctcagaaaatcactcactgtcatccccctgtctcagaaattcactcacagtcatccccctgcctcacacagcctctcagggtcaatctcctgtgtcacacagccactcagcatcaaacccctacgtcagaaacacactaacagtcatccccctgcctcgggaactcactcacagtcatccccctgcctcagaaacacactcacagtcatccccctgcctcagaaacacactcacagtcatccccctgcctcagaaacacactcacagtcatccccctgcctcagaaacacactcacagtcatccccctgcctcagagaatcacttacagtcaccccctggccccccgcaacctgaccaggcgcggcggagggagagactggggagcgcggggtgctgaggagacgtctccgtggccgccgcccgtcctcctctcgaggctcagagaaccgtgcggaagggggggcagagacgggacgagccggggagggggacggacatggaggacgcgcttccagacaccgggggacggactcgctcacgcgggggctcccggagacggtggcggcacgcagcggccactcacagtcatccccctgcctcagacagtcactcagcgtcatccccctgcctcagacagtcactcagcttcatccccctgcctcagacactcactcagcgtcatccccctgcctcagacagtcactcagcttcatccccctgcctcacacagcctctcagggtcaatctcctgtgtcacacagccactcacagtcatccccctacgtcagaaacacactcacagtcatccccctgcctgagaaattcactcacagtcagccccctgcctcagaaattcactcacagtcagcccctgcgtcagaaaatcacttacagtcaaccccctgcctcagaaaatcactcaacatcattcccctgccttacatactcactcagcatcatgctcctgcctcagaaaataactcacagggatccccctgcctcagaaaatcactcaaagtcattcccctgcctcagaaacacactcacattcatccccctgccccagaaaatcacacacagtcattcccctgcatcccacagtcacacagccacatccccctgccccacagttactcagcttcatttccctgtgtcagaaaatcactcactgtcatccccctgcctcagaaaatcactcacagtcatccccctgcctcagaaaatcactctctgtcatccccctgcctcagaaaatccctcacagtcatgcccctgcctcagaaaatcactcacagtcatctccctgcttcaaaaaatcacttacagtcacccccctgcctcagaaaatcactcagcatcattcccccgcctcacacactcactcagcatcatccccccgactcacacagtcactcacagccatccccctgccttagaaaatgactcacagtcattcctctgcctcagaaaatcactcacagtcatcctcctgccttagaaactcactcacagttaaacccctgcttcagaaaatcactcactgttatccccctgcctcatacagcctctcagggtccatctcctgtgtcacacagtcaatcaggatcaaagccctacctcagaaacacactaacagtcatccccctgcctcagaaactcactcacagttaaatccctgcttcatacattcactcagcttcatctcctgcctcattttcatgcccctgcctcacacattcaatcagcacaaatcacttacagtcatcccctgccttagaaaatcactcacagtcatccccctgcttcacacagaaactctctaccatccccctgcctcagaaaatcactcacagccatctcactgcctcagaaaatcactcacaaccatccccctgcctcagaaaatcacttacagtcatcccctgccttagaaaatgactcacagtcattcctctgcctcagaaaatcactcacagttatcctcctgccttagaaacacactcacag

SEQ ID NO: 3289 - DNA, 1200 bp, mus musculus
tcacacacagtcatccccctgcctcagaaaatcacttacagtcagcccctgcctcatacattcactcacagtcatccccctgcctcagaaaatcactcacagacatccccctgcctcagaaaatcacttacagtcagccccctccctcagaaaatcactcactgtcagtcctctgcctcagaaaatcacacacagtcattcccctgcatcccacagtcacacagccacatccccctgccccacagttactctgcttcatccccctgtgtcagaaaatcactcactgtcatccccctgcctcagaaaatcactcacagtcatccccctgcctcacagagaaactcactaacatccccctgcctcacacagcctctcagggtcaatctcctgtgtcacacagtcactcagcatcaaacccctacgtcaaacactaacagtcactcacataaaatcactcacagtcatgcccctgcctcagaaaatcactcacagacatccccctgcctcacacagtcacacagctgtgacacacacactgggccgcctgccctggcgctgtgtttgcattttatttattttattattttattcacacacactcactcatggtcatccccccgcctcacacagttacgagtttggggggtgtttggctttgtttggatgcagggattcagctctggggttcatgagcctcagggccccaggcagggacccgcccaggcctgtaatcccaggggcagagctgaggcagggggatgactgagatggcaggccggcctgtgctggcagggcgggaaccaagcccttccccagcccgggggctgcctggccgcctgcgtcgccatggcgacagggaggagacacagagccgctcccgccagggggtcatggaggcggccagcggcctggggggaggggagcctcagaaactcactcgcagtcaacccccagcctcatatattcacccacagtcatccccctgcctcagaaaatcactcgcagtcatccccctgcctcagaaattcactcacagtcatccccctgcctcagaaattcactcacagtcagccccctgcctcagaaaatcactcacagtcatccccctgtgtcagaaaatcactcactgtcatccctctgcctcagaaaatcacacacagtcatccccctgtgtcagaaaatcactcactgtcatccctc

SEQ ID NO: 3290 - DNA, 1000 bp, mus musculus
ctgcttcaccccctgtgtcagaaaatcactcactgtcatctccctgcttcaaaaaatcacttacagtcatccccctgcctcagaaaatcactcacagtcatccccctgcctcagaaattcactcactgtcatctccctgcttcaaaaaatcacttacagtcatccccctgcctcagaaaatcactcacagtcatccccctgcctcagaaattcactcactgtcatccccccgcctcagaaactcactcacagttaaacccctgcctcatacattcactcagcttcatcccctgtctcattttcatgcccctgcctcacacattcaatcagcatcatcaccctgcctcagaaaatcactcacagacatccccctgcctcacacagtcacacagctgtgacacacacactgggccgcctgccctggcgctgtgtttgcattttatttattttattattttattcacacacactcactcatggtcatccccccgcctcacacagttccgagtttgggggtgtttggctttgtttggatgcagggattcagctctggggttcatgagcctcagggccccaggcagggacccgcccaggcctgtaatcccagaggtagagctgaggcagggggatgactgagatggcaggccagcctgtgctggcagggcgggaaccaagcccttccccagcccgggggctgcctggccgcctgcgtcgccatggcgacagggaggagacacagagccgctcccgccagggggtcatggaggcgtccagcggcctggggggaggggagcctcagaaactcactcgcagtcaacccccagcctcatatattcacccacagtgatccacctgcctcagaaaatcactcgcagtcatccccctgcctcagaaattcacttacagtcatccccctgcctcagaaaatcactcacagtcatccccctgcctcagaaaatcactcacagtgagccccctgcttcagaaaatcacttacagt

SEQ ID NO: 3291 - DNA, 1000 bp, mus musculus
ctcatacattcactcacagtgatccccccgccccagaaaatcactcacagtgagcaacctgcttcagaaattcactcacagtcagccctctgcctcagaaaatcactcactgtcatccctctgcctcagaaaatcacacagtcattcccctgcataccacagtcacacagccacatccccctgccccacagttactctgcttcatccccctgcctcagaaaatcactcacagtcatccccctgcctcagaaaatcactcactgtcatctccatgattcagaaaatcactcactgtcaaccctctgcctcagaaaatcacacacattcatccccctgcctcacacagtcacacagccacatccccctgcctcacagttactctgcttcatccccctgtgtcagaaaatcactcactgtcatccctatgcctcagacactcactcagcatcatgctcctgcctcagaaaatcactcacagcgatccccctgcctcagaaattcactcacagtcatccccctgcctcagaaaatcacttacagtcagccctctgcctcagaaaatcacacacagtcattcccctgcatcccacagtcacacagccacatccccctgccccacagttactctgcttcatccccctgcctcagaaaatcactcactgtcatccccctgcctcacagagaaactcactaacatccccctgcctcatacagcctctcagggtcaatctcctgtgtcacacagtcactcagcatcaaacccctacctcagaaacacactaaaagtcatccccctgcctcagaaactcactcagttaacccctgcttcatacattcactcagcttcatctcctgcctcattttcatgcccctgcctcacacattcaatcagcagaaatcactcacagtcatccccctgcctcagaaaatcactcacagtcatctccctgcttcaaaaaatcacttacagtcatccccctgcctcagaaaatcactcaca

SEQ ID NO: 3292 - DNA, 1200 bp, mus musculus
ttcagggcctcacatcctctgctgtgtgagtgtcagggcatcacatcctctgctgtgtgtgtgtcagggactcacattttctgctgtgtgtgtgtcagggcctcacaaaatctgctgtgtgtgtgtcaaggcctcacatcctttgctgtgtgtgtgtcagggcctcacatcctctgctgtgtgtgtgtcaggacctcacatcagctgctgtgagttttcagggcctcaaatctgctgtgtgtgtgtcaggcactcacatcctctgcagtgtgtgtcagggcctcacatctgctgctgtgtttgtgtagggcctcacagcctctgctgtctgtgtgtcagtgcctcacattagctgctgtgtgtgtgtcagtgcctcaaatcttctgctgtgtttttcagggactcaaatctgctgtgtgtgtgtgtcagggccacacataatctgctgtgtgtgtgttagggcctcacatcctgtgctgtttttgtgtcagggcctcacatcctttgctgtatgtgtgtcagggcctcacatcctctgctgtgtgtgtgtcagtgcctcacatcagctgctgcttgtgtgtcagggcctcacatcctctgctgtgtgtgtgtcagggcctcacatattctgcagtgtgtgtgtaagggcctgacatctgctgctgtgtgtgtgttagagcctcacaaaaaatgctgtgtgtttgtcagtgcctcacatcctctgctgtgtgtgtgtgtcaggacctcacatcctttgctctgtgtgtgtcatggcctcaaattagctgctgtgtgtgtgtcagtgcctcaaatcaactgctgtgtgtgtttcatggactcaaatctgttttgtgtgtttgtcagggccacacataatctgctgtgtgtgtgtcagggcctcacatcctttgctgtttgtgtgtcagggcctcactcacctgctgtgtttgtgtcagggcctcacatcctttgctgtatgtgtgtcagggcctcacacctctgctgtgtgtgtgtcatgacatcacatcctctcctgtgtgtgtgtcagggcctcacatcatctgctgtgtgtatgtcattacctcacatcctctactgtgtgtgtgtcagggcctcacatcagctgctctgtgtgtgtcagtgcctcaaatcttctgctgtgtgtgtgtcagagactcacaacctctgctgtgtgtgtgt

SEQ ID NO: 3293 - DNA, 1800 bp, mus musculus
gtcagggcctcacatcttctgctatgtgtgtgtcaggacctcacatccgctgctgtgtgtgtcattgcatcacatcagctgctgtgtgtgtatcagggcctcacatccgctgctgtgtgtgtgtcagggcctcacaacctatgatgtgtttttgtcaaggcctcacatcttctgctgtgtgtgtgtcagagcctcacatcttttgctgtgtgtgtgtcagggcctcaaatctgctgtgtgtgtgtcagggcctcccatcttctgctgtgtgtgtgtcaggaactcatttcctctgctgtgtgtgtcatggcctcacacccacagctgtgtgtgtgtcagcgcctcacattttctgctgtgtgtgtgtcaggccctcacatccgctgctgtgtgtgtgtcagcgcctcacattttctgctgtgtgtgtcagttcctcacatcctttgctgtgtgtgtgtcagggcctcacaacctctgctgtgtttgtgtcagggcctcacattctctgctttgtgtgtgtcagggcctcacattctctgctgtgtgtgtcagggcctcacatcctctgccgtgtgtgtgtcagggcctcacatttttgctgtgtgttgtcagcgccttacattttcagctgtgtgtgtgtcagggcctcacaaattctgctgtgtgtgtgtcagggcctcacatccgctgctgtgtgtgtgtcagagcttcacatcctctgctgtgtgtgtgtcagggcctacatcagcttctttgtgtgtgtgagtgcctcacatcttctgctgtttgtgtgtcagtgcctgaaatcagctgctgtgtttgtttcagggcctcacatccactgctgtgtgtgcgtcagcgcctcacattttctgctctgtgtgtgtcagggcctcacatcttctgccgtgtgtgtcaaggccgcacaacctctgctgtgtgagtggcacggcatcacatcttcagctgtgtgtgtcaggacctcatatccgctgctgtgtgtgtgtcagggcctcacttcctctgtgtgtgtgtcagggcctcacatcctcttctatgtgtgtgtcagggcctcacatcctctgctgtgtgtgtgtcagggcctcacaaaatctgctgtgtgtgtgtcagggcctcacatcctctgctgtgtttgtgtcagggcctcacatctgctgctgtgtgtgtatcaggtcctcacatccgctgctgtgtgtgtgtcagggcctcacaacctctgatgtgtttgtgtcagggcctcacatcttctgctgtgtgtgtgttagggcctcacaacctctgctgtgtgtgtatcaggtcctcatatccgctgctgtgtgtgtgtcggcgcctcacattttctgctgtgtgtgtgtcagggactcacatcctcggctgtgtttgtgtcagggcctcacatccgttgctgtatgtgtgtgtgagtgcctcacatcctctgctgtgtgagtggcccggcctcacatcttctgctatgtgtgtgtcaggacctcacatcttcatatgtgtgtgtgtcagggcctcacatcagctgctgtgtgtgtatcagggcctcacatcctctgctgtgtgtgtgtcagggcctcacttcctctgctatgtgggtgtcagggcctaacatccgctgctgtgtgtgtatcagggcctcacatcctctgctgtgtgtgtatcagggcctcacatcctctgctatgtgggtgtcagggcctcacttcctctcctgtgtgtgtcagggcctcacatcctctgccgtgtgtgtgtcagggcctcacatccgctgct

SEQ ID NO: 3294 - DNA, 1800 bp, mus musculus
tcacatcctctgctgtgtgtgtgtcagggcctcacatcctctgctgtgtgtgtgtcagggcctcacatccactgctgtgtgtgtgtcagtgcctcacatcttgtgctgtgtgtgttcaggacctcacatccgctgttgtgtgcgtgtcaggacctcccatcttctgctgtgtgtgtgtcagggcctcacatcttctgtggtgtgtgagtcacggcctcaattctgctatatgtttgtcagggcctcacatcatctgctgtgatgtgtcaggacttcatatgcgctgctatgtgtgtgtcagggcctcaaattctctgctgtgtctgtgtcagggcctcacatcagctgctgtgtgtgtgtcagggcctcacatcctctgctgtgtgtgtgtcagggcctcacatcctctgctgtgtgtgtatcaggacctcacatcctttgatgtgtttgtgtcagggcctcacatcctctgctgtgtgtgtgtcagggcctcacatcctcttctgtgtgtgtgtcagtgcctcacatccgctgttgtgtgtgtgtcaggacctcacatccgcgtctctgtgtgtgtgtgtcactgcctcacatcttctgatgtgtgtgtttgtcaggacctcacatcagctgctgtgtgtgtgtcagggcttaaaatctgctgtgtgtgtgtcacggcctcacataatctgctgtgtgtgtgtcagggcctcacatcctctgccttgtgtgtgtcagggcctcacatcctctgttgtgtgtgtcagggcctctcatcagctgctgcgtgtgtgtcagggcctcacatctactgccctgtgtgtcagggcttcacatcctctgctgtgtgtgtgtcagggcctcacatcctctgctgtgtgtgtcaggaccacacatcctctgatttgtgtgtgtcaggacctcacattcgctgctgtgtatgtgtcagagcctcacatcctctgctctgtttgtgtcagggcctcacatgagctgctttgtgtgtgtgagtgcctcacatcttctgctgtgtgtgtgtcacggcctcacatcttctgccgtatgtgtcagggcctcacatcttctgctgtgtgaatttcagggccgctcatcctctgctgtgtgtgtgtcagggcctcaaatcctctgctgtttgtgtgtcagtgcctcacatccgctgttgtgtgtgtgtcaggacctcacaaccgcctctgtgtgtgtgtgtcactgcctcacatcttctgatgtgtgtgtttgtcaggacctcacatcagctgctgtgtgtgtgtcagggcttaaaatctgctgtgtgtgtgtcacggcctcacataatctgctgtgtgtgtgtcagggcctcacatcctctgctgtgtgtgtgtcagggcctcacatcctcgactgtgtgtgtgtcagggcctcacatccgcagctgtgtgtgtgtcagggccgcacatccactgctgtgtgtgtgtcagggcctcacatcctctgctgtgtgtgtgtcagggcctcacatccgctgctgtgtgtttgtcagggcctcacgtcctctgctgtgtgtgtttcaggacctcacatcctctgctgtgtgtgtcaggacctcacatcctctgctgtgtgtgtgtcagggcctcacatccgctgctgtgtgtgtgtcagggcctcacatactctgctgtgtgtgtatcaggacctcacatcctttgatgtgtttgtgtcagggcctctcatcctctgctgtgtgcgtgtcagggcctcacatcctctgctgtgtgtgtgtcagggcctcacatccgctgc

SEQ ID NO: 3295 - DNA, 1000 bp, mus musculus
gctgtgtgtgtgtcaaggcctcacatcctttgctgtgtgtgtgtcagggcctcacatcctctgctgtgtgtgtgtcaggacctcacatcagctgctgtgagttttcagggcctcaaatctgctgtgtgtgtgtcaggcactcacatcctctgcagtgtgtgtcagggcctcacatctgctgctgtgtttgtgtagggcctcacagcctctgctgtctgtgtgtcagtgcctcacattagctgctgtgtgtgtgtcagtgcctcaaatcttctgctgtgtttttcagggactcaaatctgctgtgtgtgtgtcagggccacacataatctgctgtgtgtgtgttagggcctcacatcctgtgctgtttttgtgtcagggcctcacatcctttgctgtatgtgtgtcagggcctcacatcctctgctgtgtgtgtgtcagtgcctcacatcagctgctgcttgtgtgtcagggcctcacatcctctgctgtgtgtgtgtcagggcctcacatattctgcagtgtgtgtgtaagggcctgacatctgctgctgtgtgtgtgttagagcctcacaaaaaatgctgtgtgtttgtcagtgcctcacatcctctgctgtgtgtgtgtgtcaggacctcacatcctttgctctgtgtgtgtcatggcctcaaattagctgctgtgtgtgtgtcagtgcctcaaatcaactgctgtgtgtgtttcatggactcaaatctgttttgtgtgtttgtcagggccacacataatctgctgtgtgtgtgtcagggcctcacatcctttgctgtttgtgtgtcagggcctcactcacctgctgtgtttgtgtcagggcctcacatcctttgctgtatgtgtgtcagggcctcacacctctgctgtgtgtgtgtcatgacatcacatcctctcctgtgtgtgtgtcagggcctcacatcatctgctgtgtgtatgtcattacctcacatcctctactgtgtgtgtgtcagggcct

SEQ ID NO: 3296 - DNA, 1000 bp, mus musculus
cagggcctcacatcctctgctgtgtgtgtcaggaccacacatcctctgatttgtgtgtgtcaggacctcacattcgctgctgtgtatgtgtcagagcctcacatcctctgctctgtttgtgtcagggcctcacatgagctgctttgtgtgtgtgagtgcctcacatcttctgctgtgtgtgtgtcacggcctcacatcttctgccgtatgtgtcagggcctcacatcttctgctgtgtgaatttcagggccgctcatcctctgctgtgtgtgtgtcagggcctcaaatcctctgctgtttgtgtgtcagtgcctcacatccgctgttgtgtgtgtgtcaggacctcacaaccgcctctgtgtgtgtgtgtcactgcctcacatcttctgatgtgtgtgtttgtcaggacctcacatcagctgctgtgtgtgtgtcagggcttaaaatctgctgtgtgtgtgtcacggcctcacataatctgctgtgtgtgtgtcagggcctcacatcctctgctgtgtgtgtgtcagggcctcacatcctcgactgtgtgtgtgtcagggcctcacatccgcagctgtgtgtgtgtcagggccgcacatccactgctgtgtgtgtgtcagggcctcacatcctctgctgtgtgtgtgtcagggcctcacatccgctgctgtgtgtttgtcagggcctcacgtcctctgctgtgtgtgtttcaggacctcacatcctctgctgtgtgtgtcaggacctcacatcctctgctgtgtgtgtgtcagggcctcacatccgctgctgtgtgtgtgtcagggcctcacatactctgctgtgtgtgtatcaggacctcacatcctttgatgtgtttgtgtcagggcctctcatcctctgctgtgtgcgtgtcagggcctcacatcctctgctgtgtgtgtgtcagggcctcacatccgctgctgtgtgtgtgtcaggacctcacatcctctgctgtgtgtgtcaggacctcacatcc

SEQ ID NO: 3297 - DNA, 1000 bp, mus musculus
catcctttgctgtgtttgtgtcaggacttcatatgtgctgctgtgtctgtgtcaggacctcacatcttctgccatgtgtgtttcagggcctcccatcttctactgtgtgtgtgtcagggcctcacatcttctgtggtgtgtgtgtcacggcctcaattctgctatgtgtttttcagggtctcacatcctctgctgtgtgagtgtcaggacctcacatccgctgctgtgtctgtgtcaggacctcacatccgctgttgtgtgtgtgtcaggacctcacatcttctgccatgtgtgtttcagggcctcccatcttctgctatgtgtgtgtcagggcctcacatcttctgctgtgtgtgtgtcaggacttcatatgcgctgctgtgtgtgtgtgagggcctcacatcctctgcagtgtgtgtgtcagggcctcacatcctctgccatgtgtgtgtcagggcctcacatcctctgcagtgtgtgtgtcagggcctcacatcagctgctgtgtgtgtcagggcctcacatcctcttctgtgtgtgtcagggcctcacatcctctccgagttgtgtcagggccttacatcctctcaggtgtgtgtttcagggcctcacatcctctgctgtgtgtgtgtcagggcctcacatcttctaccgtgtgtgtaatggcctcacatcttctgctgtgtgtgtgtcaggacctcacatctgctgatgtgtgtgtgtcagggcgtcacatcctctgctgtgtgtgtgtcggtgcctcacatcagatgctgtgtgtgtgtcagggcctcacatcctctgctgtgtgtgtgtgtcaggacctcacatcctctgcttgtgtgtgtcagtgcctcacatcatctgctgtgtgtgtgtcagggtctcacatcctctgctgtgtgtgtgtcagggcctcacaaaatctgctgtttgtgtgtcagggcctcacatcctctgctgtgtgtgtgtcttgacctcacatcctctgttgtgtgtg

SEQ ID NO: 3298 - DNA, 3600 bp, mus musculus
ggcctcacatcctctgctgtgtgtgtgtcagggcctcacatcctctgctctgtgtgtgtcagggcctcacatcttctgctgtgtgtttcatggcctcacaacctctcctgcttgtgtgtcagggcctcacatcctctgctgtgtgtgtgtcagggcctcacttcctctgctgtgtgtgtcagggcctccaatcatcagctatttgtgtgtcagggcctcacatccgctgctgtgtgtgtgtcagggcctcacaaaatctgctgtgtgtgtgtcagggcctcacttcctctgctgtgtgtgtgtcagcgtctcacattttcagctgtgtgtgtgtcaggaccttacattttcagctgtgtgtgtgtcagggcctcacaaaatctgctgtgtgtgtgtcatggcctcacttcctctgtgtgtgtgtcagggcctcacatcctctgcaatgtgtgtgtcagggcctcacatcctctgctgtgtgtgtgtcagggcctcacaaaatctgctgtgtgtgtgtctaggccacacatcctctgctgtgtgtgtgtcagggcctcacaaaatctgctgtgtgtgtgtcatggcctcaattcctctgtgtttgtgtcagggcctcacatccgctgctgtgtgtgtgtgagtgccacacatcctctgctgtgtgtgtgtcagcgcctcacattttctgctgtgtgtttttcagggcctccgatcctctattgtgtgtgtgtcagggcctcacgtcttctactgtgtgtgtgtcagggcctcatctcctctgctgtgtgtgtgtcagggcctcacatccgctcctgtgtgtgtggcagcacctcacattttctgctgtgtgtgtgtcaggtcctcacatcctctgctgtgtgtgtgtgagagcctataatctctgctgtgtgtgtgtcagagcctcacatcctctgctgtgtatgtgtcagggcctcacatcctctgctgtgtgtgtgtcagggcctcacatcctctgctctgtgtgtgtcagggcctcacatcttctgccgtgtgtttcatggcctcacatcctctgctgcttgtgtgtcagggcctccaatcatcagctatttgtgtgtcagggcctcacatccgctgctgtgtgtgtgtcagggcctcacaaaatctgctgtgtgtgtgtcagggcctcacttcctctgctatgtgtgtgtcagcgtctcacattttcagctgtgtgtgtgtcagggccttacattttcagctgtgtgtgtgtcagggcctcacaaaatctgctgtgtgtgtgtcagggcctcacttcctctgtgtgtgtgtcagggcctcatatcctctactgtgtgtgtgtcatggcctcacatcctctgctgtgtgagtgtcagggcctcacatccgcttctgtgtgtgtgtgagtgccacacatcctctgctgtgtgtgtgtcagggcctcacatcttctgctatgtgtatgtcaggacctcacatccgctgctgtgtgtgtgtcagggcctcacaacctatgatgtgtttgtgtcaggtcctcacatcttctgctgtgtgtgtgtcaggtcctcacatctgctgctgtgtgtgcgtcggcgcctcacattttctgctgtgtgtgtgtcaggccctcacatccgcatctgtgtgtgtttcagggcctcacctcctctgctgtgtgtgtcagggcctcacaaatctgctgtgtgtgtcaggcctcacatcctctgctgtgtatgtgtcagggcctcacatccgctgcagtgtgtgtgtcagggcctcacatcttctgccgtgtgtgtcaaggcctgacatcccctgctctgtgcgtgtcagggcatcacaaaatctgctgtgtgtttgtcagggcctcacatcctctgctgtgtttgtgtaaggacctcacatccgctgctgtgtgtgtgtgagtgccacacatcctatgctgtgtgtgtgtcagggcctcacatcttctgctatgtgtgtgtcaggacctcacatccgctgctgtgtgtgtcattgcatcacatcagctgctgtgtgtgtatcagggcctcacatccgctgctgtgtgtgtgtcagggcctcacaacctatgatgtgtttttgtcaaggcctcacatcttctgctgtgtgtgtgtcagagcctcacatcttttgctgtgtgtgtgtcagggcctcaaatctgctgtgtgtgtgtcagggcctcccatcttctgctgtgtgtgtgtcaggaactcatttcctctgctgtgtgtgtcatggcctcacacccacagctgtgtgtgtgtcagcgcctcacattttctgctgtgtgtgtgtcaggccctcacatccgctgctgtgtgtgtgtcagcgcctcacattttctgctgtgtgtgtcagttcctcacatcctttgctgtgtgtgtgtcagggcctcacaacctctgctgtgtttgtgtcagggcctcacattctctgctttgtgtgtgtcagggcctcacattctctgctgtgtgtgtcagggcctcacatcctctgccgtgtgtgtgtcagggcctcacatttttgctgtgtgttgtcagcgccttacattttcagctgtgtgtgtgtcagggcctcacaaattctgctgtgtgtgtgtcagggcctcacatccgctgctgtgtgtgtgtcagagcttcacatcctctgctgtgtgtgtgtcagggcctacatcagcttctttgtgtgtgtgagtgcctcacatcttctgctgtttgtgtgtcagtgcctgaaatcagctgctgtgtttgtttcagggcctcacatccactgctgtgtgtgcgtcagcgcctcacattttctgctctgtgtgtgtcagggcctcacatcttctgccgtgtgtgtcaaggccgcacaacctctgctgtgtgagtggcacggcatcacatcttcagctgtgtgtgtcaggacctcatatccgctgctgtgtgtgtgtcagggcctcacttcctctgtgtgtgtgtcagggcctcacatcctcttctatgtgtgtgtcagggcctcacatcctctgctgtgtgtgtgtcagggcctcacaaaatctgctgtgtgtgtgtcagggcctcacatcctctgctgtgtttgtgtcagggcctcacatctgctgctgtgtgtgtatcaggtcctcacatccgctgctgtgtgtgtgtcagggcctcacaacctctgatgtgtttgtgtcagggcctcacatcttctgctgtgtgtgtgttagggcctcacaacctctgctgtgtgtgtatcaggtcctcatatccgctgctgtgtgtgtgtcggcgcctcacattttctgctgtgtgtgtgtcagggactcacatcctcggctgtgtttgtgtcagggcctcacatccgttgctgtatgtgtgtgtgagtgcctcacatcctctgctgtgtgagtggcccggcctcacatcttctgctatgtgtgtgtcaggacctcacatcttcatatgtgtgtgtgtcagggcctcacatcagctgctgtgtgtgtatcagggcctcacatcctctgctgtgtgtgtgtcagggcctcacttcctctgctatgtgggtgtcagggcctaacatccgctg

SEQ ID NO: 3299 - DNA, 1200 bp, mus musculus
ccccaaaattaaagggaaattaggcaaagggcaacctggcaagattttaaggcacagggaagagagtggataggaaatgagctgaactgaaggtcatttcctgaaggaatgcatgggagaaaagtcagcccctaacatcacaacaaggaaagtgagacattacaggagatgcaggcttctaacagagtaacaagagactgtggaaatccagagtgtatgtgcagcaagatataatcattgtcagactagaagaaccaggggacaatgtcggaatctgtggagggatggcagaagggtgctgtagaacactaagaaggctctggaaattgatgtgaaagatgaggatgccctagaggcaacagaggaaggaaaaataatatcattaaatcatgatttcaagatgggcaacagaatgacgaggctactggtgctaaggtcaaggaaagaacacatgtcttcggtatccctgggtcttgttatggagtgaatgagctctacaggtacaagcttaatctgtgggctcaacagctaagaacaggagaccccatctttatattggcttcagtccagggacctttagggagatgagtccaaacaccagaatgcagttaccatcctgaagtcagatgttagtgtttacttttccaggaggtcattttggtcccgttatgtaggaagggcatattcaccaatacttatgaggactaatgatgccaacttcctgttcattatagagggaagagggatgatgagcccttccagtcggcgccagcaccaggtcaccaagggctcagagtctggagacaaacccacagtccctagaggattctccacatgatcttatgatcactggcgagtggaacacatctgtgccaatccaattgtgatggacctgtgacagcaggaacaaggacaccagagcccttcctaaccagaaactcaggttccttgtgatcagttctggtttaccttggttttgaacagaccagacagctccacggtcctcaaaggagacaccatttctaggcactgtaacacacccaggatcgtaggacaacaggatcccagtataacaggggctgggtcataccagtatttcagggtctcagaggaagcttgactgccaaaaactctgacacatccagaatcttaggtttgcaggagtccacaaccaaaggatcacagagaaagctggactct

SEQ ID NO: 3300 - DNA, 1000 bp, mus musculus
tcttctctgactgagcccagacccggcagttgtatatgtgttgggggcctcatatcagctggtgtgtgctggaccttcttttcctcaggctcctctccatttccattcttgcagttcttgtgattgctttcttctccctccaaagtgggactgaggcatcctcacttgggcacctcagcttgttgacctttttgagttctgtggactctatcttgggtattctgcactttatttatttatttatttatttatttatttattttgctaatatccacttgttagtgagtatataccacacatgtcctttggggtctgagttacctcactcaggtaatcccatctatttgcctgcaaaactcaggatgtcctcgtctttaatggctgagcagcattccattgtgtaaatgaaccacattttctgtatccattcttctgtcgtgggacatctaggttgtttctagcttctggatatcacaaataaggctgctatgaacatagtggaacacatgtccctgaggcatggtgggccatcttttgggtatattaccaagagtggtatatctgggtgttcaggtagatctatttccaattttctgaggaacctccagattgattttcagagtggctgtatcagtttgcaataacaccagcaatggaggagtgttcctctttctctacatcctctccaacaagtgttgtcacctgaggttttgatcttagccattctgatgggtgtaaggtggaatctcagggtcattttgatttgcatttctctgatcactaaggactttgaacatttctttaggtgcttctcagccattctagattcctctgttgtgaattctgtttagttctatacatcattttttttaattaggtattttcttcatttacatttccagtgctattccaaaagtcccccataccctccccccccacacactcccttacccacccactcccacttcttgtccctggcattctcctgtactgaagcata

SEQ ID NO: 3301 - DNA, 1200 bp, mus musculus
atatcaaaagatggcctagtcggccatcactggaaagagaggctcattgaacttgcaaactttatatgccccagtacaggggaacaccagggccaaaaagggggagtgggtgggcaggggagtgggggtgggtggatatgggggacttttggtatagcattggaaatgtaaatgagttaaatacctaataaaaaatagaaaaaaaaaaggaaaaaaaaatgagttccttgtggcaaatgtagcgaacaaagatgaagtcatcacatagcactgaacggtttctgcatttacccggacatcgtggcagaaaacatggacaggcaaaacttcaccgcaggtttctacccctcaacttacatatcaaatcatatcgcattatcccagcaatgaaatccaagcattaaggcctaagcaagtagctggtaggcaatggatacatgactgttctgtgacatccatttccactcaaaagtacagtgctcacccttaaaactaccgtgtgtcctattttaataaaaagtctgctaataaaaccttgtttccagaggcagctgtgacaggctgttctataagaatctgatttattaataacaaaatttatggggcgaggaggagaaaagcaatacatggtcttcttgcctggcttcatttccctgtaatatcttagtgatgagcctcctgctggcaagcattctggagccaagaggaaaaaataagacactcaggttcagcctgtgaagttctctctctttgcccgttcctgaacagtcctgagactcaattgtgccatttctccttctgtaacttggaaaagaaacagttggtctccctcagcgtcccatgtgtctcatttgcctcatgctgatgagggaagagctgggtacacataaagtcccccgttgtctttaatttggtcatggatgactgttcccagcctcagatgagtcatcaccagtcaattacattctctcagtcaagagcctgcccattgggccatcccagagtaacagccgtacacttcatcacagttcatcctaactaatggtttcctgggtgaagcaaatgcacatctagctcttaaggcttaccaacagcatattcctttgagtgacttctcacggatgaactctgacacttcaaatcgatttatatactctacattactgaagaaaaagagcgatgcaataaagagtcgttaag

SEQ ID NO: 3302 - DNA, 1000 bp, mus musculus
accagtcaccgtcctctcccttggacatagcatgctgaatggacaggaaggtctcctctgtttctgggcagaacgtgggatttccctgaacggaggcacgctgccatgcaggcagaggaccccctgtcagtacaccacgtcaagaggaagctgctgatgtaagggccatgtctgagggaaagcaggaaactctgatgttagatagggaagcaaaacgtcacaaggtagggaagaggagggaactgccaagggctcagccaggggccacaggccacacggagctgcatcattcccaactcagggtgttacagatgccaggagctaggggcaccacagaggggaacgtgttttgttgaaacttttgtgaagcaggctgggagtttctccactgaactatggggcaggagagcaagggagaggggtgtaggtgattttgcaggaagtacattgtgtgtgagctcccccgatggacaacctgggctggtggagttcaccgctttactatggtttgtacgtctcacttagagcacggcttggggagtgtttgcttttctcactgtgtaaataaaagtctatctctggaaaatggcacaaactgtccctccgattgaaatctacaaggtctgaatgacttcaccttcgccggtgggcagtggaatttagaaagcgcttggctaaccatgcatcctgaagtggagggggtggcgggtggggatgcatcccagcaagctgacctgaatcagcgcagcaggcagctctacattcagtacatacttagagagcaaggagggaaaacagaaggagttcaacggaacgtgagaaagaacaaaccggcaatgcctctggagggtgaggccggggcttgctgtgtttaccccgcaacccctgtaccgggtccagtaaatctccacccagcgtcatctgggtatgacgtcactgattcccccattggctctggcagcttcctgctttctgggggccagctagggcaatgatgtca

SEQ ID NO: 3303 - DNA, 1000 bp, mus musculus; identical to SEQ ID NO: 3302

SEQ ID NO: 3304 - DNA, 1200 bp, mus musculus
actaattgagaaaatgccttacagttggatctcatggaggcatttcctcaactgaagctcctttctctgtgataactccagctgtgtcaagtttacacaaaactagccagtacaagcagtttactcaggcagctacttacttcaaatctcccagcctctctagttacaagtgtttttctccactccagccacaaccacgcccccaccaatcaccacaggtcacatcacctcaccaggcaggcttgctcagccaatcagggattaggggcgggccatccaccaaacattggcttgtttactacctggaacagacgtctatcctgctgaccaggaagaccgggatggctccctacaattcccccttttatatatttttttgaataagccccgtgggtgaagatagaggtctgatccccagtgtgcagaaataggggccatgtacaggattgactcttaggctcacaggtttttacccagagcaaccctgacctgctcccgtgctgttttttccttggggaaggacactaggacactcaaccctcatgcaatcagacatacctcccagagattgtcaaacagcttccagactaacctctgtgcagtatttagccgtacaaccctacggagtgatggcttcattgttcactcttcatggcagcaagccaaatctgaggtgactcccctgcttccactgtggcaaaagcttgcaccaccatggcggcagtgtggacctgggcattccgcaaccgacacatacaccatacacacaacatgcatgccaaaacaagggccatagtgaaggcacctatcccagtccattctttgcctatgccaagccaggatccactcgggcagaatttacggtgacaatcgaccgaagctcattcatcttgccatcaaaattttacaccgacagtattccccatctgggttctgcacccatcaggggcagacacgtgctcatcaccagcaagatcagcttcttcattttgacagcgttgcactagccactctggaacccacactggctcttcgcgattctgtggaaacatgcaaacagaccctctcccccaggctaacacagggtccggaccatttcatgatcctgtaagcacatccttccatttagcataccccagtttactggggctggtattagcatgttgttcagcagcagagtgaccttccttatccaattgc

SEQ ID NO: 3305 - DNA, 1600 bp, mus musculus
tccaggcaacccaggacaaattcttaactgtccaaaaacagtcttctaaaagaacagcattttttcttatgagttgcataagcaattgcaaactagagaattaatagcatctggggggtgaacaattttaagcaattgtaagctctgatatatatatatatattaatatatacatgtatatattaataaagatacaaattaaagcttgattattcaacattttaaaacaccatctacagcacacaatttaattatctgtgttgaagcaggagaaaactcaaaagaataagcgtgtgatccaattcacatatacttttctcccatagaagggctgtttttaaacacagtaattgggatgcatgcatgcatgaatttatagatgatacagaaacatgcataagaacaattttctaacttgtcttagggataatgattgccaattttatttaaaatgatgttatgcaatagatcaaatattaatattctgtaataaccaatttaattgctgttttgaacaaggaacagacagtcaggttcttaagacacgatttttgttataggttttctaaaatatacgaatttatcttacaattctttattagcaccacagcagccttaataggatggtaaaactgtgctttgtggtgaacgccacctcggccttgcccgcctccagcccttctcccaggttgaagaggctgaaacggcccaatcttttgtaggccaggaaacccaagcgagggcagcagtgcaccctgagtcctagcaggaaaaataagatcacccccggcagggacaggcggaggctcatgggggcaatggcaagcacagccctcccctgagtttgctacaaaggcacccgctttctggtggcctcccgcgccaccactgctcagggaaagctgcatatcccaaggccctgccctacagcagccagcagccagcagccggcaggctccacataggccgggaggaaaagaaaaatgactttacagtcatgttttctcttgccaaagaattgctgtgggcacagctaatatttaattaccgttgattattattgataacaattataaaagctttcttcattttctgcaaagccttttgttctttgccagttaatttgtgtctcaataataatagcacctaacaaaagcttaagttctcctgtggtgagtttaaggtgaggtcttagccagttaacatctcctggaagcttttgaaaataaatttttgaagcaaatcaattttttgttctagattttctgtaccacaattttatagtataactaaacccctaagtattcaaaagatattgcctctgaatattttctggagcaacagctactctccagaacttaaaagctccttgtgtgagagcaaggatttaaagtaaacttcccttaagaggcattagttaataaaatactttccacttagaaaacaatatacactgaaagattcaaactcttagcttcttgtattgaagcagagacactaagaatttttattacatgaggttaggctatataagccatacctagaggcaaaattttccagtgattacaagctcactagaagcaagctctttacaattttc

SEQ ID NO: 3306 - DNA, 1400 bp, mus musculus
tactgatctagaacttcagtgaggatggaaatatatatgtatttcatacatctatgaaatttattgacaagtacattgaaaataaattagttgcttgaacagaaagttgaatattctattttgtggatatagatgcatcctatttcaccttggacaatgtcaaagccaggctacttgtgagtcattcaaaatatgtgtcatttaatagtaaagtgttcattggcatgctgaatgagaagtaaacatttgtttaatcctgtttttcattgcatttattatttgattaaagaatattattttatttttgtttcatcaattcatattgcaacaaaagatgccttccatcaaagtcgtgaaaacagtcaaggatagtaatggatcctaggctttaagaagagctgtttagtgccaggtccccctgaggcatagtcaatagaggtgagctgagtgtcacagctctgcctgtcttcatgaggaggcctgatgggccccagaaacatccaggttgcacacctctggggcattactctgactgcaaagtctcctgggggcatagccagtagcaatgggctgctttgtccagcacacaactttgtctgccttctcaaggaatcctccaggggttccaggaacattcatgtccacctagggaatgtccaccagaagtgagcagtatactggtcccaagctccattgtcaggcccacagttctgcctgtcttcctaaggagtcctcccgacatcaggaacatccagtcaatactaggaatggctaaagaacaacaaccatatggctaaaggcagtataaaaacaccattgacaagagccagggatatatgatatcacaagagtgaagctaccctactacaatcccagaatatcctaacacagcataagcacgaagagatgaccttaaatccaacctcataaaaataacagaagcctttaaagaggaaatgagtaaataccttaaagaatacaggaatatgtaactaagcaggtgaaggaaatgaatgaatctattcaagatctgaaaatgataatagaggcaataaaaaacacaaactgagggaatcctggagatggaaaacctagggaagagaactggaactacagatgcaagcatcaccaacagaatacagaagatgaaagagagtgtctctggtgtagaagatatgactgaagaaatcgatacactggtcaaagaaagtgttaaatccaaaaggttcctggtaccaaatatccaaagaattccagaacactatgaaaataccaaacctaagaataataggaatagaagaaggagaaaattcccagctccaagggccagaaaatattttcataaaattcatagaagaaaatttccccaagctaaagaaaacaatgcctataagcataca

SEQ ID NO: 3307 - DNA, 1200 bp, mus musculus
tttcggttgtgttggggtgcccaggactaggtggggtgggagtgctgcgttctgatgatggtgagtggtcttgatttctgttagtaggattcttatgtttgcctttcgcgatctggtaatctctgaagctagctgttatagttgtctctgttaagagcttgttcttcaggtgactctgttagcctctataagcagacctgggagggaagcactctccttagtttcagtgggcagagtattctctgcaggcaagctctcttcttgcagggaaggtacccagatatctggtgttcgaaccggactcctggcagaagttgtgttccactcaccagaggtcttaggatcctgtggggaatcctgtgtgggcccttgcgggtgtcaggcgactccgctggcaaggtaccccagtactccagtggagcgaatgggcttgtgccccaggtcaggccagggtagtctgcttccctatttaccgcagtctcaggttccgcgagattgggttggggcagacgctgtgttccactcaccaggggtcttagaattccgtgtggaatcctgtgtgggccctcgcgggtgttgggcgactctgctggcaaggtaccccgcggttcgagtggggcggaagggctgtgcagaggtcttaagctcagctcttccttctggctgaagaagaaggcctgaaaggcaccttgtcccagaagctgtgttgcttctgccacctgtgcactctgctgtgcagactggtctcttttggacctgggatacaagatggcattctcacctggtcctgaggacagagagtcctccctgggggccacctctcctctggcagggaaagtgtgcagaggtctggttctcagctctgctttttggctgaaaatgaaggcctgaaatggaacctgtcccagaatctatgttgcttcttctgcccacgctctctcctgtgcagactcactttggaatttttatataagttaaggcacactggttccagttgttttgatgtctgcatgaaaattattttgcacctaaatctcattaactgattaatgtaacccagagaaggcacagtgccacagagggcagcactcaccagaaatccttgatcaccacaggcaacattttctttcctgtcttctgtgccctgttttaaaaggtagtctggtttctttgctttgtgtgtgtgtgcatattatttat

SEQ ID NO: 3308 - DNA, 1400 bp, mus musculus
taagatgaccctgcctttcctcagattgaggggagattccggccagatggtgttagcttagataatgtagccccatttgtccttgaataccttttcatctttatggccaagatgttcttaggaatgccttatcaacagccctgccttggcatgcctgggggcttgttctgctttgttctcagtcccagatcggggcagtgggctcctaaacaagttacaatatttcatcttccttcaagacaacttatcaatgttgcatgacccaggagggcagaccacaccggagacaacctctacacatactgtggccacatagcacaagtggcgtatagcattcatgagcccatgactgaggtgaccctagacacccactcagatgtgtcagaactcaggcatcactaagacaaatgagtaattggtggataaatagaagaggaagagaaagaaaggcagaagaaagtatgcacaatgaacagaggcagaactggagacttgggggtagtaagaaacagcctgatgtgatacctggtgatgcctcctaaggccatggtgtgatcctggcctgtgctgccactgtaggccacttcagcagcagtcatctgttatcaccaaagggaaggcagatgtccctagtccagactgatgcctggggcatgttgatgtctgaagactgagaagaacaggtcccatccttcatcttggcatcatgggagagctgactccaaaggtgtgagggcacaagagccatccataccgctcagtggccataccactcaggaaagcaggccctgaaccttgcctgggcagcagtagaggtgaccctagtggtgagagtgcagaggagttggcccctatggaatgagcatgaggtatctggctccacaacttgtctgttgtggtagcagggaggagggacagatgccctcctcccctacttttttcactcaccacctatggcaggctggaaaactgggccttgtacctcacaggctgcagcgcttaggagggaaggtcctgtatcttgcctaggcaacacagtagagcttgccctgttttgggggttgtgggtgagacagccccaagagtttaagagcagaagagctggctctgcccttgagagctgtgtcattgataatctatctgggtcagtggtggagagcttgccttcatagtgtaagtgcaggagagctaatggggtcactagctcagataatctctcaggcccagatccagagctttgagttggcccatcctaatatctaccccatctctgaactgctgaagcatgtgaaggatccagtcctgcaaattcaaagctacagtatttccatgatgaagggcaacaacaggatatcttagaggagtcccaataaggattcaggattgatagtgtagcagaa

SEQ ID NO: 3309 - DNA, 1400 bp, mus musculus
ctttaggcttcttgtatgttcatgggattctctttctttaggtcaggaaagttttcttctataattttgttgaaggtatttactggccctttaagttgagaatctttgatctcttctatacctattttccttaggtttggtcttctcattgtgtcctgaatttcctggatgttttgggtcagggcattttttgcattttgcatttttttttttttttactgttgtgttgatgttttctatggtatctcctgcacctgagattctctcttctgtctcttgtatctgttggtgattcttgcatctatgacttctgatctctttcctaggttttctatctccattgttgactccctttgtgatttctttattgtttctatttccatttttagatcctggatggctttgttcaatttcttcacctgtttggctgtgttttcccataattgtttaagatattttcatgtttcctctttaagggcttctacctgtttatctgtgttctcctgtatttctttaagcgagttatttatgtccttcttaaagccctgtatcatcatcatgagacgtgattttttttaatccaagtcttgcttttccggtgtggtggggtatctgggacttgctgtgttgggagaactaggttctgatgatgccaagtatccttgttttctgttgcttatgttcttgtgcttgcctctcaccatctggttatctatagtgcaacctcatcttgctgtctctgactggagcctgtccctcctgtgatcctggttgtgttagaactcagagtccagtggtctctgtgatcctgtaattctgggatcctgtgatcctgagatcctgggtgtgtcagatcgcctgggagtcagtctttttctgtgtgttgtgggacagcacccaaggtctgctcatggcacaagttcagactggaaggaacccatgccagtgtcagggcatccctggaccctggggaacccagttgctccaggtgttggtgcagatgttgtggcctctcctgtgatcctgggtgtttcctataacaatattaagaggatgctattgttggtacactggaagctcacttagttgccactggtcttttaatgaagtctttattattgtcaaccctacttgtgagacagcttttagatataaaagccatgcagaatgctgctgcttttgcatggctctcatatcttgcatgatggtagtagtatactttaaaacaagtcattatattgaatctaatactaaatccatgccatctctcacataccactaatggcattgctttttgcaaacagaagggataaacccatgagaattctaattatgcctttctaaagaagtggcattagtatgagtttactggccccttgctatcccaaaatcccacccct

SEQ ID NO: 3310 - DNA, 1000 bp, mus musculus
agacaacacagtaagagcaaaagagttacaagagcaaacaaaacagccagagatgcctccattcccactgttaggagtcccacaaaaacagcaagctaaaaaccataacatatatgcaaaggacctagtggagacctatatagtatataggctccatgattgccatttcagtctatgttccctgtgaggtctgcttagtatgtctattagccatgtttttctcctgtccttgacacctctggctcctgtaattcttcttccccttcttcccctgggttctgggagctccaaggggagagaaccaatggagatctccaatttgggctctctgcctaatgtttggttgtggatctctgcatttgctcctctcagtagcctctttgatgaagataggactggtcaccaatctgtgagtatataagactatcattagaaatcatcctattgggagctgaccctgtgccacatctatctggacccaagtcccgcctcacaccccagtactgcccagagagagcaggtctcccaggagtgttaacataccaaagatcacaggtgagatctccactgctgtgcaaatattgggcaaaagtgggaccgcctggagcccacaggaccaaggaactgtggagcagccagggacaggactcttccagtttccatctgtgcccaggcctgaccctgtgccacactatctggatcccagtcctgccccacatgccagtccctctcagatagtgaaggtctcccaggagtgctaacacaccaaagatcacaagagtgctgacacatttaagaccacaggctgacaggctcacaggagggacaagctccagtcagagacagaaaaactaggtgataaccagatggcaagaagcaagcacaagaacataagcaacagaaactaaggctacttggcatcatcacaacccagttctcccaccacagtgagccctggatactccaatacagcagaaaaacaagactctgattttaaaat

SEQ ID NO: 3311 - DNA, 1000 bp, mus musculus
ggtcccacatgaggaccaagctatatatctctttcatatgtgtagggggactagttctgtcctatgcatgctctctggttggtggttcagtcactgtgagccctctgggcccaggttagttaattctataggtttgcccataatgacctttctggatctttcaattcttcctcaccattttccacaacattccccaaattacacctaatgcttggctgtgggactcttcacctgtctccatcatttgcctgataaagcccctcagatgattgcaagcttcctgtcgcaagtatagcatcgactttttgggttggttttgatctatgcttttaattattttatttatttacatttcaaatgttgtccccttttccgattccccctccacaaactccctactccactctcctcccctttgccgctaagagtgtgcttccccacccacctacccactcctacctcacccctctaacattccccttctctggggtatcaagcctccacaggaccaagtgcattccctcacactcaggccagacaaggcagtcctctgcttcatatgtagcaggggccaaggaccagtccatgcatgctctttggtaggtagatggcttagtccatgggagctctgaggcggtttagttaatttatattgttattctttctaaggggttgcactctccttcagctccttccgtccttcccttaactcttccattagagcccctgggctcagtccagtgattggctgcaagtatctccatcttgaagaaacaaaacactgaatgaaaatcacatataatggctggaatgaaaatgtactgatgacaagtttcctggtaggaaaatgtgcattgaaacacacatgaaccaattgtttatgttcaagagcatatgggatagaaagatggaaacatgtgcaggagagaaggaaaaggacaatgactcatctctaatagcagataccaaaaaagattagtgcagatgggcgcaaaggaaa

SEQ ID NO: 3312 - DNA, 1400 bp, mus musculus
aattctactttctatcaatttgtgtatataacaatctttcattcctataatctttcattttactaagtgctatttagaggaattcatttcaaagaaccaagggaagtgataatatttcataaataaattaaagataaacctttgagtctcttaaaatttatatagaaaatattgttgacctcaaaataaaattaaattgtttatagtcctgtgtgacatgttacagtttcaatttatgaatcttaagaatatagagaataaaattggaagcatcctttaggagagattagttattatgttcattcaacaatggtatatattaaatgttgtagttggttcttatgatgcatatctcagggctatggagataactcagtgggtaaactcttttgttttggtcagttgaggacctgggtttgcatcatcagcatcctctgtcagagctgtgtacagtaatgggtccctccatgtgtactctttggttgatgatttagttcttgggtgctcaggggcactggttggttcatattgctgtttcttaaatggggctgcaagcttcttcagctccttcagctccttcagctccttcttctgtcctttctcttgctcttccattggggaccttgttctcagtccaatgatgtttgactgagagcatccacctctgtctttgtcaggcactggcagagcctcttaggacacagctatatcaggctcttgtcagcaagcacttcttggcatccacaatagttcatggatttggtgattgtatatgggatggatcccttagaagactcgatgccccagtgtaggggaatggcaggacagggaagtgggagtgggtgagttggtaagccggaggaggtgagatagattaggggatttttcggtggggaaaccaggaaaatggatatcatttgaaatgtaaagtaaagaaaatatctaattatttaaaaaaaaagagctgtgaatatcagtgtttaaatgatattcacgtgtgctgagataggaggatgctgggtagtgctctccttccaccctagcactttgatgagtaccaggctcaggttcagttagaaacgctctctcaaaaaataaagtccgcatttggaagctcattatgggatggatccctgcatatggcaatcactagatggtccatcctttcatcacagccccaaattttgtctctgtaactccttccatgggtgttttgttcccatttctaagaaagggtaaagtgtcaacactttggtcttcgttcttcttgaattttatgcgtttggcaagttgtatcttatatcttgggtatcctaagtttctgggctaatatccacttatcagtgagtacatattgtgcgagttcctttgtgattgggttacctcactcaggatgatac

SEQ ID NO: 3313 - DNA, 1400 bp, mus musculus
taagttggaaatcttcattctcatcaattcctattatccgtaggtatggtcttctcattgtgtcctggatttcctggatgttttgagttaggatccttttgcattttgtattttctttgactgttgtgtcgatgttctctatggaatcttctgcacctgagattctctcttccatttcttatattctgttgctgatgctcgcatctatggttccagatctctttcctagggtttctatctccagcattgctttgctttgggttttctttattgtgtctacttccctttttagttctagtatggttttgttcatttccatcacctgtttggatgtgttttcctgtttttctttaaggacttctacctgtttggttgtgttttcctgcttttctttaagggcctgtaactctttagcagtgctctcctgtaattctttaagtgacttatgaaagtccttcttgatgtcctctatcatcatcatgagaaatgtttttaaatctgtgtctagattttcggttgtgttggggtgcccaggactaggtgggatgggagtgctgcgttctgatgatggtgagtggtcttgatttctgttagtaggatttttacgtttgcctttcgccatctggtaatctctgaagctagctgttatagttgtctctgttaagagcttgttcttcaggtgactcttttagcctctataagcagaccagaggtcttaggatccgtggggaatcctgtgtgggcccttgcgcgtgtcgggcgactctgctggcaaggtagcccagggctagagtggagcggaaggggcttgtgccccaggtcaggcccgggtagattgcttccctatttaccgcagtctcaggttccgcgcgattggtttggggcaggtgctgtgttccactcaccagaggtcttaggatcccgtggggaatcctgtgtgggcccttgcgggtgttgggtgactctgctggcaaggtagccctggggctcgagtggagcagaaggggcttgtgccacatcatttccaataggagagtaaaatatgaagacaaatgaagtaataagtaaatttattttattctttcacacatttctcaaggattaattttatatgttttacacttagaaaagtgttatggtatacctgatagtttatgcttgtaaaagttcaaaactgtacaaatgttgttaatgttaattgggcaaaatgatgataaaatataatggactgtattttttatatgttttgagcatatattgcctgctaagatgtttatacactattttaattaattataaattattttacaaagagcttggtgtgttcaaactgtacatattttgtgtttgagaattttaaaagagacaatatgacatatagaattatggtttttattatt

SEQ ID NO: 3314 - DNA, 1400 bp, mus musculus
ctctgccctctagttagtctgactaagggtttatctatcttgttgcttttctcaaagaaccagctcctggtttggttgattctttgtatagttctttttgtttccacttggttgatttctgccctaactttgattatttcctgctgtctactcctctttggtgaatttgcttccttttgttctagagcttctaggtgtgctgtcagactgttagtgtatgctctctctagttactttttggaggcactaagggctatgagttttcctcttaggactgcttttttgtgtcccataagtttgggtatgttgtggcttcattttcattaaactctaaaaagtcgttaatttcttcctttatttcttccttgacaaaggtatcattgagaagagtgttgttcagtttccatgtgaatgttggctttctattatttatgctgttattgaagatcagccttattccatggtgatcaaatatgatgcatgggataatttcaatatttttgtatctgttgaggcctgagttctggggtcagaaccttccctgtaggccatctctcctctggcaaggaatgtgcccagcaatctgggtcttagctctgcctcctggctaaggatgaaggctggaggggaccttgaccaagaagctctgttgcttctatagcccacatgctctcagatgtgtgtgctaggggtcctgtggtgtcgagagtcctctggtgccctagatgccctcggctaggttcacgcagaagatggcagggctagccccaacctgaatggatcccaacctcttgttgtctctgttcctgctggcataaaacccttgaagctgatgttgcattccactcaccagtgatccagaggtcctgaggcatggagagcactctggaggccttagtggcctctgctggactcagaaggaagatgatggggatggccacgagtggtattttcattgttatttaatttccatagtattttaaacacattccttatttgttgttatttttggtggggttgtgtttttgttgtttttattttgctttgttttaattcacactctagttatgatgatcccctgggattcattgtcatctgaatgcagaagaacatttatttagctataacatgttgaatgagacaatatggtgggtcactgtacttgagaaccaaactgaaaaagtacctttcttccaggaggaactatctactaattgacctgagaactgtacataggaaagaaaaggtacaataacagaagggataaaataaacaatgcctctcttgattctccactagatgctatcacagcaagaaacttcagagcaaagggatcagttgaactatggaggtagacaggcattgctgtgaatgcaatacagctgtagcacctctttgaa

SEQ ID NO: 3315 - DNA, 1200 bp, mus musculus
actctgtaggaggttttagtaggctctcctccactcccatagattgagttcatatacaaaggaattaattatctgaactcacatcccaatcttatgagctttaggcttataaagtgaactgagttcattgatacaattttagatgtccacacataaatgaaaaccaagagtttacaagtggaatatctctttctcacaaccccctccatgcccaactctctgatttggttaccactgcatttactctgccctaatttttctgtcctaggcaaattaaaccacagttttccatgccagaccttggtataatctttgattcttacactcctgcttaatttggcctaacagtaggttcttcaatatatctactttgttttgcagtgtgagtgttttcgactatattttatgacatcttgaaaatgtccacattgctttccttccctcctgttttcttttcacaaattcttcttcacgcaaggacacaacaaataaacaatcacatataataacttaaattttatttttgttttatttttgttttgtttttgtttgtttgtttgttttggggggggttgagacagggtttctctgtataaccctggctgtcctggaactcactttgtagaccaggctggccttgaactcagaaatctgtttgcctctgcctccccaaatgttgggattaaaagcgtgcatcaccactgcctggcaacttaaaatttttaatcctacttagcaaaaataatgcttaagtaagaaaagaaactacaaaaaaaaaaaaaaaaggaggaaatggttcattttcctaaggatgtagacaggtattcaagaacatccgcacatttggaagtcacattcagttaaaagccactttctcatttgcttataggaaatatatactattctttgagtacgtgcaggtcagcccattcactttcagtttcttgggttatcatcttggctgttgagctgagggaccccatgtctactttcaagtttctaacagacagttggtagaagccatttttaatgaatctattacatgagtgccttccttctatttgtctaactttcaagatctagctgagtgtctgaatataattagttattgtatttacatgttattctaaattttaaacatgagatttaagttaagtttattcaaatatgaaaattaagtgacaaaatttgtatatttta

SEQ ID NO: 3316 - DNA, 1400 bp, mus musculus
tagaatttctcttaaaattaaaaatataatacaatagaagttgaatatcaacacttaaaatattctttagtatttatagcattggtataaggaacaacaaaatgaccaacactagtgagtagatatactatttgtagcatgattgatgtacatttgtatattagaggagactatgtaaataatccataaataaaacttgggccactggaggttcacaaaagtatacaaagaaattcaagtttatgatctatccacatcttatatgctacccaaaatattaaatatctatgaaattgtctaaattaaaaatagaatttatagcccttttgcctggtcctttctgctggtacagactgctagctggtctactcccatgaagataccatcctgacccatccaagaggatccacagcattcagagcagtagttaagaacccctgtaccccaaactccctgagctttcccctgagaatccagtggacttgggacccaatcactcaccaaaacccctgctccccgattaccattccactccttccatctgcagctagccatctgctctttttctgctggggcagatggctagctagtctgctgccatgaagacaccataccctgccccatcctagaggatctcctgctctcagagcagctgacaccatgtcctgagccaccccagaagatcctctgcactcagagcaatccagcaccacagcctgaggcagttcaggagatgtgctgcacccaaggcaactgagcaacagacatcacaagcttgtatgctcccttgaagacaccacaacttgaaggcatcccaggagctcctctgtacatagagcaactgggtaacagacatcaaccctacaaactgaaagcctccatggagttctgctgcacacaggaaaacagaaaccagagtctgtagtcccccctggagaacatcttcacacaggctccttgaagacccaacaagctgaaggcctcccaggatatctattgcagccagggcaactgataagcagcttctctgcacctgtgaagacatctaactgaagggctccacagataatctggtacaaccagggtgtcaggcctacctggagacctgaaacaactcagggacaaaagaggcagactccagatagagtcacccagaccagcaaatagcaggaataaccagatggtgagaagcaagtgcaagaccataagcaacagatgcaaatatacgtgggtatcatcagaacccagttctcccaccacagcaaacactgagtacaccaacggaactaaatatctggaaactgacctaaaattatatctcatgtagataatagaatagtttaaggaggatataaataacttactgaaagaaatgtaaggaaatgtggtaaacaggtaga

SEQ ID NO: 3317 - DNA, 1400 bp, mus musculus
tatttccattgataatgtaaaggaaatattctggcattcagtagcatgacaaaacctgtaaggtttttttttagtgtttgagtaacccattttgtagatgtttttattaaaatttaaaataacaatttacacaaaggactatgtcaacaattactaattaatgtcattaatacttaagcaatgattctttctccatataagtcatatcaataaagtgacaagcaaaaatgaaaaaaaataattgtgtatgtactatggactaaacagcatactttcatattgtacatggttatggtttagttacatggaagaacttaaatccaatcctcagacaaaccagaagaggtcatcagatcccattacagatggttgtgaactaccatgtggttggtgggaattgaactaagaacctctggaagagcagtcagtgctcttctcggctatgccatctctcctgtccttgataccaggaaagcaagaccctcccaggaccccaaggggatggcattagctaaaatattccacaaaatggaggaagaccatatccagatgtttggccttgccccacagatgaggggtggggccacccacccatctctaaacttttaacacagaattgttcctgcctaagaaaatacatggtcaaagagtggagcagagactgaagaaaagtccatccagagtctgccccacctgggaatccatcccatttgcagacaccaaacccacacactattgctgatgtcaagaagtacttgcaaacagccgcttgatacaactgtctcctgagaggctctgctagttcctgatcaatacagatgtggatgctcacagccaatcatcggaggactgagcacaaggaccccaagggaggagttaggggaaggactaaaggagctgacgggccttatctgtcatcaatgtgaaaggcggcccttggtcctgtgaaggcttgatgccccagtgtagaggaatgctagggcagtgatgtgggagtgtgtaagtggattggggagcaccctcatagaagcagggtaagtggggatgggataggggtttgcataggggaaacaggaaaaggggataacacttgaaatgtaaataaataaaatatccatttaaaaaaagtgaaaaaaaacaaaaaagcaaataagcaactgtaagaaacactgggttttaattcaaaacaatgctatcaacaaagtatgtaggaaccatacagagtcatatgaaagtctataaaagactgaggggcaggggcaggtaattaaagtgtgcactgttattactgagagtaatgactcattgtctctagatggagaactttgtgttgttcacaagagttctgaatgaagaacttacatttcacccaatgatttgtatattcacaatcatttcat

SEQ ID NO: 3318 - DNA, 1000 bp, mus musculus
tctttacatcatttacctctctcctcctatctccaactcctaccatgtgactcagtgtttttcactctcaagttcatgacctcctctttattattacacacacaaaacacagacatacagacacacagtcacacagacacacaagctaatgagcacattaagacgttcagtgtttaggactaatcacttggatgagtgataacctaactggaagctcatttctggagagctccactctgtactacagcaaccattgactgtctaatcccctccatataagggtagggccttgtgaggtttttttttttttttattgaagttgatatgtcgcccttctggtcggcaccagaacgaggtcacctaggtaaaggagtcagcagacacacccagggtccccagaggactctccactcaaacttaggatcactggtgagtggaacacaacatgtgttccaatccaattgtgatgggcctgtgactgcaggaacaaggacaacagagcccttcctaaccagagacttgagttccttttgatcagttctggtttaccttggttttgaacagaccaggcagctccacggtccacaaaggagacaccacttccaggatcttaggacaacaggatcccaggataacaggagctgggtcacaccagtatctcagaggaggcttgactgccaaaaactctgacacacccagaatcttgggttcacaggagccaacaatcaaaggatcacagagaaagctgaactctgaggactcctgaatcaagtgggattataagaaatacaggctccaatcagacatattgagggcagcaagcacttgaggtagtcagatggcaggaggcaagcataagaaaagaagcaacagaaatgaagggtacttggcatcatcagaaccaaactcttccaccgtagcaagtcctagaaagaccatcacaccagagaagcaagacatggatctaaagtcacttctcatgatgatgatggaggacttt

SEQ ID NO: 3319 - DNA, 1000 bp, mus musculus
ctgtgtttgcttggccccggcatagtctcacaagagagagctatatcagggtcctttcagcaaaatcttgctagtgtatgcaatggtgtcagcatttggcagctgattatgggatggatcccaggtatggcagtctctagatggcccatccttttgtctcagctccaaactttgtctctgtaactccttccatgggtgttttgttccaaattctaagaaggggcaaagtgtccacactttggtcttcatccttcttgagtttcatgtgttttgcaaattgtatcttgtatcttgggtattctgtttctgggctaatatccacttatcagtgagtacatatcatgtgagttcttttgtgattgggttacctcactcaggatgatgccctccaggtcccttcattttttaacattgcataatactggaattaaatatgcaaaaaccatccataattaccaggaatctatgtgacagagatactgtatagaatatacaaaaaaccaacaacagtaacaaacaacaatttcaaaaaagccaatcccattaaaaactggggcatgggttagcacattacaactggtcttgttggaggaagctcaggtgagctggcccagagggtatgagagcagggcagctggtcctgatggcttgggctctgcaaagctgtcctgtttctagacagctgctgcagctagaagggttcacactgttgctcacattggcaaagtgggagatctggctctggtggtatggatgcaggaaagcttgtgagcagggcaactcagctaccccccaacctacccagaaccaggattttgagttagtttactccatcatccaccccatctatgaccttctggaacatgtgaagggactgctcttgcataactaaagctgcaggaccctcatggaacaaggcaacaagaggatatatgagacaagtctgggtgaggattccacattgaaagggtgacagaaggcagcagcatcacaccagacc

SEQ ID NO: 3320 - DNA, 1400 bp, mus musculus
ttgtatctgccaatccctgccatctatcaactgtctattgctattacctgtttaccaatcatctacctatttttttaaaagtctgtgaacttttattataaatagatttttttaaaaaagttcctccccactttcctatgtacaggaacccacacactttctctctctctctcttgctctgtctctctctctctcattagaatacaaacaaacatcataagaaaataaaatagaaataagaatctattgtttaagtaaatctgaatagaactacctttactgataatttctggaaagttaaagtagtttagagtacccccctaccccagcctgaaacaggctgatccagactttgaccttgctgccactaagaattagaccacctggggtggagccttcctgcctagattgctctattgttcacccaatgccactattctcctttaagaccttgctacctgctgagaggcccctgagatattctggagtgaacaccctatcctgcactgtcatcacctgcagctggttccaggctctaagaatggattagtcagggatgggcctccccccctttataagcacagttttctattaaacatttgagctttgatcaggaaccttgacttagctccatttttctctcaaccatctagttctttctctttcagctccagtctgcctcccaggtctaccctgtttcttgtgagccgcaggatggctcccaacagtctggcacctggtccaggggcctgaggaatggcagaaaaatgctggaggaacactgcttggtgtggagctccatgggaaggaaagaatcagagaaaaaaatcggggcatggtaagcaacaggtaatgtgttgctggaggtgcggaaggatacgggctaagcttgattgagtgctaacccagcgctggagtcacttaagtcagcaacaaattattcaggactagaaactggaatcaggtggttgaccgcagcttttcaaaactgctctaggcgagaggaatagggtttaaaaataatgaaacaggtggctgtccacagtcaagaactgcatcagacaggaggaatagggcttaaaatgatggagtaaaatatttagaggaaaatggattttgaaattctcccagaggcagagaaaaaattgggggacaccctgcctttttctctctggcccttacagcagaagttctctgcccttgttgtgttgtctaatgtctagtctaatgtctggtgtaccacatgtcaatccatttggtttgtgtctagttgtctgaatgactgaatgttctgtgtttcatgttggaaaataaagatggctaaaactttatctgctggttcagcaaagctgagagtggccacatgctttagccaaggatcaggcacagcaggggagccg

SEQ ID NO: 3321 - DNA, 1000 bp, mus musculus
gcttacaaaatctttaggaagatctataatctccattattttgccacttgttaacaattcagactgatatttttcattcattgtctcaaaaacgcttgttgaatgaccttaccttttcccattttgggggggggggtagggtgaggagttgtctgcatgtggacactttcccacaatcttctttttactatttactgccacagaccctcttggtcccttgtctgcatggaacgagtctctggtgcaggtgggcaaggagtcggcaggaattgacagacagactagacagaagggagtgtagatccgaatgtaatttgtcaaatagagcatcagactttttatacagaaaaaaaatagggaagttgggtgacacaccggcaaggtacaaagaggttactggatttacacaaaacagaggaatacaaacatggaataactggcaggaaccaactgggggtaaaactcaatgtttctgtgtagggcagtgacttagctatccgtgtccaaggttggatcaagggctgcctagaatctaacttagctatatgtcaaaatatcagtccttaggagcacttgtaataaagcaatattaagggaaagcgcacagatctggttaccaactaaagcaatgacattggagcattctttatacaggatgccacgttctagaggagactaagtttctgtgaactttttgccttggaacagtgcccaggttttcggggcctgtcgcgcttgtcacttctggagtggatgtagcaatttaccttatttctctgacactaaggctacgctgctgtcaccaatgttgtttctgggactgggtcacatgttctcatatcttcaaattattattattttctttctagacttaaatgctgtgacacagtggttctcaacatatgggtcacaaatccattgggggctgcatagcaaatatttatattataattcataacagtagcaaaattatagtcattaagttacaaaaagtaatttt

SEQ ID NO: 3322 - DNA, 1400 bp, mus musculus
attgcaatatgatctgtctggagtaaatccatgcccttactatacacacctttagttccaaacaatgtaggtaagtttagtttgtataaggaagctgccatatttgaaagtgatgtctaattgaagggcagacaaagtgactaatcagaaaaagatttgacacaataagacagaagttggatgtgtccaactttcatgagagtaggaaagaactacttaagagaacagctcagagtgagtcagagaaagggaagtttagtaaatatatttcagttgaattcaggcagtacagtggaatccggttgatttcaattcaatatagttcaatgcaattcagtagaatgcagttaagttcatttgagtttgtgcaattctgttcatatacattcagtcagtgcagtttatggaatttaaagccagttttcccaagcaaagcaattcactcagaagctaagagaaacaaatttgaatcagtcagcttgaggagaagtttgggtcagaacagctgagtgaaccaatcagccaaagttctgaaagaactacaaatattggttcctgtcagcttcagcccctggccaccttgggctcaaccttggcagatggtcccactgtacccagaggactctccctgcagcaggcaccctagcacacccaggatcttgggatcactggtgagtgaaatacaacatctgtctcaaaacaacccggaggggcttgtaacagcaagaacagggacaaaggaaaaccacctgactagcagctggggttcattctggtaggtgccagccccatgccaccttgggctcaacctctgcagaagatcccacatttcccagaggactctccatgttccctagcacaaagagggctctgaccccaggactcagctgagaacacccgggtctcacagaaaccagtccacacaagagagatcatgggacacagaagcaacagagcttcttggacagggtcccttttggccttcatcttcagccaggaggtggatctgatctccagcctctgtgcaacttccctgcaagaggagagcttgcctgcagagagtgctctgaccactgagactcaggaaagagttggactcccaggagtgctgacagagggtaaagattcacggtagaaacaagctccagccagagacagctagaacatctaacaccagagattgccagatcaggaaaggcaaacataagaatcttactaacagaaaccaagaccactctgcatcatcagaacccagtatgcctaccagagcaagtcctggattacccaacatacctgaaaaacaagattcagttttaaaataatatctcatggtgctggtagtggattttaagaagggcattaataactcacttaaatataggagaatactgctaaacagg

SEQ ID NO: 3323 - DNA, 1000 bp, mus musculus
tcatcttttcacacatattcccatccccacacataaaataaataactacatgtcactaaaatgttaacgaagagaagaacagatggatgacctgctgatcagctaaaccacttcactgcctagacttggtttctgatgacaattccacgaccctccctccataccttactgccttccctacatccaggcctctgcctccatttcagacagacgcctgatgctcaggtgcaggtcatgctggtcagaagaacaggtaagtgacttgtctgtcagttgaactgccccactatctagaccccattctactgaccaccctgccacctcatcacctaatctgcagctgggcccctgcattgattcaggcagactcttctttctcagatgcagaccacaccaaacaaaagaaaggagattcacttctgcatcaaaagtctaagctagttaccagatgtccaaccctccaacctgatctgagactccctattggatcagagcggagctgctcatctgaaattcagacaacaaacaacagaacaccaaagagaaaacagtaactgaggaacaaaacactaatccaacaaaaacctataatcattcaaaatgtagatgaataaactccagtgtaaggattcaataaaaagagcaaggccaatatggcaccaccagaggcatgcaatatgaagatagcaaaattggaatatttcaatgcacctggagggcaagaaaattaccattaaattaactttatcaacatgataccttctgttctccatctgtgccctggagctaaggctgtcccacagccctccacatacaaatcctaccgggaaaaagctggcctcccaggagtgctctcactcctaaggccaccggtgaaatcactactttcattccaaaaactgtccaaagagggaccaaaccaggagtgcacaaggcacagtaatagaccatttgtgcccaggagctaaggctatcccatagatctctggactcaaatcct

SEQ ID NO: 3324 - DNA, 1400 bp, mus musculus
tgtttcagaaacaacttttagattttacattttctttgatttacgtattgatttcatcagtcatatcttctacatctgagattctctcttccacctcatgtattttgctggtgatgctcacatctttagttcctgttctcttccctgggttttccatctccatgattgtggttttgttgttgatgttgttattgttgttttggtttgggtttgcttgtttgttatttcttctgcttttatttctatttttatgttttgaacagttgtactcatttcttcatatgtttgactgtattttcctgtatttcttcaagtaattcattcatttcatccttaaaggcctctataatctttttaagattggatttagggtgatcttctagtgctttggctgggttagaatatccagggcttactgtggtaggatagttggtctcttggaggtgccatagtgccccagctcttgttgtttgtggttttatgatatcctttagccatctgattgaccctggtgctggctggatcttcctggtaacagcagaactcctagtggagagagcagaagtttaggactgtcaaggatgttcaaggaatagcatgttcctcatgtctgttggctgtgccccagatggatcctgtctgaagggaattggcacagaatggtctaatcaggatggccccggggcccagcaagcttgatagtggatcagtgggcactgacagaggacagctctcctctgctaactgtgtcctaggtggacctggctagcagggaatagttgggatgggatctaatatgggtgttcctagggccagacaaccctggatattcctgggacccaaaaggtttcctatggaggaaaatcaatggagttggggatagaagcagagtgccgatcacctctgctgactctataccatatgtgtcaggaaggcatgctctacataattattactactttttggatactaaacatcttcccaatcatacctgttcccagagatagcatgctctcatcactttatatcattactcacagtaatagatcctattttacttacatagttaaacagtttctgctttttcacatttaaatttcaacacccatctatcataagtactccaagtaatctcaatttcatttgaacacagtaatagatattcatacgaattttcagcttttttgcaactattatttagccatgatttcaactaagatcaccttaatcacaaagaacaagaggagagtttttcttagtaatatcaccatcagcatatttgattatgaataacaatatatttaaagatagagctgacttcctgatttaatgcttgattcaatttcccctgtagacccaggagggagttatttaagagatcccaattaggaatgatttga

SEQ ID NO: 3325 - DNA, 1400 bp, mus musculus
tttatgaagcaattaaaataagtgtcatgtttgcacatttataggtgtgtataaagtagggttgcattatttatctttttggtcacacaacatataaaggatatgatatgtggtgtggtgaactctgcagcctggtctctagtcaagcacagacctggaaccccagagacctggttggcagtgacttcatgggagggtaggagttcagccacgcctactgggcccctgactcctgttgcagctaaagccccccacagcagagaggtgtgtggcagtgtaggcaatgccttaagctcctggtattctgtctggactccagccccacagttacctggcaacagccaggtatgctcctccacacagttgccttgctggcaacatcaaggtagtccagcccactataaaaggagctgcttgcccctcctcactctcttgttctcttactctcttgcttctctcttgccctcttgctccgcatcttccccttccttcccccactctccacatggctgccctctgcttctctactttctccctttctctgcctttctacaataaatgccttaataccatggactgcctcttctaatcaggatccacggtgctggagcaatggagcatgtttccctctaacaagtggcgcctctaacctcccaccaggaagcctccctgtgctccagccacagccacaaccaatccaatccagctgcagagcaagtcacttaagctgagcatactcaatcctccttgctcataacctgccagagctctcctttctaccctgagtgtcctggtatgtccacgtctgtgacatacagcaggcatctgagatgtcccagagtgagaacctgatgtccctggcttctgtgctgcccagagattccagaaccagctcttctgcggtgcccagtagtgtctgtgatgtctgagagtaggagcccgactttggcatgtctgaggggacttcaaacttcgtcttccctcctccagggggatcccgcagctccccacagtccaacgcctgtctggctgttccatcaggttcctcaaagtcagacttcccgcaacccacctcacaaagcagccctagccccaagaggacatgggtccccacttgttttgacccacatctgcagaccaacgtgggccgaaggtccctctcgcctctgtttttgctatcctaggttttttgttattccagatgaatttgcaaattgctccttctaattcgttgaagaattgagttggaattttgatggggattgcattgaatctgtagattgcttttggcaagatagccatttttacaatgttgatcctgccaatccatgagcatgggagatctttccatcttctgagatcttctttaatttctttcttcagagacttgaagtttttat

SEQ ID NO: 3326 - DNA, 1000 bp, mus musculus
atttgaaaatatggttttatttaaaatgtgtttgatagagtttttgagctacaaaatcttaatatctgatttgaggtacatgtagttagattttgttgtaaaaactaatgacataaataaaaattatttgatttctttgagctgaaatgagtccataaattaattaagttgaagtactattttgaaagatagttatacttttgtttgctttcaaatttaccactgtattttaacattttatgaagccttttttcttggtgttgctttcatttttcatattcaacatgtgtaaattaccataaaataatagtgaaatcttttttggatacatatacacggtcattaaaaattatcagtacatcatactttcttttcaaaatgcctgagtatgtccaggtaagaggatatgtggtttacatatgaaacaagcacattagttgtctataggacattgacagaactacagaaaaacattcatctcctgtgggaactgggtgaggctgcagaggccaagatgtttactgccttgcccaagcatgcttggtgaggctccatgcgtgggctgcctaccagactggactgttccttgtgatctggaactgtcagcctatcagtgaccaacctgagctcttgcctggagagtgtgtgaattctgattggatgaggtggggtggagctagatgaggtcagtcaggtgagtttaggagttgtttttgttgtttagcccttgccctgagtagaagctagttgtagtaagagaaactgttgtaaggggagttctaagaaaagttgcaggaaggagaacaagtaaagaagctgttgcatgaaccggacttggtgtccctgtcgttcgtgtctcctctggctcgaaggacctgtgacaatctcccacttgcaaaatacatatgatcccggaaatgaaacaactggaacttgctgtgccttgcctgggaatgttatatgaggtctgattgactacagttcagcaaggcttctgcta

SEQ ID NO: 3327 - DNA, 1200 bp, mus musculus
ttggtataaaagaactttatatgagtaaagttagaattacttaacaaatcctgaagtcgccaacctcatgagacatactaaaaagtaaatatctcagtactaactctgtcatattaaactattggttcactcacaatggccattttggccacagagtaaacttatatagtcagaactggtgaaatgtagatgatgtaaataattactcatgtaaaatcaagttctcagacacttgcccaacatcagaggaccacagagtgtgcagagaaatatcctatgttccctgaacaaatttttttttgttattaggggagcccagttgttattcccctctgcttctcccccctgacagttcctcatcccattactcctccccaatctccaagaggatgtcccacaccctagaccccctagacctcagcaggactccccattccctggggcctcaagtctctgaaagaatatgtgcatcttctctcactgaagccagatcaggcagtcctctgctgtacatatgtaagaagtttcagatcagctagcatatgctgcaaggttggtggctcagtgtctgagagatcccaagggtccggattgccctccttctcaacttcttccagcctttccctaattcaaccacaagggtccctgacttcagttcattgctcagctgtttaagtatctgcttctgacacagtcagctgtttgttgggcctctcaaaggaatgccatactaggcacaccataacatcagtagtagtgtcaggccttagagcaccagttgaaccagtcactgaacctcctttccctcagtctcttctcagattttgtcctgaagttctaaaagaacttcagagaactagagaggaacaattctgggtcagagtttttttgactgtggtatgcaaaccctatcccttcacttgaagccctgtctttttgctggagatggactctacaagtcacctctccccactgttgagcatttcatctaaggaccttttgagtccttttaacatgaagcagttttgtattttgtcaaatgttttttcagcatctaataagatgatcatatgattttttctttgagtttgtttatatagtggatcatgttaatggattttcatatattgagacaaccttacatatccaggataaagcctacttgatcatggtgaataatcgttttgttgtgctcttgaa

SEQ ID NO: 3328 - DNA, 1200 bp, mus musculus
agtactggtatgcttttctatatctggcattcagaatctgataaggactatttgctaagtttagtaaaaccatggcttcaattttattttctaaaagtttaaatttttcatttccactgctgttatctttgatttttttcttctgattacatacttgtcactcttgtttcttctatatcaacatttctcttaaagttagtgagagagtagttctttgcagctacacaggcatagccaaaatatccaacataggagcgatacaacctgtagagaccacctgcagtagaaaggcatggcccctgctgaggcctggccagatagtttcagcacagaattctactagacttttaaaaagagctaatatcaaaactcacttaagtcaaaatttttaacccagaaatgtttccaaaggaaagacagggacaaaggacaacagagaccaccccacctagagatccaacccatctgcggacaccaaatcccacactgttgctaatgccaagaagcacttactgacagaagcctgacatagctgttccctgggaggttctaggagcacctgaccaatacagatacctatactcaaagccaaccatcagactgagcccaccgaccccaatgggaaagctaggggaaggactgaaggagctaaaggggatttcatctccatatgaagaacaatatcaactaattggaccacccagagcttctggggactaaaccatcaacctaagagtgtacaaggagggagccaggactccagacacatatgtagcagaagaagaccttatcttgacatcaatgggaggggagggaagcttgatacactagcgtagggggatgctagacagatgaggtgggagtggggggatgggtggaatacaccagcgtagggggatgctagacagatgaggtgggagtggggggatgggtggaggagcatcctcacagaggcaaagaagagggggaagagagggttggaatggtgggaggttgtggaggggtaaccaggaagggggatatcattttaaatgtaagcaaataaaattattaataaaaatcaaacaataaaaaacaactccccatatttagaaaatctgaatgaaaaggatgattttcttgagagatatcacttaataaagtgaaatcaagatcaggcaaacaatgtaaacagacccataactcctaaagatacagata

SEQ ID NO: 3329 - DNA, 1400 bp, mus musculus
acaggaagcagaaaaaaaaaacaaattttatattatatagagagagactaactgtcattaacaaaaagttattatgtcattgctgaagatgtcacatacttgaatcagagaacttggagaaatcatgctggtactgaactgaaagcattatccttgccagctagctttcattgcttgaacggtctatgcatactaccagagaaggaaaggaataataagtcttacccaaaaacaaccactgagcagtaaaataataacaggcctggaaaggtgtctactgattccatactaacattgctatctgggagtaacaaacaactatctgatttggtgtactgtttataccacaagatgaaacacatatttggaaccattatagggctaagaaactgtagacaaaagacccaagaataaaagacactactgttcttctaaatgggcaaagaattaatcaaactcctaattacttatcttcattcccatagatcagtaaatatttcaacccccaaaagagaggctcctactttcagcaaatagtgataaactgaaacaaacaactggtcaaagttcagagagtaagaggcagaagaatgcttagtggtaagtggaaaatatataccacatcccctctgccaaaacctcagcaaataggaggtagaaagagtgaaagaaaccagaactggttgatgactatgagaaaatagtgtcctctggaaacagcagggaaactgtataagtgatttcatagttcttgtgacagcaggcacaagacctgtgcaaaccaagtcagaactcatcactaatcccaacatggagaagggagttgagaattaagtcctaccccttgtaaaggagctgtggtcaattgtcagctactgagaggggaagggtcaattttctttaagaatgtagcacctaataaattgccaatactggagtcaaacccctcacatccaaaattatttgaacatcacaagagaaagatgaagagaggagacatgttgagtggttagcgaggcaaaggatggtaaatctatgaggacttggagaagaggtgaaaataatcaaagtgcatcccatgaaattcttgcagaatttaaaaaaataattggctgattttatatgaaaaaggtagatccaacatttacttccactcactgagactgaaagataactcctgtattctccatattcaccttaattctcaaggtaatattcaatctgtctgctgtcacgttggaagtcttcattaatattattgagcatgtaatttacttattaatgtcacaagttccattctaaaattttgactgagaagggaaatcagatggaaaagaaatcaaaaagtcttctcaaggataaaagaacttctggcggaatcaccatgccagacctaaagc

SEQ ID NO: 3330 - DNA, 1200 bp, mus musculus
acaaaatctgaaatgataaaagagaaataacaagagaaactggagaaattaagaaaaacaaaaacaaacaaacaaataaataacaacaacaacaaacccttaggcttactttaaaagcctaaagtggacaaaactggaaaatctaaacataatagttgactttctagacagatacattgtacccaaagttaaagcaagatcgggtaaaccatcctagcagtctcataaccctaagaaaatatgagtggtcaccagcttgtctgctcctctaaagaccccacattctgaaggcctcccaggagctctgctacatgaagaacaacaaggaagaggccctctcaaacaaccgcaaaatctgggaaccccaaggagcccagcctacttgggacccagcatttcccttctagcctgagccttcagtccagcagatcatcagctttactgtaccccacagattgaagactacacaggagaacagttacatgcagggcaacagcttgactgctccttggaagacacaacagcctgaaggcctcccaagagatatactatacacagtgcaacagatcatcagcctgtctgtcctctgaagacttcacaatatgaaggtctcccaggagatctgttccacccagggaaatagatcagctgttgtctgcccctctgaagactctacagtctgaaggcctcacatgaaatctgctacaaccagggccacaggtatcccaggagacctgcagcatcccagggaaacaagacaaaggctccagacagagacacccaggccagcttagagtagagatagctagatggcaagaggcaaatgcaagaccataagcaaaagaagctgatacacttcagcatcatcagaacctagttctcccaccacagcaagccctggacacatcaacacacttaaaattcaggatgctgatctaaaatcctatctcatgaagattatagagtcctttaaggaggatataaataactcactgaaataaatataggaaaacacacataaaccagtagaagcccctaaaaaggaagcaaataaatcccttaaagaaatacaggaaagcataaacaggttaaggaattgaacaaagcagtctaagacctaaaagtagaagtagaaacaataaagaaaacacaatctgaggaaaccttagaaatggaaaacctaggaaagggaccaggaat

SEQ ID NO: 3331 - DNA, 1000 bp, mus musculus
tcctcatcctaccttcagacagtcccttcccccagctgttttccccttttcctctgagaatcagaagccctcccgctgtgtaccaaaccacccttttacatcaagtcactgcaggactaggtgtattctctccagtgaagccagacaaaggagatcagttaagggacagggatccacaggaaggcaacagatttagggacaggcccactctagtttggaggatctgtatgaagattgagtttcacagctgctgtatatgtgcagggggcatagacctattaattttcattttaagctatataatatataaataatcttctactttagacagcaaaaatccataccttaaacccttatataaatactttctcaaatacaaatgcttttggtatgtttctagtataagagcaatggatgtgcaacaccttttcattttataacaaagagattccaccctgtacacaatattcttcatttacattttctgatacgttttaaatgtcttagagatcttcctccattaatatataatttctctttctctccctccttggtccctctcttcttacttttctgttcacagttatatgtcattaatatgaattttaatttattcagtctcataagcaaatattaatttgtttttacaagctactgtacaaaatatgtaacttcttaatcatatggacacatgtatttgttcaataaattattaatataattgcattaaataatatattatatatatatatatagttgctagcattggactatttctagagaagtctgaaactaaacttattgattttcttcttgaatattaaactctctgtatgttatttttgcctgtctggagaagcacagaagtgttctgatatggttatattcaataacttttctcaggaactatgtattataatagatttgtattagtaactgccaggttgtgaacaataaaaactatctaccagcaacataacagtttccttacatcagtact

SEQ ID NO: 3332 - DNA, 1000 bp, mus musculus
tcctcttcacggacgtcctggtgctaaaggcaaagtcgaggattccatttcagccctcctccaagttcagccagcccaagatttatctgctgcgcatggacaagagcacagaggggaagagtgtggccccgcccatcagatggcggtgctgcacagaatctaaccttgctgtaaggaaagccatgcagagctgggatggtgccacagcgtgcgttgctggacacaagaaagtcagtctccagagcagtttggaaagagaagggatgggtgaggtgtcagaagggcaaagtctactctaaatcctgcaaagggttcagacagaacttggggtatgggactcgtgcactgagtattccaaaccactatgaaggactttatgctttgcaaagccttcaggcctgaggttaaacctcttactagcacgtgcaggccttgtatttgatcccagcaaccaaatagaaaggaactagctgttaaaagtctcagaggttaagagcactggctgctctcatgggggatttggttgcccacacccacacggtggctcacagccgcctggaacttcagttctagggcatccgatgcctcttctgcaagtaccagaaatgcgcgtggtacacatgcacacaggcaggcaagacactgccgcacttaaaagtaagtaaaccttaaaaatagtagagtgtgtctgtccatccatccgtctgtgtgtacatcatacatgtgtatgtggtctgaggacctgggtgtgtgtcctcaacttccactttgagtcagtctttgttttcttcttctatgtatactgggctcgctggcttataaacttccagagattctcctgtctccatctcccctccccacgtaggtgtgctgggcttgaagacatctctgccatggacatggcctttacgtggattttgggaattcagtctcatgccctcatacttgcatgacaggtgctatattgagccacctatgtcctcagtacccaagtcacctt

SEQ ID NO: 3333 - DNA, 1200 bp, mus musculus
actactatggctctgtactacaatttgaggttgggggtggttatatatctagcagttcttttgttattcaagatctttccactatcttgtttttgcatatgtttccatatgaagctgaaaattgcccttccaagttcttgttgggagctattaagacaacacaattgtcctgatctctgaattgggcctctcccccctcccccgagaagaaaagggggtcaaaggcgggccacctacgcacctgctccgagaacaaccacagattgttctagccctaagtcagggctggatgtcctgactacaagatgtacccagataccaccaagttcctgcttccttgtgtagtcgccaaaagaaaaatttccgctgccccatccttcctgctgagaagtacttcctctttttctgatgtcccattcctcctgctgagaagtacttccccttttgcttgtgcatttaagccttgaattaatacaagtgaatacttgctgaatacagtgacaccttgatgctaatcagactgcttccgtgtgttcttgcacttggtgtctgtctctccctccccccatttggttcttaggagaaggtcccctcgagaccctcgaataactggacctgctggacgggtcaagttctgtgaagaattggggggaaattttaatggggattgaattgactttatagattgattatggtagaatggccatttttaacacattcatccggtcaagccaagagcacaggggcagggggagattgttttccgtcctctgaagtcttcttcattgtctcaaatttttatcatgcaatctttcacttgcttggttagagttacctcaagctattttaataaaaagttttgaggctattgtgaaaggtatgtttccctgatttctttctcagctcctccgtcatttgtgtataggaaggctactgattttttgtgtgttctgtttgaatcctggtactctactgaaagtgtttattagctgtacaagtttcctggtggagattttagaataatttgtatatacactcctgtcatctactaacagggatacattgacttcttccttttctgtttgtatccccttaaactcctttggttgttgtattgttgtaactaagacttcaagtcttatattgaagaggcatggaaagagtggaaaatcttgtcttgttcctgattttgatggaaat

SEQ ID NO: 3334 - DNA, 1600 bp, mus musculus
ctgtaagccagggtgaccttggacgcagaaatctgcccaaggttaaaggtgtgtgccacaactgccccagctctactctaattctctctctctcttttttctgtctgtctgtctgtatgtatggaagtaatattaatccattaatatctctttttcctaaaattcatgtcacttctccttactttttctctctcactcactccatgtttgtgtgcatgtgtgtgtgtgtgtgtgtgttagtctagggtacacagatcaaagaaatcatatttcccagggattcttagaaataaacaaggaattctaaccatcatcaccatcaccaccaataaaaaggctgtggaaactgtttcatgtccctctcccccacaggtgaggatgtagctgcttaatactccatgtgtgtatgtgtttccatggccagctagtaccaaccccagatttgtgtttcagagatctttacttatttatttctcatgcctggtcttgagtgggtggtaggccaccacacttccagaaaaacaacataaaatcaactaacaaaccaacccgaaaatgtaaaagaatggattcatctggcatttaaaagtaatagactgccgggcagtggtggggcatgcctttagtcctactactttgtaggcagaggcagacagatttctgcgttccaggccagcctggtctacagagtaagttccaggacagccagggctacgcagagaaacattgtcttgatctcagcactggggagaggcagaggcagaacttacttgagaggccggcctggtctgtcttgtatgtttttgcaccatgtacagagactttgcatctcataaatgaatgaatacagagaaagatattcatccatctatacatgcatgtgcgatggctcagagggcaaagctgctagctgttaaggtacaggtaaactattaaggcctagatcgaatgtgaaggcctacttcagattagataaggcctaggtaacctcttacctggctagcctgccattttgtgctgttaactactattataaggacactttctcataccttgtttctgcttttactgcccgaattgattacatattcttattggttgtgtcctcggaaaccaatcatgaaagaagccaatcgaactgcttcctttgttctatagtaatctgcaataggcttggacccaaactgaccacctagcagcatttcctgtactcacccatgtatacacttttatggcatttgctcttagaagctgccctggggctggacccccccacccccaacacaagagagacacccacaccaccgattcagtgcacagactactatgattggagctttttattactgttgattgttgagtatgtctctgaataaatgaaatatagtaggttaggtcaagcaccccgagcactggctactcttccagaggacccaggtttgattacccagcacccacattaaagctaaccagcatctggaactccagatttcaataggaaactcctttacaataggaaaacactgcctattggtttatttgttcaaatgtacaataggctatttataaataaatggatctccagtgaagtatgttaaaa

SEQ ID NO: 3335 - DNA, 1400 bp, mus musculus
cccgggcagtttcactttgtgatttctttattgtttctacctacatttttagatattgaatggttttgtttaattcctttcacctgtttggttgtgttttcttgttattctttaagggatttttgtgtttcctctttaagggcttctagctgtttacctgtgttctcctgtattcctttaagggagttatttatgtccttcttaaagtcccctatcatcatcatgagaagtgattttaaacctgaatcttgcttttctgatgtgatggtgtatccaggacttgctatgatgggagaactgggttctgatgatgccaagcaaccttggtttctgttgcttatgttcttgcacttgcctcttgccatctgattatctctagtgctatctgcattcactgtctctcactggagcctgtcccttctgttaacttggttgtgtcagaactcctcagagtccagctgtctctgtgatcctgaaatcctggtgtgatcaagctcctgagatcctatgatcctatgatactgggcatgttagagttcctgggagttgagcttcctctgggtgatgtggggcttggtgcagagctggtgcccaaggttctcagggcagtggatcagaccagaaggaacccgtgcaactccccactccttcttttgatctgtttttatcttgttttaaggcttcatactatccaaacactagaatctgaaacaatcccttctctccttttctaccaagtgaagggattaaaggtgacaccaggctcagcttcaatgcttatgtggctcatcaacaaccagcctgctcaggtcccttccctgcccacctagcctttcccactttcccatccacagaatgccttttaccccatcgggggcaatatgcggtcatgtctggggagacctcatctaatcaggggatggaaagccttgttctctatggatgactctggcaatggtactgcctttggatctatgggatcttctgcccttgctttcaagaccatgtcatccacctcctggatagatggcatcagataatggtattcattaccaggaaggagtgggttcttttgttttataaaagatggccctttccccctatattttcagctagatttaagaccctaaaacacaaataatatctgatacactttatacttcagcacttgataaaagtcactaaaagtacttttgagataagtccttcaggtaacatgatgtgcatctgaggggttctactaaccagagactgtcgatgattgaacagaaaataggatgcagaactggtggacatcttttttttttttcctttcaattttttattaggtatttagctcatttacatttccaatgctataccaaaagtcccccatacccacccacccccactcccctacc

SEQ ID NO: 3336 - DNA, 1400 bp, mus musculus; identical to SEQ ID NO: 3335

SEQ ID NO: 3337 - DNA, 1400 bp, mus musculus; identical to SEQ ID NO: 3335

SEQ ID NO: 3338 - DNA, 1400 bp, mus musculus; identical to SEQ ID NO: 3335

SEQ ID NO: 3339 - DNA, 1600 bp, mus musculus
ctcatctagtgacgagtatctcctagagacctccgctaattgatcttttttcttttcttttttcttttccttccttctaatctctccccaggtattcttacctgacattaacttttcctcgggttcaagacccttggaaaggcctgtatacttagtttgtgtaccatatttcctctttgctcctactctctctccccgctttacttctgatagattgccctgaatttcatccagaattttcagccctatcttaaccacttgataacatgtgaaaaagaacaaaaaggctcctaacactaaaaaaaattcaaggccaaacataccttgtaaagctatttcccactttacttctgatagactgtcttgaatttcgttagaaagttcaagaccagacttaccttgtaaagctatttcccactttacttctgatagactgtcctgaatttcgttagaaagttcaagaccagacttaccttgtaaagctgtactcactggtacccctgttccccagctgaagagttctgaattcatgcagttgaatccttctcaacagtctgtgttgcgggaacactttattaccaccattccccagctgaagagttctgaattcatgtagttgaatccttctcaacagtctgttttacgggaacacttcattaccataacccgcagttctggttccggaatgagggatcttccttgcgccggtgatggtaaccgtcctgggttttctcgtcccaggttttctcgtcccgggttttcggcaccaactcttacacgcgttcacgaccggccaggaaagacgcagcaaaccagaatcttctgcggcaaaactttattgcttacatcttcaggagcaagagtgcaagccccaagcccaaaaacgaaagcgaaaccccgtccctcttaaggagagttatccttcgcctaggacgtatcactccctgattggctgcagcccatggccgagttgtaaggcagagcacatggggtggagaactactcttggcacatgcgcagattatttgtttaccacttagaacacagctgtcagcgccatcttgtaacggcgaatgtgggggcggcttcccacatcaggagatagtgttgtcatttccagtttaaaattcaagcttctggagggcatcatcctgagtgaggtaacacattcacaaagaaactcacacaatatgtactcactgataagtggatattagccccaaacctaggatacccaagatataagatataatttgctaaacacatgaaactcaagaagaatgaagactgaagtgtggacactatgcccctccttagatttgggaacaaaacacccatggaaggagttacagagacaaagtttggagctgagatgaaaggatggaccatgtagagactgccatatccagggatccaccccataatcagcatccaaacgctgacaccattgcatacactagcaagattttattgaaaggacccagatgtagctgtctcttgtgagactatgccggggcctagcaaacacagaagtggatgctcacagtcagctaatggatggatcatagggctcccaatggaggagctagagaaagtagcc

SEQ ID NO: 3340 - DNA, 1400 bp, mus musculus
attatttcaaagaatataaagagatgggccacagtgtgcttatatgtaaatgcaatgattctgcttttagtttaatcaagtgcatattttctagaaagaacatgaactacattattgacaattgattcaaaaatacatcctggtgttgcatctttgcatgtttaaaatgaagattctgtattatttctaacacaaataacagctgtgtcctgctctaggggtatctgtggccactctctgactccctgctgcctcaggacaaggcacctgacacttcttagaatcttctcccttagaacagaacttctgttccaaagaacacaagtaggagttcaaaaaatatgccactgaacatcatctgtcttctataattacactataaaatgaaaccaacatcaaacggagtttggctgcccgtacgtaaaagtaatgataaagcctgtgagaccatgcagcaaacagcctaaccacagacccagtcttctggttggctgaggagggcagggggtcaaagagtggaggttggggctgctgaggggagcccggagggaagacagggcttaggtctcagctctgcgtctaaggctccaactccagtcctgatactttgatcttcttccaacaccctctgttttcccaggatttaaagctgaaggaggtagaagccaatgaggaggaaggtgaatcgtcacctgggggtaataatttaatcccattattggggacttgaggtccactttcatgaggacttcagggaagcatcaggatgagaggaaagtctcaccaacccagggctatgcctacactggcaaagtagggagctttcctgggaccgggggactcacatgatggagagaatgagctaccatcttcatacgtcagtcaggaaatgcagggggcatgccttcaggtctaactgtgtcttttgctttgtaaaatattgcaaatcttcatataaactgcaattcttttaagaacttgctcattgaggattatatatggtcctgagacaagctaaatatcaattcttttaagaacttgctcattgagaattttatatggtcctgagacaagctaaatatatgtcacattcaataacactttcttaaaatagtatgttttctcattatccccttcttactgtggaactcactctaaagtttaaagcaaaattgcataaacacaatgtgtattttgtgtttaagaaacaccaatctgggtacggtggatgacacctgtaatcggagccttcaggagggagaggcagaaaagtactacatgttttatataacagaatatttaaatgttagaatatgatattttaaggtggaagaacattttaatttacctcctgataatattaatatggttctaatgcattttaaagtgtcatttagctt

SEQ ID NO: 3341 - DNA, 1200 bp, mus musculus
tatataatatactaataaaagtttttaaagtatttgttttgtggaacaaagtgaaataagaataaaaacaatcagataatttcagaagcaaaaattcaaatgaattccagttaaggataaaagcaggaagttagaaaagaatgagttaattaagagcaacatgcggatggatgtgtctcacctgacagaatgcccagcttgaacgatgtcctggctcagttcccagcacagcatgaactgggcattgtggcatatgcactggggaggtggggggcaagaggatccattccgagatgctccctgctatcaactctgataagacaacttggatttcaccaaaaataaaccccaaaaacttcaaaaactcccaggaatttatgagggtgaccctagctaagactcttagaagtgaggactatggagcctcaaccacccatctcctgtaaccagtcaaaacttccagtggagggacagtgacccagtcacaaaagcttagacccacaatttgtcctgcctacaagatgtgcaggggtaaaagaaggagcagaatttgaaggataggcaaacagatgcctggcccagcttgagacctatgccatgagagggaacccacccttgacactattcataatatgctgctatacttacagacaggagcctagcataactgtcttcagtgaggtgtcacccagcaactgatggaagcagttgcagaaacccacagccaaacattaggcagagattggaaaatcctgtggaagagggaaaagaattaaaggagccagaagtgtcaagaatacaacaagaaaacctacagagtcaactaacctggacccatagggaccaacaaagactgaactgtcagccagagagcattcatgagatgcacttaggccctctgcacatctgtaacagctgtgaagctgggtcttcatgtggtactctaaagcagaaacaggggctgtctctgactacatggcctttggtttcctctcccctaactcggttgccttgtctaatctcaatagaagaagatgcacttagtcttacaatttgataggccaaggctggttgatatccatgggaggcttccccttttctgggaagaaggagaggagtgaatgggagagaggatgaaattaattaattaattaatgaaaatcagaaagtgagagagaggaagggagggagggagggaag

SEQ ID NO: 3342 - DNA, 1000 bp, mus musculus
tgaaagaagtcaacaaagcaggggaaaaaatcaagaaaacaaagcaacaaacaaaacagagagaagactacagtgttctaaaagacagtggaaaaaagtactccactgaagtaggaacaatcaactgcccagtgcagtttctcaggagtcgagaaagttgagaagcaatgattgaccgtgcggttctgccccatataaatcaccaggggccacaggagaaggtgtaaagaatttctgagaaggcactatgctgaagtaactccaagtcgcgagaggcagaacaaaaacagagcacagggcctaggcaagagcgatctgattgtttcatattagatatgcagctgtgtggatacgggatgagccaaggagtcagaagagggaagaatgggcagaagaagtatgagactcacgaacaggacgagcctcggtgctcaaaatatgtccagatggaaagaaacatatcaactgaacactaaagaactagcaattagaaactgaatagtaaagaattatatatgttaactatttacctgtacaagggcagggatgtgcacatgccatggtgcatgtggaggtcagaggccaactcgcagaggtcagttccctccttcgagcacgtgagtcccgggcacggaactctggccattggccttagtggaatgatcgagccttcctgccagccttcattttgttttttaaatagttataaagaaaaaaaatcctacagaaataataaagcattgtgctatgtagggtctgtgtggtgttctgtataatgctgtgcagaggaccagagctcccagtggtcacagtcagctcttaacaagcatgtgagctccaggggcacaaagccatagtcgagagctgaagccacgtgtggggatctgaacaggcacaaactctcacgaggcagagcagtttcccataatcgtcctaaacagtctttagagcagattctatggacccctcaggactgggaccctaataaagtccatgccta

SEQ ID NO: 3343 - DNA, 1200 bp, mus musculus
tagaatatttacatggacataataagagattttagaaatgagctataaaatctaagtacaaaatttaattgtttcacatatacattatgcatatagcttaaaggtaattttaggaaatctttttagtaagcctgcatgtaatttttaaaatttatttatttatttagacacatgtgtgtgcgtgcgtgtgtatgcctagggcctgtgcatgccacggcacacaggtgagtcagaggacaacttgtcgttggctctccttctagagttcagttcagattgtcaggcttccccattgagccacctcagtgacaagtgtccctgtgctttcactatgtacctattcatgacatcgggcaggacatttttttacatttggcatcatgtttacaatcaaagtgtttggattttgtagtgtttggaatctggattgttccacctctaatcccctttccttttgcaactaactttcttttaaaattgatttttccattcattaatttacgtattcattttacatcctgatcgctggaccccaggggacacccccgacccccacgccagccacatcaagtctctgcagggataggcgcatcctctcccactgagtctagacagaggcagccccgttaggagaatgggttccatagacaggcaacagctttagggacagcccatgctaccattgttgggggaacccacatgaagaccgaggtgtatatctgctgcacatgtgccgggggcctcggttcagctcatgtgtgctctttggttggtggtttgtttctatttttagaaatactgggactccaaaagtggttttgccctgaaaagctccagcccagcagaccttttgtctggaaacctttgagttcttccctacattagcatttaaagccattaataaatgagactgaggtagagggagggagggaaggagagagggagagagagaaggagagggtgggggagagggagagggagagagagactgaggacttcaaccactgctagaatgtaaccagtatccagcagttttggtaacataatttatacaaaagtaacaataacaactactattggataacaagaattaacctccatagagggtggcttccaagtgccaggggaaccagaaatagccagctagcagcctcatctcagaacgtggagaaactgaggggcctgcatcatgcttctaga

SEQ ID NO: 3344 - DNA, 1000 bp, mus musculus
cctcaaaggatcaataaaaatagtttttaaactataggtcatcttgttgttctggggggaagtgcgttctggtctagtgaagagacgtccatttttgcctctgaacacatgagtgcacaaaagggaagcgagtatttggacttttctctttggcatcacagcaggcttttctgtaaaaaggactccagtccccagaagtgagcagatctgctgtcacatctgaaaatagatggctgacattatttaccccctggagtacccacagttctggtattataattttctcatgtccaactgttgacgcagtccagatacaggtaggagagagagtatttctcctgggggaatctcagtgagaagggcagttctggtttctatggtgacttgccctatggggtagagtgtctgctcttggcggtgggagtatactcttctcacttcatacaccagtcttaatcagtggccgaggtgcttcctggaactctctctcttgcctgtgtgtgaatcatctgccggctcatgccctgagcgtgaactctcttccctttggttcctgtcctgccttgtgatctgggaaactcccctgcctggatccagtcgaagtgcacagaagtgcacagcccgctggtcccttctctccttttgtggccaccgggtccacactgttcttactacttcagatgacagcagcctccacattgtcctctctgccccctttcttgccctcttatcttctccacagtgacaacaaggcagatttttaatgcatgagcacacgtcacacccagatttcaattcatctgtgactctcttggcccttgcaaggaagtgtgagccttgtgctgttcacacccgcatccaacctgcctcccccactgcccacctcaggttcttcctgaggcttcttgggctgaccctttcacacctcagggccttggaacccgcttcccacctgtgcctgcagaaaggtaacactgagttctccgtaaacaggctcagt

SEQ ID NO: 3345 - DNA, 1000 bp, mus musculus
atatctaatttgatataatgcaaacctccacggtgatttaattagaataatttcagtagaccaagtagttcaatccttgtgacccatctgctaactcacctttctcactgtgagttccagggacactgttgcataaactgttgcactgttgtctgtggtactgagttcaatttacaaacacagcagtttctttgtccagccttcatgttatcagactctggaatatgcatatcatattttgattaattggaagtttctttgcgcacacaaacaccaagttaagaagtgaaattgcaaatgtttgtcttccagaagtgcagacacacctgtaaacacaggtaagaccaccacttctactcttagaaacccactgggagacctcaagatgcaggaaccaaggagcatcctgggacaggatccttccagtttgcatctgtgccagaagctgacactgtgctacagcactccataatcaaataccaccaggagagagctggtctcccaggagtaccaacacacccgtgagcacaggtaagaccatgacttctgctcaaattcctggcccaagaaggacctacccagagccatcagaacacaggagccaaggaagagctaaggacagggtccttcctgtttatgtctgcatcctggagctgaccctgtgctacagctttccatacccaaatcctgccagaagagaactggtctcccaggagtactgacacacaggtttggagtagggacaaaccactgtcagagacagcaagaccacctaacaccagaggtaaccacatggctagaggcaagggcaggaacataagcaacaaaaaccaaggttattccacatcatcagaaaccaattctctcgccaaagtgagccctggactcaccaagactatccaggagcttaaaaatggaaatagaaacaataaagaaatcacaaaaggagacaacccttgagatagaaaacctagaaatgagatcaggagtcatcaccaac

SEQ ID NO: 3346 - DNA, 1000 bp, mus musculus
atccatggaaagattcctggacctagttttgaggttgtctgcgacctcagtgatgctgtctatactgggctcgtcaatgacacagttattaagcttgatcacaggtagcgtgaaagcactgatggatgacgacacaatcgatttggtgtcacacttcttggagctgctggccttgtcatcggtggccttggctggaggtggataaaggccaaagacagagactgcactgtcagatagcaacgggggcatgaggtgccccaggctcttactttcagtcaacatcagttcatcctcctccacagagctgtccacccgaaagctgttccgcatccctgagaaggaggccaaggtggtggcagccagcctggatgcacaggggctgccgttctgcttcacttctgtgtctcccagcaagcctgcgtataggccatttgcctgcttctgctccttgagtctcagagtgtggatgtcgatgactgtggagtagatatccctcatgtggatgattttggtttctttgtcgcggttctcatgaagaatggcattggcgcagatgaaaatgaagatgccgatgcccatggtgaacgggccaagcatcttcatcttatcggaatgtagatgctgctcaaagaagcgcaccaccacaccgccctggttccgaaccacttgggtctcattggtggacagcgtggtctctgcgtcaatgaagtgctccttctggggccaatatccaaggactgccatggcgattcctatgatggacaccagcactcccagaatgaggaaaaagccagatggagaataaagtcggattttcccacggaccaccacaacatctgctcgtgggcgccgtctgacgggtttctgatcctgggtagcaggcagtgggctgaggttaatgtgttgctgagacctggcagagtcctgccgcttcaaggccgccaggccggtgatgaccccaccagtggctatcatagtttcctcttgtgctctgaaaaga

SEQ ID NO: 3347 - DNA, 1200 bp, mus musculus
agataagtttaagacttgacaacatggactaaaaaaaaaaatattaaaactaaaggtttaagatcttttaggtcgacaaagctacatatacaaatactgccaggagagagctggtctcccaggagtgcaaacaagcctgtaagcacaggtcagaccacaactgctgctcagaagaacctgtctgttactctcaggacacaggaacaaaggggcggtctgggagaggagccttctggatttccatttactcctagagccaatcatttgccacagggctctatacacaaatatagctgggagagagctagcctcctaagagtgcagacaagcctgcgagcgcagttaagaccaccactgctgctcagaggaacctacccggaaccctcaggacacaggaaccatgatgctgcctaggacaagatacacaaatgccaacaggagagagctagtctcccaggagtacagactagtctgtgagtgcaggtaggaccaccacatgtcttcaaattcctggcccaagagggacctcacagagccatcaggacacaggaaccaaggatcagttggaaacaggatccttccggtttctctctgcactcaagagttgactgtgtaccacagctctccatatacaaattcttccctgagagaactggtctcccaggagtactgacacacaggcttgcaggaaggacaagtcacagtcagagaccagagataaccagatggtgagaggcaagggcaagaacataagcaacagaaaccaaggatacttggcatcatcagaacccagttctcccaccacaacgagccctgtttacacaccagaaaagtaagaaaagtgagactgactcaaaatcacatctgccaggcagtggtggcacacgcctttaatcccagcacttgggaggcagaggcaggcagatttctgagtttgaggccagcctggtctagagagtgagttccaggacagccaggagtacacagagaaaccatgtctcaaaaaacaaacaacaaaacaaaacaaaaacgaaaacaaaacaaaacaaaaaaccaaaatcacatcttatgatgttgatagaagaatttgagaaggacataaataacttccttttaaaaaaaaaaataccagagggcacaggtaatcaaataggagcacttaaagaggaaacacaaaaatcccttaaagaattataagaa

SEQ ID NO: 3348 - DNA, 1200 bp, mus musculus
aggttaggaaagttttcttctataattttgttgaagatatttactggctctttaagttgggaatctttactctcttctatatctattatccttagatttggtgttctcattgtgttctgcatttcctggatgttttgagttaggatctttttgcattttgagttttttttgactactgtttcaatgttatctatggtatcttctgcccctgagattctctcttttatctcttctatatatgcctcttggtctctttactaggttttctatctacagggtcattttactttgtgatttctttatttctatttcaatttttagatcctggatgcttttgttaaattcattcagctgtttgctttacctatgttctcctgtgtttctttaaggaagttatttatgtccttcttaaagttttcttttcatcatcatggcatgtgatttttgaccagaatcttgcttttctggtattttgaggtgtcatagtagtgggagaactgggttctgatgatgacaagtagccttggtttctgttgcttatgttcttgcccttgcctctctccatctggttatctctagtgctacctgcccttgctatctctgactgaagcctgtccttcctgtgatcctgattatgtgagaactcctcagagtccagctgtttctgtgatcctgtgattctggtttcctatgatcctgagatcctgagtgtgtcagattgtctgggatttaagatgcctcttggatcctgaaatcctaatgtgaccaagctcctgataacctgttgtgtcagagctcctgggagtcaatccttctttgggttttgcagggctgcatggggtgccagagtgctgggtttgctcatggcacagttacaagccagaaggaacccttgccttggcctgagtggggttcctatgtcccttgatctattccttctaatatcaagttttggtctgtatttcatctgttgccatttgcattccactgcttttctttatattcaaatatgttaatacctttgttttatctttgcttgtgatagaatcctatagcccatactgaattaaactcaaacctcctgcctcagtctcccaagaacgtagagtacaggtttaaggcttcacaatccctttattatttctactcatttgctttctgttggataggttgcttcggtactttgattgaaagccaatg

SEQ ID NO: 3349 - DNA, 1400 bp, mus musculus
aaacattgattacaattttgatttttgaattgctaaagcattaccatccacataggtatgtccctcaaccctgtcagtgtaattcctgtctcatgtgcctcttcaaccatcaataactgagtaaggtcgaggctacgtattcagctttcaaccacccagagactccattcactgaatcttactaggtttcctgcttattatctttcttcagctataaatcaccaacactctttccttaagtgacccattactctgttcctcttcaggggttgaggaagctggaattgtctggaaagaaagccaggaaggagagagttcacaaccagaggcacctggaacacatatttaaaacatgcttcccatgtccctgtcatatgtattaaataagcgagaggctatcattcccaaaaccttctttaggaagtgatttatgaggtttataagtgaatttgacttctcagtgatatctccattgacagcccctgtgaggagttctctggagcttgtagcagcacctattttctgcagatgcaacactcattgtaggagtgtgacgctctgcagcctgctggggaggcatgtctgcatatgggtgcccattagagctttctcctgtggctggactcacaacttaatgcaggctccctgtggcctgctgccttatagcctacaacttctattactgaattccagatcattctctctgactaaaggaaagcaaattcctgctgagtcctctcagcactgatgatacaaaattacctttttctaaaattaaactccaaaggctttttcctcaaagcctcccatggttttcagccgggataacaacacactggttatctccccatggtcatccctctccctccatgccaagccctaatacttgatgtgccagtgttatcacagctcacagtgagctactctgctcccttggaattcaatcccagtatgaagaactaatctctttcttggtagtagttgaaccttgttatcttgggaacttagtgcaaccctgaaattccgtcacagtgaagccacatggtaaatatttttgatctcttgaaactcatgtagagtgtgctgagaaaattcagagaaggtagtgagtgagtcggatgctgaagcaacaaagtccaagaaaacagtgggcatgatgcagccaacgggaaagatgtcagaaaaagaactctgcagtcatgatttcaacaggcagtagccagtactcattctgtgtgcatagaggccagactaaagatctagtctttacaagatcaatgtggaattgacctagttattttttaacctggtaatggtgtattatctacctgaaacaacattttagaatatcttgatgggtttggtgtgtctttaaatgtgtccaaaaagggacagggaaa

SEQ ID NO: 3350 - DNA, 1000 bp, mus musculus
ttttttacacaccatattttattcccctcacccctgttcaccctcctgttgcttcacatcccatagctcctccccatacccctgtctccacttggatgtccccatccctatgtcacctgacctctaaacgccctggggcctccaatctcttgagggttaggtgcatcatttctgaatgagcacagacctggcaatcctctgctgtatgtgtgttggtggtctcaaatcagctggtgtattctgcctgtttggtggaccagtgtttgagatggcacaggggtctagattaattgagactgctggtcctcctacaggattgcccctcttctcagattctttcagccttccctaatttaataactggggtcagctgcttctattcattggttgggtgcaatatctgcacctgactctttcagctgctccttgggtcttccagggtgcagtcatgctaggtccctttttgtgagcactccatagcctcagtaatagtggcaggctttgggacctccccttgagttggatcccactttgggcttgtcactggagcttcttttcctcaggttcctctccatttccatgcctgtaattctttagacaggaacaattatgggtcagagatgtgactgtgggatggcaaacccatccctcacttgatgccctgtcttcctgctgggggtgggcgggctctataagtttcctctccctactgtctggtatttcatctaagctcccttcctttcagtcctgagagtctcccacctcccatgtctctggtgcattctgaagggtccctgcaaactcctatttactgggttgcctgtttccattctttctgctggccctcagggcaccagtccttttccctcacacaataccagataaggttcccctctcagcccactcccttcctctgtccacttttggtctcaggtcccttccttcctccacacttggaattggtttcttctccttcccaagtggaattgaggtgtcctca

SEQ ID NO: 3351 - DNA, 1000 bp, mus musculus
tgcctggttcccattgcccagatttctgctgaccagaggcaagtatcatctgtatgtcacaaggcaatttatggtcaggggcaccaggtgttataaaaatcagagtcaggccaggcagttgtggggcagtgggcaaagttctagaaccctggggaacctgatgggtggtgatttccacttacatgggacagatcatgtctcctggaccccgggctcctgtcgaagttaccacccccacaaccctcacagaagaggtgtgtgactatcagtcacgcagacaatgtcccaaacttctggcattctgactagactccatccccacagttacctgactatagtcaggtatgatcctccccacagttacctgatagcccagcccacaataaaaggaactgcttggccccgccttgctctctttagctctcacctttcttactctcctctctagccctccttttctctctcccttccctcctctctccatgtggccatggccagcttttctctctctctttctacctcctctctttctccctgtctttctacaataaagctctaaaaccatagactgcctctgctcatcaaggcccgcaatgcttgaacgatgggacaggctttcccctaacgagccctgtttaacctcccgctggaaggcttttctgtgctccagccacggaccggaggaccggactggaccaaggactcttgcccatgtgtgaactacctagctcccccctttctccttaacctctcctccctttgacccgggctgaccaagccacccccagtgcccccattctgttctcagatcttccaccgtgtctgagatgcccaaggctgagaacccggtacctaagactgccccttgtccaccacctaccgagctggggtccagtggcttcctatggccagacaccacctgggctgcatggaaagcatgtggtagtcttccgaatctgcccacccagagcatgggatctctggcaggatgtgggttttc

SEQ ID NO: 3352 - DNA, 1200 bp, mus musculus
agttgtctctgtctgtgatttctttattgtttctacctccatttttagatcctggatggttttcttcaattccttctcctgtttggttgtgatttcctgtaattcttaacaggatttttgtgtttcttctttaagggcttctagctgtttacctgtgttctcctgtaattctttataggattcccctttaagggcttctacctgtttaactgtatttctttaaggaagttattaatgtcctctaccagcattatgagatatgattttaaatccaaatcttttatttccagtgtgttgggggtattcaggactcgctgtggtgggagtactgggttctgctgatgccaagtagtcttggtttatgttggtaagattcttgtgtttgcctttcgccatcttgcaatctctggtgttagatactcttgctgtcactgactggagcttgtttctcctgtgagtctgtaagcctctttcagcactcctaggagaccagctttctcctggcaagaccagtgcacagagggctgcggaacagccttgcctcctgagtgcagatgtaggcctgtaggacactttccccactgctctgctgcttctgcagcttttgaactcctgggtgaacctgccttagagagtcattggaaagaaatggagatctcacctgagtcccgttgtcagaggcaagctatcctctggcagggaaagtgcacagagggttgaggttcagcctcacctccttggtgcagatgtaggacgctgtcccagaagctctgctgcttctgagtcctgtgtcgtcctgagtagacaggccttagagaatcacttgagagaaaatagagatctcccctgagtcccgagggtcagagtgcttcctggagacaagctctcctctggcagggaaggtgcacagaggactgaggaccagctccatgtcctggctgcagatgtaggccagtagggccctgtcccagatgttctccatttgttctttttattgcatgatttttttcacttggtatgcgatcagcttctatgcacagatgtagaaatcatgtgtatctctcaaggcccaactcagagatatcattctacaaatatttatcttgtctgccacccctcacctctatgctacaggaacaatttctgtttccttaagtttcatctgtagtttgcttttattttcctcttgccattatcaca

SEQ ID NO: 3353 - DNA, 1800 bp, mus musculus
tctgccaggaatgaaaaattattaatcaggaaaacaccactgaactgtaatccaggacttagaaactggcttctgataccttcatggcaatagttttaaaaattcagaatgacatattgattgatatcagtggcaagcaataaaatgacattataagcagactccaatctccagcaatgaagtggaacacattcttgaaactgaatctgaagacccctgataaaatgatatgcaaatgctgcagattatcattttcagggtagtgataaaaatacactcagatccagcaatccctatgtctgcatttccaggaagcaaactgggtttactagacattaactaaaaccacttagaacaagtaactcagcctgagagataagtaacacatgacagttttcatacatcaaaatttcagttttcagacattataaatctctgggacattaagggtatattttatagtaacggaaaaatgaggcagattttccgaatggtagtttagcaagacacactacaatctttaaaaatacaagtgagctgttctggatgttccttggaggatcatcagggacactcagacctgaactagtcaagccagaaaagaactatgtagcaaaattattcagaatctttaacagtttggtaaaatagatcataaatttaatctgtatagctatttaaaatgttctagaaaacgaaattctcgtgtgagaaattgttcacaatacattatgtgataaagaaaagtttgcaaaatggtatatatataaggtgattcaaatttctagacatatctactcatagaaaagagtattaaagggctaaatctatcaacagccttttagtgactcctatatcactcaagatagtacacaccatcaaaatctcagtggcttaatacacgacagcttatttatttgctctctcatgatctgttgagggtacaggcatctttccagggcagctgtcttccatgtgggagaacagagcttcagggcaatgatcacgtgttagctcagaacaagtgctttcatgattgccaacacgagggagagagtgcatgtgaacacacacaggtaggtttcccttggattcgtatgtgacccactaacatctgtaaaaactgaaaaatctaagattctcagataagaaaccaaaattacctcacttcaaactggaatctcaaatcatttcatcatttcaaacttatattcaatagattgcattttattcacatacacatagcttatatggaatatgttatctgctaagacatagcttaatacaattgccatagctaaaatataaaatgtttatcaaagccttagaaaattctataacacctaatcaataagtaatagtgaaatgagatgtgctacaaagcttgtatttatttcagacttctttgggcatcttttgctttctccattataagtctcttaaattttaagtgcagtgaaatctaagattattttatagctggaaatcacattgtttattccaagtaatcaattctgatgtacccaagttggtgtcattacttacttatttattatttgtttatctgaattctgctaagggtgtatgtgttctttcaagcaatttatgttgtcttacatcagttgttaacaagctagctttcatccagtctttctgctcatattgaggacaaccttagctgtaggcatctatatcagaatcatggtttattctggtgtaaaaccaagctgattttcaccctgcatgaatgaacttatttctgtaataaaattggaggcctccatcttgtcccttaggaaa

SEQ ID NO: 3354 - DNA, 1000 bp, mus musculus
attcaaagtccaagatggcaaccttcaaggaccagctgattgtgaatcttcttaaggaagaacaggctccccagaacaagattacagttgttgggattggtgctgttggcatggcttgtgccatcagtatcttaacgaaggacttggcagatgagagaaagactgggggctcacccgctgagttgtcatggctgggtcctgggagaacatggcgactccagagtgcctgtgtggagtgacgtgaactttgccagcatctccccgaagtctctgaacccagaactgggcactgaagcagacaaggagcagtggaaggaggttcacaagcaagtggtggacagtgcctacgaggtgatcaagctgaaagccattagcctctctggcaaacttggccaagagcataatgaaggaccttaggagggtgcatcccatttccaccatgattaagggtctctatggaatcaatgatgatgtcttcctcagtgtcccacgtatcctgggacaaaatggaatctcggatgctgtgaaggtgacacattcctgaggaagacgcccacctgaagaagagtgcagataccctctggggaatcccgatggagctgcagttataaagtcttcccggtgccctagcacttcactgtccaggctgcaacagggtttctagggagaccacacccttctcatctgagctgtggctagtacagtggtgttgagggggtgtagggaaacatcccagctcccacagctctgccctgctgccaagtggtacttgtatagtgctaacctagttagtgtgacagtctcactgtctccaagacacactgccaactgtgcaggcttcgattaccctgtgaacctgctgcattgctgtcctgtgcaccctcaccaagcatgccaaggccaacgagttcccagttagtcataacctggctccagtgtgtaagtccattatgtataactttgcataaatattctacaggatattttatgtattatatgc

SEQ ID NO: 3355 - DNA, 1000 bp, mus musculus
gtttcccctccaaaaccaccctatcccactccctctatcccctattcctatgagggtactcccccactgacctacctactccttcctcacttagcattctcataggttggagcaccaagctttcacaggaccaaggcccttctcacccaattatgcaagataaggtcgtcttctattacatatgcaaagggaaacatgggtccctccatgtgtattctttggttggtggtttagtccctgggagctttgggggtctggttggttgatattgtggttcttcagatagggttgcaaaccccttcagctccttcagtccttcccctggaatagcctctcaggaaacatctatatcagactcctgtcagcaagcacttcttggcatcagcaataatgactggtttgggggctgcatatgggatggattcccaagtggggtagtctccgtatggactttccttcagtctctgctccactctttgtcccagtatttcctttagacaggagcaattatgggttaaaattttaagaagggtgggtgaccccatccctcaactgggaatcgtgcctaacttctggatatggtctcaacaggttctctctcctctttgttggatatttcagctaaggttgtccctattgggtcatgggagcctcttgctttgctcgcatctgggactttctgttgactactcctcccagttccctatgcccccattgctacacacctctgttcaatttcatgaccctctgtgcattaccctccatctcctcccatacctaatcctgcccccctttgtttcctctccccctcctctcttcctcctaagtacctccaaccctctaactcacatgattattttatcccccctcctaaataggactgaagcatccatactttggttttattatctcctcagtatgatattttctagttccatccatttgcctgtagatttcatgaagtcagtgtttttaatgtctgagtagtactccactgtca

SEQ ID NO: 3356 - DNA, 1000 bp, mus musculus
atgtggttgctgggatttgaactccctaccttcagaagagcagttggctgctcttacccactgagccatctcaccagccctgaatccttttcttaaaattctcttttcagagagagagatatgagagagagggggggggagagaaagagagagagagagagagaagcattgtttaaagtatttatagattcactgaactgtaaggacagtacagtagtgtactcataaatactttaattcatctaagcccacctaccacagggtcttgtttaaacattgcgtaagaatgttccaaaagtgtgaaagaaaaccagtgggaaaacctacttcagagaagaggttgagctaaagcttgagaaggctatagcatatcatgacaagtaaaaactggctggaggcaagaaaggatggcttgaatgtgatacagaaaatgctcaaaagctaacaagtggttcagtgatcctagacaatgtcaggattgctcccacagtatcctgaagtggattcacatataagaatgtaggcagtgtttataaatctttgcttccactggcctaaagcaggctgcatttcaatcttctcccgtatctagcagcttgcaaatagccacaataagaaaccaaactggtacaaacatttataatcaaatattagtggtcagctgttcagagtgatgttaactgagttgttgatggaacttctcaaccagcataatagtaagaataatgaaacaaacaaacaaacagacagactaaagcagagtgaaagctacaaactacagtattcctcattccttccccaaggaaggaaggcagtttaataagtttgagagaccagagaatggctggcagttctgaaggctttctttttcctctaaagttattagagccaaagttggaggcagtgaccggcctttctcaagctggcccaggttgtctggcaagcagagttcagatctctggatgatatttgcacacatactctgaagtacaggccctgc

SEQ ID NO: 3357 - DNA, 1400 bp, mus musculus
cacacagtgcaccacacataataatagtgggagacttcaacataccattctcaacaatggacatatcctggaaacagaaactaaacagaaacatagtgaaactaacagaagttatgaaccaaatggatctaacatatttatagaacattttaccctaaaacaaaaggatataccttcttctcagcacttcatggtaacttctccaaaactgactatataattggtcatgaaacaagcctcaacagatacaaaaatactgaaattatcccatgcatcctatcagatcaccagggactaatgctgatcttcaataacaacataaataatagaaagcccatttacttgtggaaacagaataacactctacttgtgggcctgggtaccagaggttttccacggagatctctgtccaggtctggtgcaagggttccagcaaagggaagtgagtgcaggcatggagatgaaatctctgctgtgccttacaagtcactgtgttactctgagactctctgaactgagtcaggtctggctgggcagacaagaagctgactacccagtgaggagtgtggcagaaattcaggtggcttatggggagagaagatctcttcccaagtgttatatatagctcatggaacaaaagacttagacgaaggagtagttctcgtgcacctttaattccctggatggatttattttagttttggtggttgttcatggtttgacagcaggtacctctcattagcctggaatgacagtttgaggaaaactttatttgcatgtgggaaggcttggtgctactcctatgtgactgatagccacaaacctctccagtgggggttgtggggacattaacttcaacaggaaccaggggtccaggaggtatgaccaaacacattccttcccatgtaggtggaaattaccacccaaagggccccaccagggttcaagatttatgctccactggagaccaggctgtctgtgtgcagcccattgccccacatcaactcaatgataacttggtcagggaagaaataaataaattaaagacattttagagtttaatgaaaatgaagccagaacatacccaaatgtatgaggaacaatgaaatcagtcctaagaggaaaactctcagctctgagtgcttccaaaaggaaactggagagagcatacactaacagcttgacagcacacctaaaagctctagaacaaaagaaaacaaattcacaaaagaggagtagaagtcagaaaataatcaaactcagggctgaaatcaaccaagtggaaacagaaatctacaaggaatcaaccaaaccaagagctggttctttgagaaaattaacaagatagataaacattatccagactaactagagggcacagggacagtatcctaattaac

SEQ ID NO: 3358 - DNA, 1000 bp, mus musculus
tggtggaactgggttctaataatgccaaatagccttggtttctgttgcttatgttcttgtgcttgcctcttgtcatcttgtaatctctggtgttagctgtctttgcctggagcttgttcctcctgtgagcctgtgagcctgggtgtgtcagcactctagagaaacaaactatttctgagagggataagggtacaatggttcctgggttctgtgggtcttgggcaggtcctagatgggcaaggtactggggcaatagtggtggtctcacctgtgagcttaggtatgtcaacactcctgggaggccagctgtctccaggcagggcaggattggggtggagagagctgtggtacagggtcagctccagggcccagatgagaaatttaaatattcaaaatgcagtttggtactactgtctccttaggctccacttgctcttacaatctttctggccagtcttctccaatgttccctcagctttgtgatgggaggaggtatatgatacagatatccaatttaaaggagagaattccagggtgtctgtattctgtcccttgaccagttgtgggtctctgtgttaaccaatacctactgcaaaaagaaactcctgatgagacttgggagatgttttgatctctgagtatacaagaaatcaccaggagttggcttaatactatatccttctagtagagtagtaataatatcttctcctgcccaggagatataaacagtctggttacaagtttgatgttttcttacttttgtttctcagtacatgagtatgagattaatatagcttggtttgtattttgttagatgtttgatgttaaaattgtgtattcaagcttcaatggtacaaaaacttctcaatggactttgacttgtgattatgatatgatttctgacaggaaacatacttcctagacatatgactgtgacctagccccatatatttacctgaagcagcattttcagtatctgtgactgtaaaatcaattctga

SEQ ID NO: 3359 - DNA, 1000 bp, mus musculus
caacaagaaggccttcactgaatcaccagcagacacataaaaagcactagatatggcaccttgtaccagcaaccacaatgttggaaagcagagacatcccaggaagctcactggctagctagcctcgccaaatcaatgaacttctggttcagtaaaacacacaagcaaacaaaaacaaacaaacaaaaccactgtctcaaaaaaataagatagggggatccttccgtttttcatctgtgcccagagctgacactgtgcccagagctgacattgtgccacagctctacatatccaggacccgctgggggagaactggtcccccaggagtgcagacacaactgtgagcaaaggtaggaccatcacttctcctctaacggactgacccagagccctcaggacacaggaactgagaagcagcctgggacagaatcattctagtttccatctgcacctagaactgcccctgtaccatagttctctgtacccacatcccactgggagagaggaggtctcacgggagtgctgacatacctgagagcacaggtaaaaccaccacatctgctcaattcctggcccaagaaggacccacctgggacccaactaactacgaccaccacttctgctctgagggacctgcccagaaccctcaggacacaggaaatgagaagcagcctgggacaggagttttctggtttccatctacaccccaaaccttaaactgtgccacacctctccatacccaaattactccaggagagaattgactacccaggagtgctgacacacaagccacagtcagagacagcaagactagctaacaccagagataaccaaaagtcaggaggcaaggacaaaaacataagcaacagagatcaaggctacttggcatgatcagaacccagttctcccaccacatcaagcccaggatatgccagtacactggaaaagcaagactctgatttaaaaacacatctcactcatattgatattagaggacttt

SEQ ID NO: 3360 - DNA, 1000 bp, mus musculus
gcccaaacagctttacttgcaaatgtttattgcagtgagtcattggtctggttcaaggcctctggtttctgctatactatcaatggtagatcttcaccaggactcctctcagatatcctgttcctgccctgtgtcatggagattctgcagctttggacctacaggaccagctccttcactcactccaggagttcatagatggggtagatgttagtgtgggtcaactcaaagccttgaatctgggcctgggtggttttcctttgtgccactagggtcagctgtaggtgaggggtgcgatcatttcacgagccttctgtcggtgtgtggtggagaggggagtcatctttctgcaaccatgccactgctcagcaggcaagaaagagaaccagttctcctgaactcatgtgatcaggaccagatctctcacatacatgccaccagagccatctcttccaagctgcccaggcaaggggcagagccagctcagcacagtgcttgtccatcaataaagcctcatagagcagcccagactagggacagccacatggcctttggtggtaatatgagtctcaggcatcaacacagaccttggctggaatcggacctctgattcagtggcacctatggcagcatgggccactcagatcagtttacccttccaatccccgtcctgtgttattatggccccagacaccaacatggtctcaggtagcagcccagactactgacgtccctatgacctttggtggtaacatcgggcatagacatggatcttagtagcagcccaggcccacatattaccatggccttgggtggtaccacaggctccttatatccacctgttcctcaccgttgtagcttccagctccatatttctccacagtgcacaaactactcagcttcactttctctcccatctactctatatttcccatttctccgttacgtatttactcattgtagtgacaactgccgcagggcctgggcaggtgcttgagtg

SEQ ID NO: 3361 - DNA, 1200 bp, mus musculus
ttacatcacctatttggttgtgttttcctgtaattctttaagggatttttgtgcttcctctttaaggacttctacctgtctagcagtgttctcctgtatttctttaagtgagttattaatgcccttcttaaaatcctcttctggtattatgagatatgattttaaatccaaatcttgctttttgggtgtgttggggtatccaggacttgctgtggtgtgtgtactgggttctaatgatgctgagtggtcttggtttctgttagtatgattcttacatttgcctttagccatctggtattctctggtgttagattttccagctgtctctggctagatcttattcctcatgtgattctgttagcctccggcagcacacctgggagtctaactctcttctgagtcccagcagtcagagcactctctgcaggcaagctctcctcttgtacggaaagttcacagaggtttaggtctcagctctacctcctggctgaggatgaagtccagaagggaccctgttcaagaagctctgttgcttctgcagcccacatgctctcctggaggactggtctctgagagtcctggggtacaagatggcactatttattgcctgagtcccaggatcagagccctctctggaggctgactctcctcagtgatcctaagatcctgggtgtgctagggtgcctgctgcatggagagttctctaaggaacttgggactgtctgctgagttcatatccaagatgtgggcctagcgataatgggaaagaaccccagccattggtcaggcgtgtttcctttgtccctgatcctgctggcatcagcccctcaggattgttttggaacagatgttgcattccactctccaatgatctcaagatactgggtgtgctagggcgcctgctgcatggagagtcttctggggaactcgagactgtccactgagttttcgcccaatatctttctatttttagtgctcttatgtgtgggcagtctttggaagatagtaaaaagtgacctatgacttcttttcctatctcaagagaaatatcctgaactcagggcacaatcagcagaattgctgtagggaagaatgaagcagattttactaagcttagagaaaaaaaaatgttttagccctttttttccttcttctatttgttctaaggaagcatttattgtctctgtaactaagatactc

SEQ ID NO: 3362 - DNA, 1200 bp, mus musculus; identical to SEQ ID NO: 3361

SEQ ID NO: 3363 - DNA, 1000 bp, mus musculus
ttaaattcctctaacatatccatgactgctggatttaaggagccagagaagttaacagataccacaagaaaacctacagaatcaactcatcctggaccataagggcttactgaaactgaacaccaaccagagagcatacatgggatacacctaggctccctacacatatgtagcagatgtgcaacttggtcttcttcacatggggcttctaactgcgggagcaggagatgtctctgattttgcttcctacctttggatctctttttcctatctggggtgtttagtctattctcaacaagagaagatgtatctatgacaagaaagctgcacccatgaaatgtcaacaatgtgcttacctaaacaagacctgcataatgccaatactaggtggtaggttaatatagagtgaagagaactttcactatgcctcacagctagatgaagagctataggaaattaatgattaattaatgcaacttgatataccaaggtaggttaatatccatgagaagcctccacttctctgaggagaaagggaaggggtgggaggaggggagatgagagggagagattaggaggagaggaggaagtagaagctgtgatctggattaaagccaataaatttattagttataatcttggtgtaagccctacagaactgctatcattctttgacaacattcaccttctgagtacagtttgtgttatttataaaaatgcacattttatgctattgattaatgtgttttaggaaatattagaatcattagaattattgtttccaaactgcttatttagtcccatgtgatgacttctatagtgtatgtttttctataacatcactgtgtttctgtctgttatcctgtgagcactcttaaattgtgaatatgtgtgaaaatgggaaaccagaaaaatcaagcctcattccatttagaatctgactacccttctgaggcaaaagaaatgtaccttctattaatgaatcacccagcttatacat

SEQ ID NO: 3364 - DNA, 1000 bp, mus musculus; identical to SEQ ID NO: 3363

SEQ ID NO: 3365 - DNA, 1400 bp, mus musculus
atgcactatataaaatgcaacccatttttttatttctacaaaataactaatatttatgtttcattatttcttaccaatgtttgttgtagcacaattgcctattttcataatttatagaaaaaaaaacctctcttattatgtgaacctgtcattatataaaaagaattccaccttttattctatttcctgaatttatttataacattcaagcaatggagcattcaaatggtgtgtgtacacatcttagtgtttagagtgttgaaaaagacaatggttcaggtgctatagactgcatcctataagcagttttaacagagccatttctgttttttcatgaacctgtacattttaatcttccttctcccaccatactcttcacaacatgtgaggtacttttgaaattgcccaatgagaaaagaaatcccggtcccttccagtccagccagcaccagggtagctagggcacagagtcggctgacacctgcaagctacccacaagacccgccacgggatcttaagacctctggtgagtggaacacagctgctgctccaatccaatcatgcaggtaccgagactgcatttattagggaagcagaaaacctagcctgataaggggcacaagtccctgccagtccacgccagcacaggagtaccttgggcgtggagtctgcggacacctgtaaggtatacacaggaccctccacgggatcttaagtcctctgtgagtggatcacaactggttcgaacaccagatatctgggcacattccctgcaagaggagagcctacctgcagagagtactctgaacactgaaactcaggagagagctcgtctcctaggtctgctgatagaggctaacataaacacctgaggaacaagatctaaccagagacagctacaacaactaacaccagagattaccagttggcgaaaggcaaacttaagaatcttactaacagaaaataagaccatgcaccatcatcagaacgcagcactcccaccctacaccatcctgggcaccccaacacaccaggaaaaatagacctggatttaaaagcatatctcatgatgatggtagaggaaatcaagaaggactttaataactcacataaagaaatataggagaacactgctaaacactgttaaacattgctaaggtagaagaccttaaagaggaagcacaaaaatcccttaaagtattgaaggaaaacatgaccaaacaggtgatggaattgaataaaaccatccaagacctaaaaagggaagtaaacactataaagaaaaccaaaagtgaggcaatgctggagatagaaaacctaggaaagaaatctgaaaaaatagatacaagcatcagcaacagaatacaagagatataagagagaatctcaggtgtagaaga

SEQ ID NO: 3366 - DNA, 1400 bp, mus musculus; identical to SEQ ID NO: 3365

SEQ ID NO: 3367 - DNA, 1200 bp, mus musculus
cttagaagccccacaccagagctctcagtgctgttctatgaactcatcctgaatctgtcatttctcaactcaacttgtagttactttcaaaaatgcttgacagacaaggttatacaataactgctccaggaacacttaagccaaggtcttaatgactagaacgggttttcagctgctgatactttttgagcaactttactttctctttctagggaaaatgactgaaatgttctaacaatactctgcatcctggctattttgactgtctcatcaacttttgaggtgaaatggttcatatattattgttgtcttcagaagaggaagatcgcccttcctttcggagccagctacaggccaccttggttacgaattcctgggactgccccaccccagaggacagttccagaggactctctaccccacagatgtcctagcatactcaggatcttaggatcactggtgagtggaacacaacatctgttccaaaccaatctcgacaggcatgtacaagcagcagggacacaggaatcccacccaaccaggggctcaggtaccttccagtcagattcagctctgagccaccttagtcccaaacttggcacacagtccaactgtcccccaaaaactctccatgttgcaggcgccctagcatatccaggatcttaggagcactcgagtggagcacagcatctgttccaaactaatcctgatgggcctgtgacagcaagagcaaggacacaggagccctgcctgaacagcagctcaggttccttctgatatgtgctggtataccttggttctaaacacaccagacagcctcacagtccccagaggagacaccatttccacgcactgtaccatgcccaggatcttaggatttcaggataccaggataccaggaacttggtcacaccagaatctcagggtctcagaggaagcttgactgccaagaactctgacacacccagattctcaggttcacaggagcctggaatcacaggagaaagctggaatctgaggagtcctgaatcaaccaagattataggaagggaaagctccaaccagatattttgagggcagcaagcacataagataatcatatggcaggaggcaagcataagaacagaagcaacagaaaccaaggttacttggcatcatcagaacaaaactctctcaacataataagtcctggatacacca

SEQ ID NO: 3368 - DNA, 1200 bp, mus musculus; identical to SEQ ID NO: 3367

SEQ ID NO: 3369 - DNA, 1000 bp, mus musculus
ttttgtgtttcctctttaagagctttctatctgttttcctgtgttgtcctgtaattctttaagggagttatttatgttcttcttaaagtcctctatcagtatcatgagatatgattttatatccatatcttgcttctctggtgtgctggggaatccaggacttgctgtggtgggagaacttggttctaagggtgccaagtggtcttggtttataatggtaatattattttgtttgcctttcgccatctggctatctctggtgttagttagatgttcttgctatctttccctggagcttgttcctcctgtgggtctgttagcctgtgtcagcactcctgggggaccagctctctcctggaggaagttgtgcatagagggccctggaacagcctaagctctgggtgcagatttcaaatggaaggattctggcctggctgctgcactgttcttgcaccccatgtgctccttgctgcccagatccagacagttattggagaaaaattggctatctcacctctgagcctgggagtaaaaccactccagggagaaccgttctctcctggtaggacctctgtacagcggtgtgtggcacagcttcagctcacagctgcaggtggcagactggaaggaatattgcttttctgaacatttgtcttttctaaggcattatcactttacaggtagcatattcctgtgacttttatggacttctgtgctaatgagaaaactgtttacactcaaagacatgattgtggacattttttatttcttcaaaacataggtttaaaaagtaataactctaagtgttataggaaaaatagttgaccttgacaggcattttgacccacatgcgtaatcccaataatctggaacaaaggtgaggaaaccctacaatgttaaatacagctcaatctataaagtgattgccaggccagccaatgctatgtaagcaaaaccccatctcaaataaataaacacagacataaaggtaccacacttg

SEQ ID NO: 3370 - DNA, 1400 bp, mus musculus
gaaatgaacccacacacctatggtcacttgatctttgacaagggagcaaaaaccacccagtggaaaaaaggcagcatcttcaacaaatggtgctggcacaactggtggttatcatgtagaagaatgcgaattgatccattcctatctccttgtactaaggtcaaatctaagtggatcaaggaactccacataaaaccagagacactgaaacttatagaggagaaagtggggaaaagcctcgaagatataggcacaggggaaaaatttctgaatagaacagcaatggcttgtgctataagttcgagaattgacaaatggtacctcatgaaactgcaaagcttctgtaaggcaaaagacaccaccaataagacaaaacaaactaaccagtacttccagagctcgtgtctctagctgcatatgtatcagaagatggcctagtcagccatcattgggaagagaggcccattggtcttgcaaactttatatgactcagtacaggggaacgccagggccaagaagtgggagcgggtgggtagtggagtggaggtgggagggtatgggggacttttgggatagcatttgaaatgttaatgaagaaaatacttaattttaaaaaaagaatgattttatgatatctgcttttattaaaagtgagcatcataagattatacccaactatatggaatttatccagggtagtacatgccttgttgtaagaagtctaaaaatattactcaaatatgtaagataattacactactcaaaatttgtattacacgtatttatttgtgtgagagcagagtggatactggtgtccacatgctacaggtcagaaaagaacctttggaagccagttctttccttcaatcaacagggtcctagctgtcaaattcaaatgttaggcttagtgtcaagtgctcttatcccattacccatcttaacagttcctaagattagaaaaatttttggagctctgaggcggcgccattttcggctccagacaaccggccaccttcctggtgagagcacaggggtccacccggcccgagagacttctgcctcacgttccgtgggggccaccttggttccgggactccggggcgggcggtctgagggtgagagtgtggaacacagaggccagcagcttctggaaagggcgagagccacagagcctctgaggcagctccattttcggctacagacaacctgccaccttcctggtcagagcacaggtgtccgcacagcctgcgaggcttctgcctcacgttccgcgggggccaccttgattctgggactccacagagggcagtctgcaggccaaagcaacacagcttctgggaaaaatcctgttttgggccttcatcttcggccaggaggagttccaaacaccagataactgt

SEQ ID NO: 3371 - DNA, 1000 bp, mus musculus
tcctaggttttccatctctagggttatcttcctttgtgttttctttaatatttctttttccaattttagatcctggatagttttgttccattccctcacctatttgattgcgtttttctgtttctttaaaagatttatatgtttcttcttcaaggggttctacttgtttattcttcttttcagtatttctttaagagaattatttatgtccttcttgaagtcctctatcatattcatgatatgggattttagatctggatttttttcaggtgtgttggggtatccagagattggtgtggcaagagaactaggtctaattttatcaagtagcattggtttctgttgcttatttttgttccttgtgcttgcctctcaacatctggttatctctaatgctaactggccttgcattttctgactgtgagtctgacagtctatccctgctgtgagccttgttatgtcagacctcctgagagtccagctgtttctgcagtcctgttattctgtgatcctaggatcctgggatcctgagattctggatgtgtcagaacacttgggagtcaagctgcctctgagattctgagatcctgatgtgtcagagctcctgggagtcaagctttccgtgggtgttgtaggagtttgtcagaagccagaggcttgggtccactccaggcacaggtgcaaaccagaagaatcatgtgcctctggctaggtggtggtttctgagttcctgtgtcccaagggttccagttaagctgggtattggggcagagcttggggtctcacctgagatcctgctgtttcagagctcctggagttaagcttcctctgggtgttttaggagtgggtatggagccagataccagtgactgctctggggctaggtgcaaactggaagggcagtgtttaattcttatatcagctcttgggattcttttcttcccgttgggttgccatgtccaacttcaatatgatgagttttgttttattgtattatatt

SEQ ID NO: 3372 - DNA, 1200 bp, mus musculus
tgttatttgagcaaggctttaacaactcttttttttttttttttttttttttttttttggtttttcgagacagggtttctctgtatagcgccaccacgcccggctgacaactcttgctgaatgttttgaaatagatttccaaactgtctggcagctgtcaaatcatagttcatgcacagtaagacaggttacctaactcagagaaccagaaaagaggcagaagatttatggccatctcctgagaggctctaccagagcctgacaaatacagaggtggatactcgcagccaaccattggactgagtgcagggtccctgatgaaataattggagaagggactgaagaagctgaggggggttacaaccccatgttggaagcaatagtgtcaaccaaccagaccctctggagctcccggggactggaccaccaaccaaatagtacacatggctctggccacatatgtggcacagggtggtcttgttgaacatcagtgggaggagcggcccttgggcctaagcgggctgtaaggcaggagtgggtgtgtggatggggaagcaccttcatagagtcagggagggtgtgggatagggggttttgggagcagatacctgaaaagaggataacataaaatatataaaaagaaaatatccaataaaagaaaaatgttgggaggggagagagagagagacagagagagagagagagagagagagagagagagagagagagagagagatcttcctgacagttgaaccttgtccttggttctgaaatgaatttcactatcatattgcctttctgaagaaactctcctcttcccaggaccatggaaataatgttataatttatttcccgaagttttctttcgtcattttatccttcaatgctaaagcaaagatactcctaagaacagtgatgtttgatcttggtccgggacccgccgaacttaggaaattagtctgaacaggtgagagggtgcgccagagaacctgacagcttctggaacaggcggaagcacagaggcgaagaggcgctgaggcagcaccctgcgtgggccggggacagccggccaccttccggaccagaggacaggtgcccacccggctggggaggcggcctaagccacagcagcagcggtcgccatcttggtccgggacccgccgaacttaggaaattagtctgaacaggtgaaagggtgcg

SEQ ID NO: 3373 - DNA, 1000 bp, mus musculus
tttaacccaatttagtggcgagttctttagcctttgctttttccagcttggcaatgggagccacagacttaggacccaggacgttgcctccccagtggcgactgatcttgtcataattgatcctaatagcttagccagagcaccttgtcttccgagttaacctgggtgaaggcaacagtggtgcttgtcttcctctggaccaggtgccccagcctggcctttcccttgatgatgcagtagagcacccccatctttcaacacagggcaggcaggaaaaccaccagctcaatggggtctacgtcatggtcaatcaccaccagctgagccttcttgttcgccaccaaggtggtgactgtattgactcctgctcagaggacaggtggtctcttagttgggacatcgcctttgccagcagctttcttctcagcacgggccagtagcctttgcttcttctcttgctttgtctctggtctgtacttgtgggcaagctgaagcagctgagtagctgtttgactatccagggcctgggtggactggttaatgacaggagggactttgagccgcttatagaggatggctctttgccacagcagcctgatgtagcggggccatttgacgacgtgtgttagatctcttttgggctggatgtcctgcccagtgccaaagttcttgggtcttttctcaaaggattgaccacctttttggcctcctgtttcttgacgacagagggggctggggccaccttcttcccgttggccttctatcctttgggcatcttgcttggctggtggagagagcaggattcagattcttaagtaggtaaaagtcatactgaattaggtcactcagtagagcttgaaattcttaaagcagactaacagggaaatacatgtgctatgaactgatcaagttcatatgagaagatgctgtaaaggttttataaaaaaagatatgatgagaagctgtagtttctgtaaatgagtggaactgaacaagtaga

SEQ ID NO: 3374 - DNA, 1400 bp, mus musculus
cggccatcactggaaagagaggcccattggacacgcaaactttatatgccccagtacaggggaatgccagggccaaaaagggggagtgggtgggtaggggagtgggggtgggtgggtatgggggacttttggtatagcattggaaatgtaaatgagctaaatacctaataaaaaaataaaaaaagaataataaaatctaaaggcaatcaaattaaaaaaaaaaaaaaagaaattcaccaacctagaaaactggctaatactcatgagacttagctaaatcgaacatgaatttgaagcataagcaatattgagttacaggctcacttgtttcttctgtcttaggttaaaatcatattaagatagttagataaacactggggtgaaagattttgaggatttagaagcaatcacattatttacattttttaatttaattttatttgtaattcatttttatacttcatattccaatctcctccctccccatccaccctttacatcccacacatcctccccaccctgtctccacatggatgaccccatcccccacactgcctgacctctagggatggaaatggagagaagcctgaggaaaagaaggtccagcaacaggcccaaagtgtgacccagctcaaggggaggccccaaggcctgacactattactgaggctatggaacactcacaaaaagggatctaacgtgagacccaacaagcagctgaaagagtcagatgcagatatttgcacccaaccaatgaacagaagcagctgacccctgttgttgaattaaggaaggctgaaagaagctgaggagaagggcgatcctgtaggaggaccagtagtctcaattcatctggacccccgagatctctcaaacactggaccaccaaacagacagcatacaccagctggtttgaggccaccaacacacatacagtagaggacttccaggtcagtgttcattcagagatgatgcacctaaccctcaagacacatcatttacgtattaaaaggaacacaattacttatttatcagtggaaccatccagcatccagacaagaagcagaataagatagaaactctacttttcaaagggaaaatcatgaacatgctgctgtttcccagggctacagatattttccttaaaaattaatttttttatatttagtaactatcacgtagagtggctagccattttgataagttagttggtagttaactggtaggtgatagtgatcttaacagtaatctttaccgacgatgttaaattaataaaatggtacattttatctaaaaaaaaaaaaaaaaaaaagatgtacttctctagggacataccaatttcattatttttaatttttttttcttaaaattttttattatttaaatgcattttatacatc

SEQ ID NO: 3375 - DNA, 1600 bp, mus musculus
cccactacctatacagcatcaggatttatccagttgtgtaaacttattaatttagtccctagatagaatgtattttctctgcatttaaagttttttcctcctgtttgtaaatattaatgtaaactggattgcactagtcctagttgagggaatagaagtagagagagaaagaaggaggagggaaggaaagaagagagggaaggagggagggtgggggggctgtgataggcagcctattttggttgaatgaggcctgcttctacgacccagtagaaaactctacacgggacagaaaagggagccaccttcccagagtcagatgcctgacaccacagagcccccaactccatgattctgtgagtataagtcacacagacaatgtcccaagcttctggcattctggctagactccacccccacagttacctgactatagccaggtgtgctcctcctcagctacctgataacccagcccaactataaaagggactggccccttctgctctctttagctcttacctttcttactctctagtcctccttctctctctctctctccctctctctctctctctctctctctctctctccctctctccatctctccaggtggccatggccagcctctctgtttaccttctctctttctcccttcctttctacaataaagctctaaaaccatagactgtctctgctcatcaaggccctaaagagccaagtctaacctcctgccagaaggccttcctgcactccagccacagacagaccagcttgcatgggaaccacacagtgcatccctccccccaaccacttccctctcctcccctcagccccagggaggtcctgggggcctccattctgttcttagttcttctgcggtacccaggatggaatgctggagactgagaacctgttatctctggcctccatgaggcccaaaaacctaggactgccccttgtccactgcctgctgagcggggtccagtggcttcccacaggaagagacccacctgggccaagtggaaagcatgcagcagtcctcccacatctgcctgctcagagcaactggcaagatgctggttttcaccaactctccttttatggcctccccccagaaaaaagagagaaaaagagagagagagagagagagagagagagagagagagagagagagagagagagagagagagggagagagagggagagagagagagagagaggaaggaggaggaggaagaggaggaggaggaggaagagaaaaagaaagagaaaagaaataaaagaggaaaagggaaagagaacacatgatcagattgcaaagctgactgacataagtctagtagggatccttaactttagtagttgtaagagacctgagaacatccttcatccttcacctccccatcctcctcctttccctcctctttgttttcttctattttgtccaatttattcatatgtagtggcagaattttctcttttgaagttgatttcatgaatatgtcctcagggcagaaccaagagtcaagagttctgttcctcagctagagttgccagatgaatcccgagttggccattcctgttcagagatgctctgctt

SEQ ID NO: 3376 - DNA, 1000 bp, mus musculus
gtctaagcgaggatgcctcagtcccacttgggagggagaggaaagcaaccacaagaggagggagggacctggcagggaaaggggttaggaggggctggagaagggaacatgatcaggtattgggtgggagaaaaggactgaagttcctgagggccagcagaaagaatggaaacatacaaccaatggaggtaggaggttggggggaccctccagaatatatcagagacctgggagggaagtgaatctcaggacttaaagagagagaccttaaatgaaatgaccttcattggagagatggaaattgtagagcctacctccagcagaaagacagggaatcaagtgagggatggagttgccatcccacagttaaaactctgacccataattgttcctgtctgaaagaactgcaaggatagaagtggaaaggagcctaaggaaaataaggtccagcaacaggaccaaagtggaatccagctcacggagaggtctaaaggcctgacacaattactgaagctatggagtattcacaaagcgggacctatcaagactgccctctgaaagacccaacaagcagctgtaagagtcagatgcagatatttgtaccaaaccactggacagaaactgcagatccttgtgtttaaattagggtaaagctggaagaagctgagaaggagggtgaccgtataggacaaccagcagtcttaaataacctggacccctgatatctctcagatactagaacaccaaccaggcaacatacaccagctgatatgaggcctctaacacatatacagtataggactgccaggtctgagttttgtcagagaagatgcatctaaccctcaagagaccggaggccccagggagtttagatatctgatggggtgggggtgggggttggtgacatcctcgtggagacagggtcatggagaggaagtatgggaagtgaaacagttggaaggtggaccgggaggggaataaaatctggagtcataggtgc

SEQ ID NO: 3377 - DNA, 1000 bp, mus musculus
aatataaattttctcctattgaaaaaaatacaagaacaaagagatagagtaataaaatagaacttttcaacaatccaaaagaaaattggagaatttgacttcagattaaatattctacaaatgatgaaagaaaagaacataaaaggaattctctcagaatatgcaggaaaaagatcctcatcctaaacaccaatccaaacatcaagaactgatcaagcatataatatgtttgaatgtagcatttgtattttatttatgtaagtgcattgaacataccctcatactttgactcataaaatgatttcttaaaaagagatgttagacttcagtgagagggttatgaatcagagggtttatgaggctaattaggatctttaaaatggaggtaaagaagaggagcagctgggacaggatccttctggataccatctgcacccaggggttaatgctgatgtacagccatctatacacagttcctgccaggagagagctgttttgccagaagtgctcttactcctggacttggaggtgagatagccactttctctccaataactgtccagggctggaccaacaaggagtgcactgggcatagaaacaagggagcagaaggggcatgatccttcgggtcatcatcagcacccaggagatgaggctcttctacaggccactgtgcacaagttctgccaggagagagcctgtctcccaggagtactggcacaggcttacaggtccacaggagggacaagatcctgccagtcacagaaagaccaaataacatcagagataaccagatggagaaatgcaagtgcaacaactttaccaacaaaaagcaaggctacttggcattatcagaaaacagttctcctatcacaggaagccatggaaacccaaacacaacagaaaagcaagatttggatttaaaatcaaaactcataatactgatagaagattttaagaagaaaacaaataagtcccttaaaaaaatacagtagacagg

SEQ ID NO: 3378 - DNA, 1000 bp, mus musculus
ttggttctgatgatgccaagtaaccttggtttctgttgcttctggtcttatgcttgcctcctgccatctgattatctcaagtgctccctgcctgttatatatctgattggagtctgtccttcctgcaatcccagttgagtcagaacttctcagagtccagctttctttgtgatcctgtgattctgggatcctgtgatgctgagattcttgatgtgtcagagtttttggcagtcaggcttcctttgagaacctgatatcctggcatcctgggattcttggattctgtgatcctaagatcctgggcatgttagagcatctggcagtggtacctcctctgaggactgtgtggctgaccactgagttctaaacaaatgtagaccagcacctattggaaggaacctgatccactctttggccaaggtttctgtgtctgtgttccagctgtcccctggcacccttgttcttttggaacagatgttgtgttccactcaccagtgatcctaagaacctgggtgtagtagggtacttgtgggatggagagtcctctgaagatcatggggctgtcttctgagtttcagcccacggtggcctgggctggtgccaaaaagaaggaagggcctaaagtattttaaataaactaatcatattgaattcacacatgtgtttgtaataaataatactgattctttgtttctcatttttatcccagttgaaaactgatagtacagtatcacaaccagtaaatgggcatttatacagtagacaaacagacgatttctatcaatgtactgcaatgttaagcatccttgtcaatggtgaaaatagctttacatttgtttactggccattagcatatgcactgctcttagccagctcttcaggtctgggatcagttcatagttttctggtcagttttgagttttaagaatcttttatgtagccctggtattactatgttgtacaggtatcctattgatatttccctccactgtttatcttt

SEQ ID NO: 3379 - DNA, 1400 bp, mus musculus
attggccatatactcagtcataaagcaagtctgagcagataaatgaacattgaaataaccccctgtatcctctcaaaccaccggagattaaagttgtacttccacagcaagagaaacaacaggaagcatatacactcatagaagctgaacaatattctactcagcaatcactgggtcaggacttattcaatgaaaatcaacacacaacatacccaaatggaatacaataaaagcagtgctgagatttaagttcatgacactaagtgactgcataaagaaattggaaagttctcatactaacaatttagaagtatacctgaaagttctaaaatataaaaaaaaaaaaaggagaagaagaaaagcaaagaaagagagaagaaacaaacacactggcgaggaatagatggctgtaaataatcaaattcagggctgaaatcaattagaaacaaggaaaaccatacaaagaatcaagtttctggtggctacccccagttccccactcactcatctccaaaattttaacctagatttgctcctgtccaaagaaaatacagggtcacagtgtagaaaggctatccagagactgtcctatctgtggacccatcccaaatagagacacccaacccagacactattgctgatgccaagaaatgcttgttgacaggatcctgatacagctgtctttgagaggctctgccagagcattgcaaatacagattctgattctggcagacaaccattggactgagcatgaggccccaataggggacttaaggaaaggactgaagaactgaaggggtttgcattgctccagatgcatatgtagcagaggatgaccttatctggcatcaacaggaggagaggaccttggtcctgtgaatgcccaatgccccagggtaggggaaaggcagagtggtgagtgggtgggtgggtgggggaaacaccctcatagaagcagggggaggggttatgtgataggggggttgtgatgggaaaactgggaaagaggatgtatttggaatgtgagtaaatcaaatatccagtaaagcaaaacaaaacaaacaaacaaacaaaaaaaccctggtattttgagaaaatcaaacaggtaaacaaacacctatcaaaactaaccaaaagacaaagagacagaacccaaattaagaaaatcagaaatcctaagagaggcataaccactgaaaccaagaaaataaaaaagaatcactgggccttacttcaaaagcctgtactacacaaaaatgaattaaatggatgcctttcttgatagctaccatttcccaatttaaatcaagatcaggtaaactattcaaaatattcataagccctaaggaaatagaagccatcattaaaagactccaaaccaaacaaagcctagggacaga

SEQ ID NO: 3380 - DNA, 1000 bp, mus musculus
tatattcttttgttttagagtaaaatgttctatagatatctgttaaatccctttggttcacaacttctaatagtttcactgtgtctctgtttagcttctgtttccatgatctgtccattggagagagtggggtgttgaagtctcccactattattgtggaagcaaggtaaacatgaaattggataggtagttgtcgggtggtggactgtgcacaggtagcctggtcccttgttgagcatagggctggaaccccagagccttggtgggcagaaatttctacctgcatgggactgcaggagtttgaccacacctcctaggcacctggctcctgtcacatagttacagcctcccacagctccccctgcagtgaggggtatggacatcaatcatgtaatagctgcaccaagccctctcacatgcaaataaggtttccccaaactctcagtccaagccagtgagaggtacctgctgtcaaaccctgaatcacccccaaactgtatgtaaatccaatccagggaataaaggtgtgtaagacctaatctgctgtccaagcattcgactttttttttttttttaattaggcattttcttcctttacatttcaaatgctatctcaaaagtcccctataccctgcccaagccctgctcccctacccacccactcccacttcttggccctggagttcccctgtactggagcatataaactttgcaagaccaaggagcctctcaaagcgctgcctgaggccctgcctcactcctcattggctagtcagcttctcttccacctaggctgacccaactcaattcagggaggcatagaattacagcctggcagagatggaggtggagcctacctatgtagtgcaagcaggtaagcaacttcccctccctgcccacatttgcttcccttcactggcacccttgcaccaggcctgggcagagatttccctggaaaacctctcttacccaggcccacaggcagtgagcttgggtgata

SEQ ID NO: 3381 - DNA, 1200 bp, mus musculus
ataaagtcaattcaaacaaatcagtagcgttcctctactcaaaaaatatacaggctgagaaagatattaggaaaacaacaccctttacaatagtcacaaacaatataaaatatattgctgtgactctaactaaacaagtgtgcgacaagatcttcaagtctctgaagaaagaaaaccaaaagatctcagacaatggaaagaacttccatgctcacagattggctggattaatatagtaacaatagcaatcttaccaaaaggaatctacacatttaaggcaatccccatcaaatgtccaactcaattcttcattgagttagaaagaacaatttgaaaattcatttggagtaacaaaaaatccaggataacaaaaactattctcaataataaaagaacttctgggacaatcaacatccctgacctcaagttgtactacagagaaatagtaataaaaattgcatagtattggtacagtgacagtcaggtatatcaatggcataggattgaagaccaagaaatgaacccaaacatctatggtcacttgatgtttgacaaaggagctgaaactatccagtaaggaaaaatgtaacctcccctccccagcctgaaacctgtttgctcaggtttcagtgttagagagcatcagggcgcagcttgccgccctatcgtcctgacaatcccactgccactgcctgcaaactagctgttccagatttatcccgtgttcacctgcaactttactctgagattatttggtgggaattagctccttcccctccttcataactcggtgcacgaattagtaaaattgagctttgatcagaacctggtttgtcttagctctgtctctctctcacaccgcctagtgccccctcttctcttccaggtttccaagatgcctttccagactagaacccagacatgtgagctgagcagctggctacccacaacagaaaaatacagcattttctccatatggtgctggttcagctgtcggtcaacatgtagaagaatgcaagttgatcaattcttatcttcctgtacaaatctgaagtctaagggcctccacataaaaccagacacttttaatctagtagaaaagaaattggggaaaagccttgaacatatgagtacatgggaaaagttcctgaacagaacaccagtgatttatgttctatgaccaagatttgacaaatggaa

SEQ ID NO: 3382 - DNA, 1200 bp, mus musculus
gatttgatagtatacataagcaaccccaaaagttttattagagaattgctacagcggataaacaacttcagcaagtggccagatataaaattaacacaaataaatcagtagtcttcctttatacaaaggataaacaggctgagaaagaaattagggaaacaattcccttcataatagccacaaatagtataaaatatcttgggataactctaactaaacaagtgaaagacttgtatgacaatacttgagactttgtcaagttcattttgaaccctgtaataacatacttgcaccaaattaatgtggacaaattttcagcaataatgagatatatcacttttaatgaaaataacagcttggacacagtcccagctgagacctaggtcagttactcagtatctgttttactcaccttttcagtagcaaaaaaatgtagttaatcatagcatgatcttcatttgaagtggtaggagtgttagctgtaaagtgcttgttcctgacaccaaaacagaggaaagtgggaattcttatcaagaaatgaggagaagttttaatttgctttatacatcatcatcatgtaattctacgatatatggaatagctttttaaagccagatcaagcttacaggcaagactagagaagttgtttgatagtgaaattgtggtgaacttgagagtgtttggatgattgagaaagttgtgtacaaagaaacagtaattagggacttcactggtaactaatgtgatcattttgaatcaggaacgatttcgcagtgaataaagaaaggactagagccaagcagtggtggcacacacctttaatcccagcacttgggaggcagaggcaggtggatttctgagttcaaggccagcctgatctacagagtgagttccaggacagccagggttatacagagaaaccctgtctcacaccccctcccccaaaaaacaaaaacaaaacaaaaacaaaaaacaaaacaaagaagaaaaagaaagaaaggaaaggactagaattgtacaaaggttactaattagtattatttatttgtctgtttgtctttgttcatttagttttagttagtatttatgtttttattttgctttgaaaatcattcaggtagaatttgcttaaacattcagggagttcttattaagaaattatgctttctttatagtattggcatccttatcagtctcttt

SEQ ID NO: 3383 - DNA, 1000 bp, mus musculus
tccctgtctctcgtcttgtaattcagcataatcatctcttttacaagttttaaatattttactataaaatatctacttgctctaggtattaagataatttagcaaaatacagaagctaaaaatgactgacctaaattgggtgagtgaggtcagtcatgagaatgaaatctaacctccactcagggtggcaatgagggctgtacttaggaatttcaaggatatggtagagaaacacttgagtggagagttgttttgagatttcttcatgatttgatagatttattatggtcgtgaatatgaacaatttggttggagaaaggcaagcttccaaaactgagttaagaaaacaaagacagaaaaatgaccaacgtgtggacactttgcccctgcttagaattgggaacaaaacactgaaggaaggagttactgagacacattttggtgctgagacgaaaggatggaccatctagagactgccatatccggggatccatcccataatcagcctccaaacgctgacatcattgcatacactagcaagattttgctgaaaggacccagatacagctgtctcttgtgaaactatgccggggcctagcaaacacagaagtggatgctcactgtcagctattggatggatcacagggcccacaatggaggagctagagaaagtaaccaaggatctaaaaggatctgcaaccctataggtggaacaacaatatgaactacccagtaccccccagagcttgtgtctctagctgcatatgtatcagaagatggcctagtcggacatcagtgcaaagagaggtccattggtcgtgcaaactttatctgcctcagtacaggggaatgccagggccaaaaagtgggagtgggtaggtgggggagtgggtgggggaacgggtggggatcaggaattcaaggcccatacctaaacatgataaaagcaatctacagcaaaccagtagccaacatcaaagtaaatggagagaagctggaa

SEQ ID NO: 3384 - DNA, 1000 bp, mus musculus
aaacctattttcctagtttgtcccttttcagagtctaatagcaaggtaaactgtttttctcatctgcagacatactagctcaagaaaagtaagacctgctctttaagctctcacctttcttactgtctagccctccttctctttctccattctgccctctccatgtggccatggcctctctctaccttctctccttccccctgcctttctacaataaagctctagaaccattaaaaaaaaaagaagaagaaagaaaggaaggaaggaaggaaggaaagaaagaaagaaagaaagaaagaaagaaagaaagaaagaaagaaagaaagaaagaaagaaagaaagaaagaaagaaaagtcctgagtcctgatttttacaggtgaaaataactaagaagacagaaatgagaaggcagatgaagcctggggggtgaagttgggtgattgtcactggtaaggcttcagtcaatatcatcagatctctgagaagggtaaattatggtaggtggtataatctaaatggcctgtgtatcaattacaaagatctattcactatctagacaattaccctaggctcccatgttctcaatcacttcattgtaacagtgatcttgtgctgtcatacagaacagcattcagtcttcagctaccatacaataccatcaacactaatctaccagacccaggtctgagagattttcctatggagaaggaacttggtggatcaaccttactttggtagtgcaaaatatggctatcaatctaaaagtgtccacaccttgtgttaggcccttgcagcaggcaaggcatagcacaggctttccctgtggtcagtgtttctacagttcaggtggaggtggcatgccctatctatcttctttagagacctcagtgttcgtgctagaagtggatttttctctacataacaggaagttttttttttttttttgattaaacatttaaagtgtcaaattcagcagacgcttaaagtgtctacctactt

SEQ ID NO: 3385 - DNA, 1600 bp, mus musculus
ttttaaatctcccatgtacctattctgagagtagaaaatgctattggcactcagcaggttcttgataaatgtaagtatgcatcaacctgaccattgcagcatatttcttctgcatagtgggaatcctcacgtaagaaacgtagagatgccttggaagcaaggtcgcttccagccagggctcagtctccttgttctcagcctactattttcagtttcaataagaagcaaacaatcttatcttgaaaggggattagatttatttttaataagagatctgaattggaagcttatatatttttctctccagaatataataacagcacaagtaggtcttacactatacttcttatgtgtaagagaacaaagcaagagagagagagagagagagagagagagagagagagagagagagaacaatactagaaaggtaaaagcaagcctgataccaccgaacctattcaactttcccagtagcctggggatgggagggcacctagtcaaactgtttccagcatcctctactgagagaagacatgaaagaaaacagggccagccccgtgccatcttgggagcaaacttagtgggccctagcccacccaagaacttgggatcactggtgagtggacacaacatctgttccacaacaactcggagggtcttgtgccagcaggaacagggacaaaggaaacctacccaaccagtagctgggtttcattccgggcagtgccagccctgcaccattttgggttcgaactgggctggccctagcatacccaggatcttgggatcactgcaggaacagagacaaagaaagcctgcccaaccaggggttggggtttgttctggtggctccagccccatgccatcttgggcatgaattctgctggccctagcacacccaggatcttgggatcactgagaacaatctatgcaagagagtatgtggattgcagaagcaacagatcttcttggacaaggtcccttcgggccttcatcctcagccagaaggcagagctgagaccctaaccctgggcaccttcccttccagaagacagtcagcctccagggagggctctgactccaagactcaagaggtggatctgagctccagacttctgtgcatgttccctgcaagaggagagcttgcctgcagagagtgctctgaccactgggactcaggaaatagttgtcatcccaggagtgctgacagacactaacagaatcataggaggaacaaccttccagccagagacagctagaacacctgacaccagagattaccagatggcaaaaggaaaacaagactcttattaacagaaaccaagaccacttggcacaatcagaacacagtatgcccaccacagggagtcctggataccacaacacacctgaaaagcaagattcagatttaaaatcgtatctcatgatgctgatagaggattttaagaagggcattaataactcacttaaagaaatacaggagaatgctgataaacaggtagaagtccttaaagaggaagcacaaaaatccctcaaagaattacaggaaaacacaaacaaacaagtgatggaattgaaaaaaaaaaaaccatccaagatc

SEQ ID NO: 3386 - DNA, 1200 bp, mus musculus
cagagagagcgcttgattgatgaaagtctaatcatcatgcttggtagaaagcacctttccatgctgagccatatcattgatctagaaggtaatgttttaattgtgaaactcattcagtctttgaacttccctagtacttgtgtggaatgcttattcacaatgcaaatatttgaaataataaggccacacccttggtaacattgttcttcatattattatggcttaattttttgtgactgataagaacttttggtaagtcaactctggtattactagtcttggaaagcattatagatagtacataaagttagatatagaaaccccaaatctctgattcttccatgccaccaagaaagtgaagtattagttaatcactaagaaatatgatgtgttcttctatcccttctaccccttctgcctgatgctgactgctggagcagactcttagttggtttgcttccataaaggctctatatccatatcctagagaacctgctgcactcagctcagttggacccactgcactcagagtagtggagacattgaggaccttctgaactcagagcagttgaggtttggctgcactcagtatagttgaacaatagcttgactgctccgctgaagacccaacaatctgaaggcctcccaggagatctactgaagtcagggcaacagatcagcaacttctctgcccccataaagagctcctagttcttaggcctcacagatggtctgatacagccaggacagcaagcctacgaggagacctgaagcaaccaagggacaaaagagcagactctatatagtcaccgagatcaacaaacaccagggatttccagatggcaaaagaccataagcaactgaagcaaaaatatgtgggcatcatcagaagtcagttctcttctcccaccatagcaagccctgaatacaccaacatacctgaaaatcaggaatctttcctaaaatcctatcctatgaaaataatagagtactttaagaaggctatcattagctcaccgaaagaaatacaggaaaacacaggagaaaacaggagaaggaattgaataaagtgatccaagacctaaaagtggaagtagaaacaataaagaaaatacaaatggaggtaaacctagaaatgggaaacctaagaaagagacaggaattacagatgtaagcattaccaacagaatacaagagaca

SEQ ID NO: 3387 - DNA, 1000 bp, mus musculus
gaagttttctaaggaatacactttgctgttcctctcatccacacattactgtgttaatagcaagtggatgcatttcatggccatgaattgatacaatcactctcactgtgaatgattggtcaatgtataatggttgtacaatcaattcacagatagcacaatggttccattaccttcttgtatttcagtgaaagctcaagtggcattttataatatacagaaatatcagatcctctgacacaggcgtccaaccccaaatatgctgggagagagcaagactcccaggagtgcagacaggactgtgagtgcaggtgggatcaccactgaggtagggaccctcccagaaccctcaggaatcaggaacagagggactccctgggagaggagtcttctgctttccctctgctaccacagctgatcctgtgccacagagtgacatacacaaataccaccaggagagaactggtctcccaggagtcctgcacacctgagagaataggtaaggccaccatttctgttcaaatttctgacccaagagggtcgctcacagaggcatcaggacacaggaaccaaggctcagctgggaataggatacttctagtctctgtctgcaacctagagctgacattgtattacaactctccctacccaaaaacctcccagagagaactggtctctcaggagtactgacacatagtcttgcaaaagggacaagccaaagtcagagacagcaagaccagttaacaccagagatagccaaacggcaagaggcaagtgcaaaaacataagcaacagaagccaagacatctggcattattagaacacaattctcccaccacagtgaacactggttactccaacacaccataaaggaagaatttgattttaaaaatcacattgcttaatgatgagagaggaatttaagaaggacataaataactccattaaagaaatacaagagaacacagataagcaaatagaatagaagacagtaaagaag

SEQ ID NO: 3388 - DNA, 1200 bp, mus musculus
tcagggagcattctttatgattaattatacttctactttcaggtcttaaattcttttatttattctgttctactgttcatgtgttcttatatttctttaaggtatttgttcatttaatttttaaagatatttgttatattcatgaagtctatttttaatatctctgtcttgtgcttcagcagttttccaattctcagggcctactgttgtaaggttgttgggttctaatggagacatactgtcctaactgttgtcaattgtattttaaggttggtgtctaggcatctgggcttgggaagattataattgtatgtgctaatacaattttgctaattttgtctttgttgggtgagtgttttgttccttggtttctgctgtcctctctgattcttaggaaggtggggtggttctgtcttgcctttaatgaattcttttgaaatcttgctaaatatgcccatgataggctcccatgagaatatatttataagtattggaagttgacagtgagcaagggtcataggagtgaggggctgcagtagtccaccataggaggtagaaagcaatgtatttttttatcatcagaatttgtttagtcccctgagaatgaagtgaaatgtgaggaaagtccacaacaagtattctaatccagagttaggaatgagattgggggagtagatattgaaaacaggaggaagagtcaagatccaaagcttgcctacctgctctgctggcctattgccttctttgtcaatcttggctgatgtgttgccagtaaaagtctgctggacttggggcccaggaaaaagggatgagtggggagaaagatttgaggaattctgtgcaatcctctggagtcacgtgcagataagagggggaagccacagcatgttatctgctacagagcagggcataaggctggcagattggatttgagtagcagaggcaaaggactgcaaatagcctacttgcctccctggcataatcactaatctcttatttttaaggatgagaagttgagattcagaacactaagtcaccttctcagttctcacaaatagtagttttgtcatcacaacaatgaattattaacaactttcaatgcttacatgaaatttaaaaagtctttgtatgatggttcagtaagtgagggcatttggaataagcctgaccatggtaagtgaggactaactccccaagtta

SEQ ID NO: 3389 - DNA, 1000 bp, mus musculus
agatgtgtcttgataagggttttacaactcttataaaggacaacatttaactggggttaacttccagattcagaggttcagtctattatcaaggtgggaacatggcaccattcaggcagatgttaggctggaagatctgagagttctacaccttcaaccaaaggacgcctgtaaccttccctcagcctgaagctggctgagccagaacttgaccttgctgccactaaggaaattacctagggtggagccttcctccctagatcactctattgcttagccactgtcactgttgctgttcctcttcaagatactgctacctgctgagaggccctggagctattcctgagactatgcagtatcctgcaagtcatcacctgcagttggttccaggctccaaggatgaattggcgggaatgggcttcccccacctttttataagtgcattcgccattaaacatttgagcttgatcagaatattgtcttggctccatttctctctcgtttgcctagtttccctttcttttagtgccggcctgccactcaggtgtaccccgtccatgtgaactgctggacagctcgcaacagcagacaggagaaaactggctcccaggtggttaagaggagggtcacattgaccttccccacagtgacacacatcttccaacaaatacatacttcctaaacgtcactccctgggccaagcatattcaaactaccacaatctgtattactgcaagtggccactaaccatagttatcagattgacttaaaatttacagagctaagatcacatactgccttgcataaactgtacaaatcagtttctcaaatgcaaaatgaaatcttgtgacctgctgtgagcactatgaccaggtcctgttgaaatcatgcctcaagacaacaattcctgtctcctcatcctcccacactggacatgttacaccaagctctgatccaaaatacttttggatcacttcctttaaaaactgaattcctccat

SEQ ID NO: 3390 - DNA, 1000 bp, mus musculus
ttgcttttctcatgtgatggtgtatccaggatttactatggtgggtgagtttggctctgatcatgccaagtaacctcagtttttgttgcttctgttcttatgcttgtctcctgccatctgattatctcaagtgcttgctgccctcaaaatatctgattgaaacctgtcctttctatattcccagttgattcaggactcctcagagtccagatttccctgtgattctgtgattccgggcttctgtgaacctgagattctgggtctgtctgagttcttggcagtcaagcttcctctgagaccatgagttcctggtgtgaccaagctcctgctatcctggtatcctgaaatcctaagattctgggtatgctataatgcctggaagtggtgtctcctctggggactgtgggctgtctggtgtgttggaaaccaaggtataccagcactgatcagaaggaactcgagcagcctgtcaggcagggctcctgggtcttatgttccattccccagtggtcctaaaatcctgggtgttctagggcacctgtgggatggaggacagtgggactgtctgatgagtttgtacccaagaaggcctgaagctggcccattaaattttcttttagacagaatgtactagggaaacatggctaacaacggggctcaattttgttagatcactgcttttgttctcttttaagtagacattaactattagttttatgaaaatcgatttaaaaggaattttccacaataatggaaattgaacctagatcctcacttctgttaggtaagtattctaacaaggagctctagccaaactccaggattttacaattttccttttaagaaaaaaagccagatcatggccgggcagtggtggccatgcctttaatcccagcacacaggaggcagaggcaggtggatttctgagttcgaggccagcctggtctacagagtgagttccaggacagccagggctacacagagaaaccctgtctcaaaa

SEQ ID NO: 3391 - DNA, 1200 bp, mus musculus
ttgactggcctgcagcaggagccactacaacatgcacgtatgtggtggagagttggaagagaaagagaagtggaacagtttgagcattatgaagtgaggtagaactggaagctcgagggtggagagaagtagcctgatgtgagcagcctgcgctgccacctgagaccatggtgaagtcccggcccacgttgctgctgagggacacgtctaggtttgtggccatgcagcagcaggggtctgtgtcactgtccatggagcatgttaccactatagatcatgcgaatgtccctggtctgggctgcagcctgggaccattttgatatcgaagggctgtgtagagttggccccaccccccactggctgccgcttttgggagagcaggccctagatctcacctgggcagcacagtaggggtggccctggtatcatgagcaagggagagctgtccctgccgtcatctgccttgagatggcacaagcactctttgccacttgagacagtcagagagctggcctgagggtcatgagagcaggagagctggctcagccccttgactgctcaggagagtgggccccacagctcacctgggcagcacagtagatctggctctcgtggtgtgggtgtgggtgggctggccctgaggacatgaaatcgagagagttggccctgcccattgctggctgtggtactggtgatctagccagggcaatgctggagagcttgatctggtggtgtgggtgcaggtgagttggcgatctgaccagttcagatacctctcaggctcagatccaccaaacccagggctttgagttggcttacaccagcatctacctttcagtgaactgcttgagcatgtgaaggggccggtcctgcagatccaaagctttaggacctccatgacataggataacaacaggatatctgagaagactcagtgaggacccagtattgatagtgtggcagaagccagaagcctcaaaccagaccaatgactccttgcaaatggacaggtttctgcaagtgaaattatgtggacaaaagggtggacagtgtgacacactgcagcttccacgatgagatgtttttatgctttgttttgtttttattttcttatcggggtgggggggagttgcaagagcagagggtggataggaagggatagggagatgaacagggttggagagcatgatgtgaactcac

SEQ ID NO: 3392 - DNA, 1000 bp, mus musculus
ctccacttacacccactgatcttggtggccatcccaaggtactggcatctccaaaatgtgggggtcttctgctgcaacgctttcactaatagcttctcctgggctctcttcatagactccagccctaccacacagtgccaggcctcagcttttctccacgactccttaatgcctccaaagacagcactacctggtgacttatactacagtgggctgccaagaggaggcgcaaccttggccactcctgggacgaagctcctgtgtgctgactctgggaaaacacttcccagacaatctggaatggactcttcaggcccagctgagcagcatctattaccccagcaaagcaaaggcacagattctcaactccaatggcctgggagtctttgcttccctctgaaacttcccaagccaggcctccatcgactgtactgctctcagcattgtttttctttttagatgtcggcatgtatatgagtacttggtctgcacgcactcttgcataccacaagagggcatcagatcccattatagacagctatagctgtgggctctgggaattgaacttaggacctctggaagaacagccagtgctctaaacccgagtcacctctccagccccagctctcaacatttcctatcttccccattcctacaagaacagcatggtccttccacaatcccaaacaacacgctcaggcctgtcacagcaataccccactatcctggtaccaacttgtcttagtttgagttttaattgctacgatgaaacaccataaccaaatagcaagttggggaggaaagggcttacacctccacaccatagtccatcgctgaagaaagtcaggacagcaactcaaactagacaggaacctgaagacaggagctgatgcagaggccatggaggggtgctgcttactggcttgctcagcctgcttccttatagaacccaggaccatcagcccaagggatggcattacccacaatgaatgggctgggc

SEQ ID NO: 3393 - DNA, 1000 bp, mus musculus
ccatttatgttgttcagagctggagagcaacctttctggtccttgttcttccttcctttgcactagctttgcaggggtaaggtggctaatttatacatcacaggaaataaaacagctgtgaatatggctgagcccagacatgtgtacagaactactggcagatctgggtagtgtccctgaagaattccgatcactgcaggaatggccatttctcccagggcagagccaattacaaagaatgctgcagatttcccagttaaggtagtgtactgctcaatccaggagatgccgctgggaaacgtggctgccattgaggctccatacacagaagtcgcgatccagagacaaagagggctcttgtcaaaaagcaccagaaagaaacatgagaccaggctgccaatgttgctcagcacaatcatggttccaggctgtaagagtgttgcaaagaagatagccaggcccctgcaggctgcaaaggttccccagaagatggagttcaagccagctgcctcactctcttccatgccaacatgggtggtggcgaaggagaatacgtaagagccgtatgttatctcagctcccacataaaagaagaagaagaggaagaggaggcatagcagggccctgtgatatttagcccttcgagctccctcagtagatgctctgggttttttctgccttgaatgtttcttacaaaacagaccaaacagaaagacagaaactactaaaacataggtgctgatagaagcatatgcccacagcagattcatgtcatcgggtaccgcgaacacggagcctgtggtggcgttggaggattggttcagcatcagagtgtcaaggtcggactcggtgtggttctgagcagatgctgttgtgccccaggccaacttagccagcaggggagccagaaaggcacccaaggcaaaactgaagtgcaaggcctgcatatgtggggctcctttgtccccccagagatccaagatgaggacgttcccaccta

SEQ ID NO: 3394 - DNA, 1000 bp, mus musculus
ttagagtttaatgaaaatgaagccatgcaacctcccacaagcctgaagcaggctgagccagaccttgactttgctaccactaaggagattacctagggtggagccttcctccctagattactctattgttcagccactgtcctcttcaatttactgctacctgatgagagaccctggagctattccggagactacggccctatcctgcacgtcatcacctgcagctggttccaggctccaaggatgaattggcaggaatgggctccccaccccacccccctttttaataagggcagtcgccattaaacatctgaaccttgaacagactagcatgtcttggctccattatttctcaacccgccaaggttccctcttttctttcagctccaggttgcctcccatgctcgaacccggacatgtgagccgctggctggctcgcaaccaagccacaacatacccaaccaatgggtcacaatgaaaaaagtcctaagaggaaaaatcatagctctgagtgctgccagagagagagagagagagagagagagagagagagagagagcatacactagcagcatgtcagcatacctaaaagctctagaacaaaaggaagcaaattcacccaaaatgggtagacagcaggatataatcaaactcagggctgaaatcaaccaagtggaaacaaaagaacaaaatgaactatacaaagaatcaaccaaacacaatcaacaaaatatttaaaatcttatccagactaactagagggcacaaggagtatcctaattaacaaaatcagaaatgggctctctgctcctccctgttccagaaacaaccgcatcttcttgtgcagtgccagcctcgtcccatagacaaaatggtgaaggtcggtgtgaacggatttggccgtattgggcgcctggtcaccagggctgccttctgctttccacatggcaaagtggagactgttgccatcaatgaccccttcattgacctcaactacatt

SEQ ID NO: 3395 - DNA, 1000 bp, mus musculus
gtgggagaattgagttctgatattgacatgtaaccttggtttctgttgcttttgttcttatgcttgcgtcccatcatctgattacctctagtgctacctgcctttgctatatctgactggaacctgtcctttctggatcctggttgtttcagaactcctcagagtccagctgtctctatgatccttttattccaggatcctgtgatcctgagattctgggtgtgtcagagttcctgggattcaagttctttctgggaccctgagatcctggtgtgaccaagctcctgttatcctgtgattctgagtgtgttagagagcctgggagtggagcttcctctgggtgttgtgggactggctacagagttcgtgcccaaggacttctcagggcattggcccagactggaaagctctctctctctctctctctctctctctctctctctctctctctctcaaagctggcatgatttatctctgtgtttttcctttcctgctggcctgacctaatgatgcattaagctgccatagtggtgcagaacttgttttcctttggtggtgatggggactgaacctgaatcactgtgtgtgttagacaagggttctactgcagttccagactcccagatctagcatgcacgtggaagcaagaggacaccctccagtgtctagccttctttttcaccttgtttgagacagattcttgttggttgccagtgtatatatagcaggctcagtggctaatgattctcctattcctacctcccatgtctccataggaacactaagagtacagatgtgtgctatcgttgctggccttacatgagtgctggggccttgaaccggccccatgctttctagggccttactcactgagcaatctcccagccctatagaacatattttttaatgtaaaatttgtgctgggatatttagagcaaccttataacttccagaaataagaaaccactcaagtgtctcttagctgatgaatgaacatgta

SEQ ID NO: 3396 - DNA, 1000 bp, mus musculus
attaagacgcccctccccccaaatgtgggtagcaccttctaatagcagcccagacacaaagggcattcattagcagtggggcagtatttgccagttggtgatttggccttgcctcttactgctgagtgagttgattttgtactgctactgtgctatgacttctttgctgatatcaaaaccagtgttgcctggcttccatgggtgactgaggaccagcatctctccagcaatcctttaggtcctgggtgagctttggactgcggagccacccaacctcaaacgcaagcaactacacagttctcagtctctggggtgtgctgcagctgatgttatgatttcaaagcaagacgacttaacagtctttgaacacattcatttgtcctattggttctgtgcctctacagctgtgattttcaatctgtgggtgcaacttcttttgtggtttgaaagactttcacagggtttgcccaagaccattagaaaacactgatatttacattaggactcataacagtagcgaacttagatatgaagtagcaacaaagatgattttatggttaggggtcatcacaacttgaggaactgtagtaggaaggttgagaaccactgctctagagaaagttggctaaaccacctctctctgatatgttggccatgagtgtcctagagcctccaaaaccaatacaggttatcttcattgttcttggttgcccaacagaatttgatgataagaccccattgctgaaaccaccacacatttcggtcacaggatgtggagtcttgaagatggtactgacagggagttatcctagctgattggctttcatagtacggtaaggtgctgtggagcttgctgcgggtaggtcaacaacagtccgttgtaacctccatgaactacgacgacgaccaatgtgtaatagctgtgctagcactgcagaggtaaccacccaattcctgcttggatctaagatctgctccacaggagaaaaagaaatgttta

SEQ ID NO: 3397 - DNA, 1000 bp, mus musculus
agctgtgtcaagttgacacaaaactagtcagtacagtggctcagtgcaccctgatagtttatggaggtgctgtgactggagcaacctgcaaagagctggcaaaccagcctgacgtggacggcttcctcatgggtggtgcatttctcaagcctgaatctgtggacatcatcaatgtcaaactatggacaatgcccatccctctacctgcctgcatagcatggactaggttgcccagaagtttagtaactgctctcactagtcacatgcttctgaggacatcatctgccccatcttgtggcctaatccacactgtaccttctggagccttttacagttttccataatggttgggaccaggctaatccctatcacttacaatgggtaggaacaaatatgtcaccaaggtggcttcctgggggagtggaaggagtagaactgactgtccctttaggccctaacaagtaaaattgccttccattggtttgggatggaaactcatcgttggaacacaggaagtgggcttcgtgtcactttggcctgtcacttagatggctttggttctagcttcactcccaagccctactggatgtctgaatttcagtatacatgagtgccgacatcctcttactctgagaggcctgggatacgcccctcccccacagtgccgaagccctagtattgtgtttgtgaaccatcctaacatgtaagggaaataaacacctgggcctaaaacaaacaaacaagcaaacaaagcttaccattttatctattttaatcataattcattaatgttaagtatatttacattttaagtacacttcttagcttgcaaaacaaacctcatgtctcctaagcagttttctattagtcctgcctgcaggccctagattcactattttgcatctgtctctttaagtttttacttgtcaccctgcataagtggagtcaaatagcatctgtctttgaaatttcagttgattgattgttttgagagtttcat

SEQ ID NO: 3398 - DNA, 1200 bp, mus musculus
acaatccaaaatggcggacttactattacttacatttaagatatttgccaataagggaactaaatgcatattgcaagatgttgctcggaaactcttaatatttatcaattaaaaaaagttttcggagtacaaatcctcatcaagaacccgcatccacttctcgcagttaacgctgctgcatttcttccccggttttatccttttttccaacaccaccgacgtctgtttccctcgcatctcttcccatcctgaattctaattcacaaactgaagtcacccagccagcccgagcgcgaaggctacccgacgcccgccggtacaaagcggccgggcgtgcggcgagcgcggagggcaggtgcgctcgccccctggcgggagcccgcactcgaggagcccgcaccgcggggcgagccgccgagaccccagcccgcaccgcccgcgccacccactccgagcccgcccgagccgcgcacggcgagcccgggcggccgcgctgaccgcaccgcgcccacccgcgcccagagcagggacccccaaggtgtgaacccggaagtacaagcacggcccgcgcctggagcgagagagcgggaggacggcgggctgcggcgctccgtcccgcacggcaacttgtcgcgggacctgtcacacccgccgctccgcgccacgccgcgcggcccttccgctctcctctctccctccctccccacgctggcgcctcagcgccccgctcctcagctcccagctccgctcgacgttgctcacgtgcgacacccgcacccgcgcgcaccccgggtccgcgcccgcgtcctcgcccgcgcggccggctgcttacctccgcggcctcatggtcgtgctgcccggcgcgctggcggaggggagagagagaaagggcggcggcggccgccgcgagcctgtcacttcctgacggagctcggccgcgagggccggcgcatggcgagccggagggctgtgcgcgccgagtgccagggaccgggcggcgtgggggcccgagcggctcgacccgagccctgcgtcaggccgaggctcgcgcacacctgcccgccgccgctccgagccgcgtcattggctgcccgcgcccagcgcgcgagattgaaccttccattcattccgggggccgggcgtgcgcgcgccgccgccccgggactcctgccccgagcgcgcgcgagcacgcgctcccac

SEQ ID NO: 3399 - DNA, 1200 bp, mus musculus
catgatccttcagcagcaggggtctgttaccaccaaaggccaggaagacatctttgttttggactgctgcctgggtacatgttgatatttgagggctgtgcagcactggccccatccctccccaggcatatagtgggagacctggccctgaataagtgaggactggagaactagccccacctcttgcctgctgcagcactagggggagcaggctttgcacctcacccagaaagcacagaagagttgactctggctacagcggttgcaggtaagcgaccctgagggtgtgagtgtgggagagctggtccttcaacttgtctgctgtgcagtggtgtgggagaaagagaaatgctcttccacatcccctctctgttcacccctcctcacctatggcaggtgagagaactggcccagggtcatgagaatgggagagcagatacttgtctctcacttgggacagtagaagtgactctggtgtcatgggtgtgagtgaacaggctctgaggacatgagcatgggagagcaagccctgccatttatgctgtacacatgggagagatgccccctgcccataccacctatacagcatgtgaaagagctggttggaaggtcacaagcatgggtgagttggccctgttcctcactggctgcagcacttggagcagcaggcccttcacctcacctgggcaatacaacagtgataaccttgctggcatgggttagggtgagctggccctgagagtgtgagagcaaaactggccctgcctcttgctggctgcagcactgggtgtgatagtcagggcagtgttggagtgctcactccagtgatgtgaatgtgggagagatggctccacccaggctcagatccaagggtttgtgttggcttgccgtagcatctacacatctatgaactgttagagtgccaaaatgggcacgtcttgcagttccaaggcttcaggatctccacgacccagggcaatggcaggatatctgagaagagtcctggtaaggatccagtattgataatgcagcagaagccaaaggcctagaaccagaccagtgactcattgcaatgaacacctgcaagtaaagctatgtggagaaaagtatatactgtgggatatgctgtcacacattacagcttctacaatgagattttatttattccttttggcggagggtggatataaagagacagga

SEQ ID NO: 3400 - DNA, 1400 bp, mus musculus
cacattgaatctgtaagcagcttttggtaaaatggttgttttcactaatacctggtgagcagcacaggaaggtaggacatcattcctggagccatggcacctcatgccatagaagtggtggggtcagctttcacttgctctgtccaaaagactggctgaaccattctactattgagctgtccagcaaggtacagcacctgatttccagagtaatgcagctggcaatgattagggccagctgacccactctcatgattctggggctagttctcctgattgccatggatggcaagatggagaagagggacagcattacctcatcaagggagatgagtagtgggggccagctctcctgggcactttcactcttgggactggatcactagcacccctgccaacagggccagctctgatatgcagtacagtgaggtacagggctcactttcccaacttctgtgcgtggcatggggcaggactagcttcctagagcttgtgagcctgtggacatctttctcagctgatggagatggccatgggcatagaagagcagcatgtctgtgcccatgccacccaagagcagatgagttgcagtgccagctctcccacactcatgcccttggagcttgctcatccacagctctgccatcatggtcatctccactgtgccacctggatgaagaacaggcctgtgctcctgagtgctgtctcaggtgagagatgaaaacaggtctctagtatgctacatcccatgaggggtggggccagttattcactgctcctggacatggtctccagaagctgccctgaccaaggacatcctcatgttctctagtggtaatttaagccatagacattgaaactgacccctgtcactatgtagccatttattcagagatggccctcagcagcagttggggctgagacctcaccatgtgccagagatggctattcacaacaggatacttctctcctgcctcaaatacccagttccatttatcttcataatgctcaaactcctcaacttctcttttctatctgaaaaccacaggctgaaacattctggcagctcaggctgtaagctggccacatggctgacagtcccctggtgacaccctccatcagtgatgtgtggtgtggcagtgtaacagcaagcaagtgcccgtagcccaactgtaccctgtgttggagggcagatctgtgggtgacatggtgatccacatgtttgtcttcctcgttctgcattgcactccctggatttgatttgatttgatttttatgagtcctgtgcagaaaacagctttggccaccaagctaggcatcaagataggataaacaaaggactgccatcttctctgcccctaacatagagttatctcaggttttctgagtgtttaacattg

SEQ ID NO: 3401 - DNA, 1200 bp, mus musculus
tctttttctatttccatttttagatcttggatggtttagttccctttacctgtttgattatcttttcctgtaattctttaagggatttttatatttcctctttaagggcttctatcttttcacctgtgttctcctgtatttctttaaggaagttatttatgtcttccttaaagccctctatcattatcatgagaacggattttatatccgagtcttacttttccagggtgatggtgtatccaggacttgttatggtgggagaactgggttctgaagatgccaagtaaccttggtttcttttgttcttttgcttgcctcccactatctggatatctctagtgctacctgccctcactatctgactggagcctgttattcctgtaatcatggttgtatcagaactcctcataatctagctgtctctgtgatcctgtgatcctgagattcctggtgtgttagagttcctgagcctcaagcttcctctgggacctttagatccttgtgtgcctaaactccttggatcctgggatcctgggatcctgggatcctgggatcctgggatcctgtctgtattagagtgcctgggatttgagtcttctctgggtgctatgggactggctgtagagtttgcccccaagttaaacccgcagaaactgaaggaatccaagccactggttgggtggggtttctgtatcctgggatcttgctggttccagttactcttggtgttttgggaacagatgttgtgtcttactcaccctgatcctagatcctgggcatgctagagagtctgggagtggagcctcccctgcatactgtgggactagctgcggagttgttgcccaaggtaaactggcacagactagaaggaacctgagccactcaacaacttatttctaagggcgtactacatgcccatcaacatatggtaagcaaaatacactcagtagcatctttgaaggtttattgactgataatgtggaccatggctttacatttaaattttacctttttttgtatatgtatacacatatatgtgtgtgtatatacatatgtgtatatatatatgtatatatacatatgcatatgtatacatacacacacacaagtatgtgtatatatatgtatatatatatggagatatatatatatatatatatatatatatatatatatatatatacttccttctctcttttg

SEQ ID NO: 3402 - DNA, 1000 bp, mus musculus
tgctgagtctgctttcttatagagccagtactaccagctcaggggcagaactgactaaatgggccggccctgcacctatggatgatgaattgacaaaatgccttacagctagttaaatgcctcttggaggcatttcatcagccgagtcacctactttctcttaggactctagcttgtgtcaagttggcactgaaagacccacaacatgaggactcccccacgttctgactcaggagaggcgacaccccaaaatcacaaacgagaaacggtcttcctgcaaattgcaagaggatttttattcaagagcgctctcgggcccacggtcatacaccacgcaggggtagaggactgtggcgccctaagtagctggataagagggtatttaaaggaaggaaccaaaactcaaggaggtgggaagggcgttgttggtaaataccaaaaataccagttaagagtcacaaggaagtacaaagtcacaagtgtcaggttatctctcaagacagtttctaagagcccctaacaatctaagagcccctagcaatagcacctttgcatagtgggttccagtagtggtcagggtgggtcagggtgactttctttgaatgaacactctttgaacccaggaagcgggtgggtggaggaatgtcactatctgttttatgacaagcataccttggagcactgagtttactactctttcagcacaaaaccaatcagtagaccctttcctccacagtctcaaaaataattgtagaagatggtggcagaaaaattattagttacaggggtagtggataaccataactgtagaggatgaaaaggccttgtacacacagataagcactggacaagccaggagcactgcatatctttccaatgaaatgaagtgtatggaataccaggaataatgtagctttacgacttggtgatcctttgcagtctaatgagacaggctttgcctgtatcttccagattatatttattccagacaatatccttt

SEQ ID NO: 3403 - DNA, 1200 bp, mus musculus
ctcaacttcagtattatgaaggccatagcacacattattttgtccataacacccaccaagatactttattaaatcctcagacagcatctgttaattcaaaaccatgttacaagcaggcctatccatggaaactcaataatatattgtatctctagcccatgactatccttttgtaaacactgtaaaaatgtgtatgtactgatcctttttcctggtaggtttatcttctataacatagaaacatctttctctagtacctgtgaactatatcttggacaagtaggcaacatcaagaaggctagaatctatctaccagtggccctggaagggtaggatctaactttataatccacatttagccaacataggtgacctgatcacatggaacattcccacttaaccctccagttttgttcttttctcttaccccatgaaactttctgcctttaatgtgtgtactgttgaacaaagtccatatagaagtctatttcctcctttcagtactctgaagaaaagctttcgtttttgtcttaaccagtatttagtgaataattttcttttcataatggcaccttgatcattgtagtccctggagacaatccaataatccttgattccccactatgtctgttgatatgctaactgtggtgatttgaatatgcttggcccaggtagtggcactattaggaagtttggcctcattggagtaggtgtggacttgttggattaagtgtgccactgtggggccaccttgtagatgctcctcatagttgcatagaagtgagcttactgtttgccttaggaacaagacagaactctttccacatcatgcttgcctggatgctgcaatgctcctgccctgttgatgatggactgatcctctaaacatgtaagccagacccaattaaatgttgtcctttataagtattaccttggtcatggtgtctgttcacagcagtaaaaccataactaagactccaactttttgctttcttgaaggtacagactatttttttatcgttggtatgtctaggatagtcactatggtgtctttgcatgatgttccttttaaagtagatggcaaagcactatctgaagtgattttagtaatacaaaaatgatactgtttctattttgcttacaatcaatcactaaatcctgattttatcttaagtaaaaccccagtacttaatagactaa

SEQ ID NO: 3404 - DNA, 1000 bp, mus musculus
ttcctcttctgtgttctcctgtatttctttaagggagttatttttgtccttcttaaagtcctctatcataatcatgagatgtgattttaagttagtgtcttgcttttctggtgtgctgggtatccagggcttactgtggtaggaaaactaggttctgatgatgccaagtagccttagtttctgttgtttatattcttgcccttgcctcttgccatctggttatctctggtgttagctggtcttgctgtctttgactatggtttgtcccccctgtaagcctgtatgtcagtactcctgggagaccagttctctctgtgaggattttgggtatggagagctgtggcacagggtcaactccatggtgcagatagaaaccagaaggatcctgacctcagctattcttagttcctgtgttctgatggcactgggagggtccctcttgggccaagaatttgaacagaagtggtgatcttacttgtgggcactccccagctccctcgtgctgtggcgcagaggaaaactggaaggctcctgtctcacgttgctcctcggttcctgtgtactgagggttctgggcaggtccctctgagcagaagtggtggtcttacttgcgcttataggcttgtccaaactcctgggaggctagctttctcccagtggtgtttaggtatggagattgtggcacagcatcagctctggactctgtggcacaggatcagctctgggtgcaaacagaaaccggaaggccgaagggatgatgctaaatctcagttgtagtaatctgttaagcttaccttgagaattttagaaaatataatgaaaatcatgggcacacacatctatatgcagcccatcccgcttcccagggatcaatcatttacaggaagaggattttaaattcctccagcaatttcttttcactcacaaagcaggggaaacttaaagtagcattactgatgttagaaaatatttgatactatactcacataagaaatgttaa

SEQ ID NO: 3405 - DNA, 1000 bp, mus musculus
cactgactgctgaaagttctgaactcggtgggggagtcgggtccccgtacgggccaccaattgtcgcgcccgctctcgaccagcaagaacgacacgaccaccagtccttctaacagcagtttattccgtcttcatctttcttctttctcttcatcagtaccattccccagctgaagagttctgaatccacgccggatccttctcaacagtctgttttacgggaacctttattaaccccttcttccccgttatgcagttctgaatcctccctgtagcagggggtcttcgctcgtgcctgaagatgtttcttgttcccgggtttcgggcaccacttcttgcgcgcgctcaactcgccagcaagaacgacgccacagcaggatccttctgcacacgtttattcagtcctgtttcttctttctttatatctcccttgtttatatatctcccttgtttttatatctcccttgtttatatctcccttgtttttatatctcccttgtttttatatctcccttgtttatatctcccctgtttttatctcccttgtttatatctcccttgtttatatctcccttgtttttatatctcccttgtttttatatctcccctgtttatatctcccccgaaccctgggcctctcactccttttatactctctctcatccacgaaccgcaggccatgccccctcgccagtcacgaggcttcagctaatcagggcagcaggggcaaatctccaccaaattggattcacctgtatcctggtacacctgcgcagcactcaagatgtttgtgtcttatatgaggaagtcaggtgcaagtcatatgacttagctgcagtccctggcgcctttgggactgccgccacacccgctccccacatattttcaatatcattttatgttacatgcctaaaagtcaattatagcaatatactaactattgctttgtaatgaaacaataaatacaattctagtaaaaagtgatatgataatctgttag

SEQ ID NO: 3406 - DNA, 1000 bp, mus musculus
tctgtaataaaagaggggttgaaaagaaaaagaggggcctggagccaatcgtctgccataggatccataactaaataatcctgggagagagcaagcctagcaggaatgcaaacagacctgtgagcacaggtaggaccaccactgctgctcagaggaacacacctggaactctcaggacacagaaactgaggagctgactaggacagggggcttccagtttccatctgtgcccaaacctgatcctgtgccatagaactacattacaaaaataccacctggacagagctggtctcccaggggtgcctacacacctgtgacaacagttaagaccaccacttctcttcaaattcatggcccaagagggaccctctcagagccataaggacacagtaacaaaggatcaattgggaacaggatccttctggtttcttgttggggaccagaagccccaagcattccagtattgtccttaggccatcacctaagactcatttgcttcttccactattttggttacattttgtaattgagttgaggaattttacaattagggcattcctttccctttacaatgagggcactcatttccagacctttcacaatgagaatattcctttccagacctttttataatggggacattcctttgacattaatgtgttatctagccccacagatttggcctgtgtacctgagcaaataccttttgcagttttcatctttaaaagccatccatttcccaagaataaacaaggattgaacaggattttcgtcttgtctctttccatcgtgtcttctgatcaaaaaatttgtcattgcagctcgcttctctccagaaccctgttgattaagccctgaaggttggggcagtttctgcctacaccccagagctgacactgtaccaaatctcttcatacctaaattcctcctggagagaatggtctcccaggagtactgaaaaacaggcttgcaggatgaacaagccacagtcagagacaga

SEQ ID NO: 3407 - DNA, 1200 bp, mus musculus
agggtttctatcttcagagttgcctcactttcacttttctttattgtatctacctccctttttatgtctagtatggttttgttcatttccatcacctgtttggatgtgctttcctgtctttctttaaggacttctacctgtttggttgtgttttcctgtttttctttaaggacttgtaactctttagcagtgttctcctgtatttttttaaatgagttattaaagtccttcttgatgtcctctaccattatcatgagatatgcctttaaatccaggtctatcttttcgggtgttttggggtgcccaggagtggctgaggtgggagtgttgggttctgatgttggagagtggtcttgttttctgttagtatgattcttatgtctgccttttggcatctgataatctctggagtcagttgttatagttgtctgtggttagagcttgttccttttgtgattctgttagcctctactagcaaatgtgggagactagctgtctcctgagtttcactggttagagcactctctgcaggtaagctcccctcttgcagagaaggtgcacagatatctggcattaggacttttctcctggcagaagatgaaggcctgaaacagggcctgtcccagaagccattagcttctgtagtctacactcttacctatgcagactagtctcagtaggatacaggaaccaagatgtctcccgcacatgcttctgcaactccctactttggcagggcggacacctctcctctggcagggaaggtgcccagatgtctggagccagaaagggggtctgcctcagaagttctgtggctcctgcctgtcccagaagctgttagcttctgtagtccacactctcacctgcgcagactagtttcggttggatgcgcaaaccaagatgtctcctgcagatgctcttaatgactactcttattgatatttcttacacatctaccttgttttgttttacatcgctttacattacattttgttttaattttttttgttttgttggtgctaatggaacccgattttatgtaatttaatgatgtatagtcaattaaaatattatgcataatctataaatcagcagcttacccactgatgcaatatacatttaattaatatagtcccttcatcaaatagcagtctgttttatgtcatgttgctcagattcttcattgctacaccaagtcac

SEQ ID NO: 3408 - DNA, 1200 bp, mus musculus
agttgacataaagccaagtattaattatgtttgtgagtgtttgaaagcgaagtatgaataaaagatttttaaaagtaggtgtaaggggtgaggaagagagtagtacagacaaaaactttcttaaaattaagtgtaggtatgtaggtaattatccttccagaatatgctatatacattcttccctgattacaattatagtgggagtagaatgtggggttgtgagctgtgcccaaccacctggtccctggtcaagcacatgccttgaaccccggagacccagtaggtgacatctgccttgggctcttggctcctgtcacagttacagcgtcccacaggtccccacagagaggcatgtggccattagtcacttaggagtagcaccaagccctcccacttaaatataaggattccccaagctctcagaacaagccaatgagcagtacctgttgtcagacccttacctgccccaaaactgtatataaggatcctatctggaaggattaaaggtatgtgagaattactccatcatttgagagcttctgtcataagaactgtaacacttgggaagagttctgctccccccaagtgctgtctgaagctcccctacactccacactcgctagttggcttttcatcagcccaggcccaccctactcagtacagggcagcatggagtaaccaagacagtgagtcagagacaggtggagccaactgcagcagagggaaaggcagaaacaacttcccctccctacttacactcgctcccctttgccagaaatcttgaacccaacttggtcagagatctctatggaaagcctccagtacacaggctcatagtaaagaatgcttatctcaagctgaaccccttctcccgctaggtatggctcatagaaaaatgattgttttttggtttcagtttgttgtcgttgttgcttgttttgttttgttttgttttttggttttttttgttttttgtttttttttgttttttttttttttaggtttggaatattcaggatacaaaattccagcccagtaggagatttaataaataagttaatatgtttatagttcagtagccttgaagtaatgctgaggagtcattcatcctcttgaaactcttagatgtgcagacagtgcaataggatgagtacatctcatagagactgagagttatacagatctgaattaatgtcctgt

SEQ ID NO: 3409 - DNA, 1200 bp, mus musculus
gaatctctcactgatcttcttaaaaccctttcctgcattagattgtcattaacagggaggtcacaactggtcaaagtggagagaacaagagactatagaatgctcagccataaatattacatgtctaacacactccttcctcctacgactcaaggaatgtgttgcaggagtggtaacccttaaggattggaagacccagatgtaatggatgactacaaggaagcagtgttacagctaagaactcacaaaacttttgacaatatacataagacctgtgaaataccgactaagataacaatctcatcatgtactggggaggtatgcatggaaagcataaggaacaagggtcaattgttgactgctggaaaaggaacatttaattttctttttctgtctttttaaaatttctctctctctctctctctctctctctctctctctctctctgtatatatatatatatatatatatatatatatatatatatatatatatatatatattttatttttacactccagccttttttcccctgccctgtttggccttctgactgttcctcatcccttacctcttcccctacaccctggctaaaagaggatgtccccaccctcaatctccaatcccaccatacctcctcactccctggggccttaagtctctctagggtttggtgcatcttcactcactgaggccagaccaggcagtcctctgctgtaaatatgtcaggggcctcatatcagttggtgtatgctgccttgttggtggctcaatgtctaagagatctcactgttccaggttcattgaaactgctcatcttcttatgagattgctcttctcaccttcttccagttgttcactaattcaaccacaggagtcgctgtctcatgtatggtacctcacagatttgactagacttctgcagtaggatacatatccaatagtgcttgtaaaagcaagcacaaattgaactctttagaacacaaaagaagatcacataatggtaagtaagttgggaagggagggaatggacttcggagaaattgatgaaagaggagtatgtaaacaaagtgtattgtacaacaaaatgtggatcaaataatgaaaatgtagtaaagttgaaaatagagtttcaattatctgtaaaggaatataatttgagatctaaaaaaaaaaaaaatacagtaagtgcagtaaccc

SEQ ID NO: 3410 - DNA, 1200 bp, mus musculus
tggctattaataacttgggaattctgagttttgcaggcaaatggatggaactagacaacatcatcctgagtgaggtaattcagaccccaaaggtcatatgtgttatgtactcactaataagtagatattaggcaaaaattttttaaaaagtacagaacacctaagatacagtccacagaactcaaaaatgtcaacaagctgaagggctcaagggaggatacctcagtccaacttgggaggaaaaagaaagcaatcacaagtggagaggaagggagggacattggagggaatgtgggtgtggggtggggttggagaaagaggaacctgatctggtattagatgaggaaaaagacctgaagtcctggaagccagcagaaagaacagaaacaggaaacctctggaggtaggaggttggggggaaccctccagaatacaccagagacgtgtgaagtaagagattctcaggactcaaaggtgggaccttagatgaaatgccctacagtagggagagggaacatgactatattccagaagacccaaaactcaaaactaaaagagtcagtgagcagatatttgcacccaaccaatggacagaagctgcggattcctgcggttgaattagggaaaggctggaagaagctgaagaggagggcgacccagtaggatgaccagcagtctcagttaatctggactcccaagatctctcaaacactgggcaattgactaggtaacatacaccagctgatatgagacccccaacacatatgcagcagaggaattccaggtatgggtttagtcagagaagatgtacccaaccctcaagagactgaggactccagtgagtttagacacctgggtgggtggtgaggaaatatggagacagtggggtggggaggaggtaggggatgtggaacaattagagggtgggactgagccagggagaataaagtctggaatataaataaatagatgaataaatgataagaaagaaaaagaaagaaagaagaaggaaggaagaatgaaggaaggatggaaggaaggaaggaaggaaggaaggaaggaaggaaggaaggaaggaaagaaggaaggaaaagatttaaagaaagaaggagaattaaagaaagaaggaaacttagaaggccatgggttccagatcaaggaacacagtgcacgctgaagacagaaaatgtctacccagac

SEQ ID NO: 3411 - DNA, 1000 bp, mus musculus
tagagtaaaatatcatattatacaattatattaatatgaaagatagaatgtatgtagttgaaatcaagccacagctattttatgtaaacatatacctgcaaatacatatacaaatgaacacaaccttataaaacttctttacttgaacaagtgcatggtttaaaattatagttaaataggtatatgttgccacatagagttcaaggatattgctaaatgtgtgaaatgagtaaaaagtgtgttattagaaattaaactatgtacatcactttgctacatttttcaactagacatgcctgaattctatctcatgtattcattagaagccaccttctaatgaaaaatatgtacttgatattttgaattattttaaatttctcagaaatacaaataaaagtctcttttagaaagtgaaggagtagcctagagttcaggaagacttaagggaattaatagctgttgttagttaaatgacaagggacacatagggctcatatatatttagtgctcagttggtggattgttaaagaattgagaggagtggtcttgttggaagatgtgggacaccgaaccctggctttgtggttccacaatcccaaacaaggacaagcctgccttgttctttcttttcctcctgcctgtggctcaggttgtaagctttctgctattgcccaacatctgttctgctgtctatcaaaatgtttcccactatgataatcataattaccctcggactatggaagaaagcagcttattaaatgttttttttttaatttatatatgtcaacttggacatggagtctcttcagaccaatggaacaataactgagagagattttataaagctcccaatcctacctctatgttttctgtctcccaggctgcataaccttgttggactttaacagacaaaggcaaacatggagagagaaggaaaatcatgccaaccgtggctcaagtgtccatccattcaccaatttctaaaagtgtcatctttgtt

SEQ ID NO: 3412 - DNA, 1200 bp, mus musculus
tttttctatatcccagaattttatacagtttccctctacaatttgcacaaaatccatgtatgttgttataagcttttaggcaaattgatagtcttaaaatcacagacacactcaagtaaataaagcattaatctaaaaatagttaaattggtcacataactattcagcagtagaaaatttaaaaaaaaatttattggctattttctttacatttcaaatattatctccttttctggtttcccctctgaaaaacaccctcccactctcccctctcccttcccatggctcaccaacctaaccactcctgcttcctggccctggaactcccccacaatggggcatacagccttcataggacaaagagcctctcctcccattgatgtccaactaggtcatcctctgctgcatatgcagctggagccatgagtcccaccatgtgtgctctttgactggtggtttaatccctgggagctctgggagtactagggctgactcattggcaggtagcatgtagaagaagacaaatcgacccattcttatctccttgtgcaaatttcttttcaatgtatataattcttttagtgtgttgtggtctaatagttgttttaggttaatttgtagtttgtctattgttgcaatgtcctttggatttaaataaattgtttctacacatggttgagcaaaaagattacagatcccagaagtataggtagaatgagacttagagctaatagttgaagcattaaggaatactgccccacctggggatccatcacaaaatcagccaccaaacgcagacactagtgcatacaccagcaagattttgctgaaaggaccctgatatagctgtctcttgtgaggcttgccagtgcctggcaaacacagaagtggatactcacagtcatctataagatggaacatggggcccccaatggaggagctagagaaagtacccaagagctaaagggctctgctgctccataagtaacagaagatggcctagtcggccatcagtgggaagagtccccttggtcttgcaaactttaaatgccccagtacaggagaacaccaaggctaagaaatgggagtgagtggttaggggagctgggggaggggtagggtataggggaattttgggataggatttgaaatgtaaatgaagaaaatacctaatgaaaaattgggaaataaaaaagaaaa

SEQ ID NO: 3413 - DNA, 1400 bp, mus musculus
acttccctttttaggtcttggatggttttattcaattccatcacctgtttggttgtgttttcctgcaattctttaagggatttttgtgtttcctctttaatgtcttctacctgtttggttatgttttcctgcaattctttaagggaattttttttcctctttaatgtctttacttgtttagcagtgttctcctgtatttctttaagtgagttatttaagtccttcttgatgtcctctaccatcatcatgagatatgcttttaaatccaggtctagcttttcaggtgtgttggggtgccctggactgggcaaagtgggagtgctgggtctgatgatggtgagtggtcctggtttctgttagtaagattcttacgtttacctttcgccatgtggtaatttctggagttagttgttatagttgtctctgtttagagattgttcctctggtgattttgttaccctctatcagcagacctgggagactagctctttcccctgagtttcaggggtcagagcagcctctgcaggcaaggtctcctctttcagggtggtgcacagttatctggtgtttggacctcctcctggtcgaagatgaaggcctaaaacattatctttcccagaagctgttttgctttggcctgtcacagaagccattgtttcagtaatccacactctcacctgtgtagactactttctgcggagtcccggaaccaatgtggccccccgcggaacctgaggcagaagcctagggaaccaaggtggcttctgaggaacctgagtcagaagcctagggaaccaaggtggcttctgtggaacctgaggcagaagcctaccagccgcgtggacacctgtgctctgaccaggaaggtggccggttgtctggagctgaaaatggcaccgcctcagaggctctgtggctctcgcctgtctcagaagctgctggcctctgtgtcccacactctcacctgcagactgcctgccagtcccggaaccaaggtggcttccgtggaacgtgaggcagaagcctctcggtctgggcggacacctgtgctctgacccagaaggtggccggttgtctggagccgaaaatggcgccgcctcagagttgagtttttttctgacaagtcttcttgtaacagatttgtagaaccactgtttgcccgtggattttcatacagaccatcccatttcaaagaaggacacattttctgtctcaccagccttgtacactgccactggaattccagacaagtattatgttggcaaaaatatgctgttctctaaatttttcctattatgaaatggatttccacaggcactgtactagtagtagttttgttgctttagaatggtttttaattttcatggtataaacattaaaatctttgaatttatattctt

SEQ ID NO: 3414 - DNA, 1200 bp, mus musculus
atatctaactccaacttctcagttaccctatctgcaaacctgctccccctattccatgacatataacttcgtggttacccctccatcaaaccccagacatatccaccttccatcctcccttttcctgtatgcgggtgcttccccacccactcacattctcgcacttcatcactcctgcatcccccaatgcttggacatcaaacctcactgggaccaaggaccacccctctcactgctgtcaggtaagaccatcctctactacatatgtatctggagccatggatccttccgggtacattcagtggctggtggtctaaagtatggaagaactgggtagtcaggcaggcctatgttgttcttccaatgggatttgtatcacctctacttctacaatccttcctccagcaaccccaccaggttcccttagctcagtctaatggttggctccaagcatccacatctgtattggttagttgctggatggatttctcaaggaactaccacactaggttcctgtcagcaagtgcctcttgactacagcaacagtgttgtgtttggtgtctgcagacatgatggatccccaggtggggcagtcccggattgtcccttccttcagtctctgtttcattttttgtccatgttcatctttggacaggagcatttctgggttaaaaactttgagaagggttggtgacccgcatcccttaaccaggggccatgcctatctatggaagtaatctcaatgggctctatctccccccttttattcacgtttctgctaaagtcatccccactgggtcctgggaggctcatgttacccttttgactgtgatcctccagtggctatccccagttcctcattccccctgctacctatttttgttcgatttcctgaccctctgtaccactctcacatctcttccagttcctgatactaccccccttatttcctccccctcttctcacccttctaggagctcttgactctagctgcatatgtatcaaaagatggcctagttggccatcactggaaagagaggcccattggaattgcaaactttatatgcctcagtacaggggaacaccagggccaaaaaggaggggggtcatgagtgggtaggggagtgggggggagggtatgggggacttttggaatagcattggaaatgtaattgaggaaaatatgtaataaaaatattt

SEQ ID NO: 3415 - DNA, 1000 bp, mus musculus
tcctgactatactctcattttgcccactgccatatgatagaattacaaattatcaagtaagaattcatacttggagaggcttctgcctcaggttctggagagccaccttgattccaggattccgcaaagggcagtctgcacaggtgagagtgtggaatacagaggccagcagtttctgggacaggcaagagccacagaacctctgaggtggctccattttccgatccagacaaccggccaccttcctggtcagagcacaggtgtccccctggcccgagaggcttctgcctcagattctgcggaagccaccttggttccgggactccacggaaagtagtctacacaggtgagagtttggactattgaaacaacggtttctgtgacaggccaaagcaacacagcttctgggaaagatcctgttttgggccttcatcttcggccaggaggagatccaaacaccagataactgtgcacctccctgaaagaggagaccttgcctgcagagactgctctgaccactgaaactcagaggagagagctagtatcccaggtctgctgatagagggtaacaaaatcaccagaggaacaatctctaaacagacacaactataacaactactccaaagattaccagatggcgaaaggtaaacgtaagaatcttactaacagaaaccaggaccactcaccatcattagaacccagcactcccgcttcgcccagtccagggcaccccaacacacctgaaaagctagacgtggatttaaaagcatatctcatgatgatggtagaggacatcaagaaggacttaaataactcacttacagaaatacaggagaacactgctaaacaagtagaagacattaaagaggaaacacaaaaatcccttaaagaattgcaggaaaacacaaccaaacaggtgatggaattgaataaaaccatccaagacccaaaaagtgaagtagacacaacaaagaaaacccaaagtgaggcaacactagag

SEQ ID NO: 3416 - DNA, 1400 bp, mus musculus
ctctatatatattaagtacaatccccattaaaaattttcacaaaaatttgcatatatatgtatatgtatatgtatatgtatatgtatatgtatatgtatatgtatatatttttcaaaatttacactgaaacatggaagaaaaaagaatacgcaaagcaatgctgaatgattaaaaaaataaacaaatgaagttgctatcatcagttacatcagttactatagcaataaaaccagaatattgtaggctaaagaacaaaaaagaaaccgggtcaattactgtggagctgtgggtataggggaagagggggaaggaagagaatgcgcccatcctgctagagttccagtgctctgggtaggcagatgctggacgctttccacgtgaccccggatgggcatctggctgtgtgaagccactgaccccacatgcctgggggtggggtggacaaggggcagccctcagtaccaggttctcagtctctgacatcccttactgaatacagcagaggagctgagtacagaataggggcccagaggcagcaataagccccggagatatggaaagagggtcagggggaaagaggagggtgctgggtagttcccacacaggtgagagtctttagtcctatctatggctggagcacaaaaaggccttctgacggaaggttagaagcaggctcgttagaagaaatcctatctttttaaaatattttattagatattttctttatatgcctttcaaatgatattctgataattccctataccttccccctgccctgctctcctacccatccactcccacttattggctctgtcattcccctgtactggagcatataaagtctgcaatacaaaggggcctctcttctcagcgatggccaactaggccattttctcctacatatgcagctagagacaggagctctggggatactggttagttcatcctatcccatcttccaagcacagcgggccttgataaacagagacagtcttggttttagagatttattgtagaaaggcagggggaaagagagaagataaaagagagactgtccatggccaagaggagagaaggggaaggaaaagagaaaaagagagttagagaagtaagaaaggtgaaggcttagagaaagagaggtaaaagcttagagagtaaggaaggtaaaagcctaagagagtaagagatcgaggaggggccaagcagcccctcttacagtgggttgcttattttgctgttgctaggtaactatggagggaaatctagcttgaaggccagaaacttgggacattgtgtacttgactgaaagccacatgcttttgtgggggctgtgggggcagtaacttcaacaggagccagggcccaagagacatgagggaatgccttctgtcccatgtag

SEQ ID NO: 3417 - DNA, 1000 bp, mus musculus
caagatgtaggaagtgttcaccaattatatgtcattgaaaagaatcttgtccttggcctctctctgcttcaactgctcacaggtgaggcactctgtaccacctccagcttctgctcgagtgtccaggcttaccctaggccaagcaatcacaaattgaattctttgaactatgaggaaataactattcctccatttgaagtcacatatgtcacattaaatttcttttgaaaaatatcaatgaatacctgagtcttacatgaagtttccccagctaagacactttattagtgtaataattaagttccattcttaattatttgtatagctcatatcttgtttattttaatgttaccatatgtgtaaacttgtcatgcctacaggttgttaagcaaggttatctcttaataattttctgcgtgaaccttaccttagttaggattatactactgtgaaaagacaccataataaaggtacctcttgtaaagatgacatttacctggggctggtttacatgttcagagagattaagtccattatcatcaaagcacttgcatggcagcatccaggaaggcctgctgcaggaagagttgagaattctccattttgttccaaaggcaaagagaagactagcttctaggcagctagaatgagggttttaaagcccatgtgcacagttacacacctactccaacaaggccactcctcctattattgccactccctcagccatgaatattcaaaccacagcaaaccatttatttttcaggagaatgatggctagactagcagagtttgtataggcagacctagtttagatggctgataacagaaactcagggttcatctaaaatttttttcaatgtattttattttctataataatcaacatgactgtattgagaactggatgaaaagtgaagcaaggcttgaattgtacctgtgtttcccttgagaattaatgactgattattagaaagactgacaatggatattgatagta

SEQ ID NO: 3418 - DNA, 1000 bp, mus musculus
ggatcagatgtagggggagaaaaaagaaaggagagtgaatggaaattgtcacctggctggaggtggggggatgacagtttttttagacatgccaaagacctgggaaaggctcataggagtctgtaggggtgactctagtcttgaccactagcagtgtaggatgtggagcctgaactgggcaacccctatcactaggcaggactcccagaggaggggtaaggacaacaatctacccacaaaatcttcaacctcttgcttttaagaagtgcagggataaaaatggagcagtgattgagggaatgaccagccaatgaccatctcaacttgagacccatctcatgggcaaggaccaattcctgaaactattaatgatactctgttatgctggcagacaggagcttggcataactgacctctggctccttctcccagcatttgactgaaacagatgcagaaacccacaaccaaatattgttcaaagctacagaaaccttgtgaaagaattgtgagaaaaaaatttaggaacccagaggggacaggaacttcaaaaggagaccaacagagtcaactgctcagtatctggaatctcacagagactaaactacaaaaaaaggacatccaggcactgaacctaaggccagtggcacatatgtagcagataagcagcttagtattcaagaaggtcctccaacaactgaagcagcggctatccctaaattttatgacttcctagggaatcctgttctcattaggagagggtctaatcctgcatggacttgatataactgggagagtggtacctgtgggtaggagctctcccttctcagagaggaaagggaggagggtgtgggagtgtaaggagctctgaagaggatccagggtgggggattgggaggaacagtgaacaaataaataaattactgaaaaaatttcaacaacaaaaacccagaaaaggtaaaataatcctgtataaaagaacatcttaaggtatcgccatact

SEQ ID NO: 3419 - DNA, 1000 bp, mus musculus
tctcttctgttgaaagattacaggtagtcagtagaaaaactgaggtctttaatatcaatgtctttcatcacataagaaacagttgaaatctttttctcctgtttcataaagaattctctgatatcaatgtttttcattacataagatgcagttcaaaccattttctcctctttctcttatgaggaattctctaaatcagtcaccttgtcatgacctatgttcctgttgttttactgcagtctttttcttctcttcacacatcactgtctgcttgggtgtccaaccccgtcctctctgacttctccttgttcttggacatgctgtgctaagtactttaaaccttaatgggaatctaacttatttattgcctcactataaaatacaagtttcattcagaaaactccttccacagcctacattttctttattcaattttgctttattccctcagtgagttttctttttgattcttttctctctagactctgggttttcagtgttccactctcactgaagttaaaaaatactgagctcttgctgctgtgcatatgtatgctcttcaaacagcaacatagttaaccatagctacccatgcctccagtgcctttttatttaacactgcttctgaatgaattgtgtaaggtttgcttgccctttagaagcttcataaaatacaatagaaaacaccaaggctttagtaactttgaatacgtaaaacagttaatgtattagcacttgtaataggtgaagattaaatgctagtaatggtttcccctcatactacagaactattgcttggcattatttattatgtgttaaattatagcttttgaaatgtatgacatattttaattcaaaactctatatgccactgtcagctggtacgttggaatggttttgcttattgcttaataccttctattagatgtatttattaacaacatgatgataatgatgatgaagatggtgatgatgacaacacggtagaaatggaaaaatc

SEQ ID NO: 3420 - DNA, 1600 bp, mus musculus
tgctggaatattcaaggaaacagacaaacagacacacgtcagacaccacatcatgatactgtagacaaagtgtcaccaggcatatcttttatctctgactttacaaaaataaaaaccagtaagtagctgtttttggttaaagagcctttggtaatttactacttagccatcataattaccattagaaaggatatggaaaatgtggttcatttacacaatggaatactactcagctattaataatgaggacatcctcagttttttaagcaaatgggtagaaagaatggaaacagacaaccacaggaggtagaaggggggccttccagaatgtaccagagtcctgggaggggagagactctcaggaatcaaaggcagggaccctagatgaaatgccctatagtagagaaagggaatttatagagtctacctccagcaggaagacaaggcaccaagtgaggaaggaggttgctatctcacagtcaaaactctgacctataatgttcctgactgaaataactgcagggatggaaatagagaggagcctgaggaaaagaaggtccagggacaggcccaaagtagaatccagctcaagggaaggtcccaaggcctgacactattactgaagctatggagtgctcacaaaaagagacctatcatgtatgccctccgaaagacccaacaagcagctgaaagagtcagatgcagatatttgcacccaaccaataaccagaagctgctgaccgacccctatgcttgatttagagaaaggctggaaaaagctgaggagggtgaccctgtaggaggaccagcagtctcagttcacatggaccccagagatctctcaaacactgaaccaccaaccaggcagcatacactaactgatatgaggtcccaatacatatacagcagaggactgctaggtctgggttcagtcagaaaagatgcacttaactctcaaaagactggaggctacaggaagtttagaggtctagttgtatgtgtggtggttggtgaggacatccacgtggagacagggggctagggaggaggtatgggatgtggaacagtaggagtgtagggcagggagagggaaatacaatctggggtgtaaaaaagtatgtgagtaagtaagtaagtaaagtaaataaataaatagataaagattttttttaaaaaaagagagaattttagcaaataatgaagagattgcaagtcaagactaggaagttaacatggctaattttattatatatgcaaatgggacttttaaataataaaaaataaagtaaaatttgataaaaaaataatgatgagcaaaatatctacaggtactactctgtcataaagatgttttcatggtttacttttccaatattggaaattaagcataacatgtttcaagtgctaggcaaggaattcccaaacttcctttgccttttatttaaaacaggttctcactaaactttctaagtttgtcttaaacgtgtgattctcttgtcccatcctcctaagtagttgaggttattgatcccagctacctgaattaccaggcttaaaacaaaataacgttttaaagagaattactttcattattttctgt

SEQ ID NO: 3421 - DNA, 1200 bp, mus musculus
ttccctttctgactttctgtcatattcaggccactggatggatcccaagtcccaatctataaaacaacaaatgtacattccatatcatctatcagatacctgtgagagagtgctacaaaggaaagttacagttactaacactgttcacctctgcagcatgtgtgttctcattgaagtataggctgtgttctttaaggatgattcactgtgctgagaaatctgtctagtgacattaaagaagaaaataatacaccatcgtgcctccaaccatgtgggagattcattttccatttaaaatttcattctctaagaagaaacatgtgtgatggtacatcggtagcttccagaaagttatgaatagagtatatcctttagtataatggatcttatcctctcattataaagagagcattctacatcacaagcaaagcaaaaaaaaaaaaaatacaaggaaagccttggggattcaggataaattaataagtatctagttgattaaccagtgtttcctcacgttctcaatttaaacagatttttctttaactaaatgtcctctttttttctttttttttattagatattttcttcatttatatttcaaatactatcctgaaagcccccataccctcacctcgccctgctctccaatgtacccactcctgcttcctggccctggcattcccctatactggggcttatgatcttcgcaagaccaaggacctctctttccactgatggctgactaggccatcctctgctgcatatgcaactagagacacagctggggggggggcggggttactggttagttcatattgttgttgctcctataggattgtagatccctttagctccttgggtactttctctagctccttcattaggggccctgtgctccatccaatacatgactgtgagaatctacttctgtatttgtcaggcactggcacagcctcacaagacatagctatatcagggtcctgtcagcaaaatctttctggcatatgcaatagtgtctgggttttggtggttgcttataggtgaggccatatacattttgtgtgcagatgttttatcccatttaacacagtggatggaatgacaaagtggaatattcggtggaatatataaatataaaccttcacagaaggcacaggttggttgttaaatggtaactaaaagacagtattactccatcag

SEQ ID NO: 3422 - DNA, 1400 bp, mus musculus
tactagcattatatcatgccaatggggaaaaacttatgaattttctgtcatgatgtgaggaggactaaatattccctagagcagttgtttgcaggaaggaagaattgaaattggatgcttatgcctgtgccatcaaggactagtggaaagaaaataccctcttctgaatgtttcttaccaataattcctttgagtgactctagtaaaataaacataaataaatagaaagccacaacacaacaatgttttagaaactctgtgaacatgatcactctaaagatttttgaccagaatttggttgttggctattttcaacaacattggtatttttcaatagaccttttaagagcaatataaaaattgcaattactaaggatgcaatgagtaagccagtgaaattctggctatgttaggagttctgtaaaatgttctttttttcttggtataatttctatttccttatacataatctatcacgttttatcctggctatgtaactgtctttcccccagtgggactgatacacctcattgttcaattttgatagctacattgaaagctcctttgtctcctgccaactggctcagatgtacacctgtccctctgtcactctcactgccctctcagcttgtgatagcccaactcaagctatctagacagtggatgattaggtagcctgctgtcctctaatcctcacttgtgtccaggtcagtgcagttatgaagcaacaaatgatccttcacagctctaatgttggctgtgtcccagaatgctgctgttattggttttatcctgccacttaatacatcaaatatgatttaaagttgacattgacaaaacagcttaagaagcttttatgtggttacactcatgactgacaatagttatcagaactactatgtcctggtaaaaatgagaagcagacagtgattcttttgaaacttggattttatcttatcttttcttgttccagaagaaaacagtgtcaaacccaaagttatcagtatctacgctcactgaagatgaagcttgcattatgaaggtataaataagttgaatgtatcatggacaaatggtagaatggactaaatgatttatactgtaatgtaaaaatgaaaacaaaagtatgaagcgtagatatagttttagaagagtatagaatgcttatgaaagaattgagtagagaagaaatagatatcctaatacatatgctacaatgcaattgtaggcaattcatttgtgtacaataaattatatatagtaatgtggacatctctaaagcgtaatagactggtagggaagcatgtctaaatgataacccaattagtgaattaggaagtgtgaattatagaaaaaagaaaacatttttacaaagtatgacaataggtagatagatatat

SEQ ID NO: 3423 - DNA, 1400 bp, mus musculus
tatagaatacagaaattgcagctttgtacttaaaacgtacaacatataatcatcttagacctaaattacctcactccctaaaattatttcgttctttgttgcacaaaacaaaaaaatatattattcaaaattagtctcttccaggaatatatatttttaaattaacttactctattgagtgtctttattttagtatatccaatttagatgtagattttagataagacaaaaatcattatttgactttttattttatcaaactcaccctaaaagtacctcaaactatatctagaatttagcgaataaatataatccacccaaattaataggaaaatgctgttgtctttggcttaagacgaggtttttgtgcgcctttctcacttatggttatatcctaatgaaggttctgatgcttcaatagggaatgtgcatgtgaacactgaaggtcctgctccctaattagtacttgattgatcaataaagatgcgagtggctaaaggttgggtggaagatgtgggacttccaggttcctgcaggcagggtaggagaatcaggagaaaggaggggttttaccttgctttggagggaaagagagtcaccagtcatgtgagatctcaggtggagtggccattggacacttccccagacagaatattagaaatgcaactaagctcagggcagatgtagggtattgagaaaggaaaagggaaaatgcacactagatgctggaggcttcgaagagcccagccactaaatcataaggcaggttaaaaatgagctatatatgtgtgtcttccatctgtggatgaaagggaactagggtgatggctggtagcaaggtccatgcagaccttagagcagggagagtagaaactatatgctacatcgtaaaaatgaattaaaacttaaattgcttagtattaaaaaatctaaaaatggggacttattctcactctaattaattataataaaataataagaatggtcactactcagagtggggtggatgcatgctataaagaccagagttctactaatgagttactgcccactcactaacagagctctgatttttcctataacatgaatttgaacattagaagctcttgatgatccatcttcaatagccttttacatgaatttttcttcatgattctttcccctgatagtgtcgcacactgaagtacctgcaattcctaacaacctggattccttgggcatccttaaatacgcatgacaccttgtagctttttttccatttgagatacttttactttagtccactagtaaggaagaaatcagatttgcagaatctcctttgccctccccaaggagctgtaagtttctctcaggagccaccatacatacttgtttttcttgccattctcttagcttgttgg

SEQ ID NO: 3424 - DNA, 1000 bp, mus musculus
agtcatctataggatggaacacagtgcccccaatggaggagttagagaaagtacccaaggagctaaagaggtctgcaaccctataggtggaacaacattatgaaataacccccagagctcgtgtctctatctgcatatgtagcaaaagatggcctagtcgcccatcactgggaagagaggccccttggtcttgccaactttatatgccccagtacaggggaaaccagggccaaaaagtgggagtgagtaggtaggggagcagagtggggggagggtataggggacttttgggatagcatttgaaatctaaatgaagaaaatatctaaaaaaaaaaatttaaaagaatgataaagtttcttgttttagggaaagtaggtgaatattgagattaggtttcactttgtctcacagactagccttgaacttgctatgtaggtcaggctggcctcaaagtactggtaatcttaccaatgcacatgcttgaatatagcaaagatgtattaccatgcctaggtataaagcttatttttaaaatttatttatttattttacactcagattttattcctcccccacaaccaccctctgactcttccacctcccatcccacctccccactcatctgtctccaggaggacgtcccaaaccccaaaccccactctacctgacctctaaactccctggggctttcagtcactagagggttaggtgcatcatctctgattgaacacagacccagcagtcctctgctgtatatgtgttgggggcctcatataaactggtatcctgtttagtggtccagggttgagagatcttgggggtccagattagctgagactgctggtcctcctacagggttgccctcctcctcagcttctttcagactttcaccaattcaaccacagggggcagaagcttctgtccattggttgggtgcaaatatctgcatgtgactcttttatctgcttgttgggttttccagagaatttgaatcgtttt

SEQ ID NO: 3425 - DNA, 1600 bp, mus musculus
acgagactgctgtagaaaaccaccttttagtcaaagttatttaaatataataacataatattcatactatctctatcttttaatacattgttcaatcttctgatgcttattttataaatacagagaaaatatatgttattaggctgttatttttctggatgtgtaaaacaagtgttgatatgtggctcaaaatgtctttcagtctcttcacagactgattaataataataacagtaataactaataactaactaacaaacaacaaaattaaactaataaaagaaaacatgccacaaaagaaaagaagaacttgcaatgtgctcgaggaaagaatgtgctgaagtcagccacagaggctgctgctcttaccagtgctgtcgtcatacacaactgtgacagttttccacttaaaaaactgcaccaaatccaagatggcacggctgagggaagagaagtctgggtagagactgacatagaaggaatccttattgtctgacacctggtgcttccagcgggtctgtatgtgaggaacccccagagcattgcagatggactgaacagcatttgctgatgaactgtgtgaaggaccgaagatggcagccaccccaagagacagctgatcacaagctgaaagggaaaaagaagtctgtcaataaagagaaggaaggagggcacgcgttgctactaaaccccagaaatgtcttcctgggaaagattcaatctcaaaaatattaacccagaattgctcctgtgtaaaggaaatgcagggacaaagagtggagcagacattgaaggaaaggccatccagagactgccctacctatgaatccatcccatctgttgacaccaaacccagatactattgctgatgccaagaagtgcttgctgacaggagcctggtataggtgtctcctgagaggctctgacagagcctaaccaatacagatgtggatgcacaaagccaaccattgaactgactacagggaccccactggaggtgtcaggagtaggactgaaggtgctcaagggagaacaatatcagaacccccagagctcccagggactaaaccaccaaccaaaggaaacacatggaaggacacatggctccagctgcatatgtagcagaaaatggccttatctgacctcaatgggaggagtggcccttggttctgtggaggctccatgcccctgcataggggaatgctagggcaatgagggagaagtggttggttgagtgagtagggaagcaccctcatagaagaagggggatagactaggagatttgtgcaggggataccaggaaagggagtaacattgaattttaaataaaataaccaataaaaataaatgaataataaaagaatttccttctttagtaaaatctgcatttcatatttcttcattccctttgctccctctaaactgtatctcatgttccttttttgttgcttgctttcaaatgcatggcctctttttctttaactgttggtctgtatgtttgtatgtatttctaaatacataaatagaacctgctttgtctatagaatgttgcttgtatgtatgtttgctaggctgaccatgcaacataggataacatgtt

SEQ ID NO: 3426 - DNA, 1000 bp, mus musculus
taatttaattttgacctaggtgaattattattattattattattattattattattttattttttcgatttttattagatattttcttcatttacattccaaatgctatcctgaaagccccctcttccctccccctgctctgctcccttacccacccactcccacttcttggccctggtgttgccctgtactagggcatataaagtttgcaagactaaggggcctctctttccatcgatggtcgactaggccatcttctgctacatatgaagctagaggcacaagctctgggggtactggttagttcacattgctgttccacctatacggtggcagacccctttagctccttgggttctttctctagctcctccattgggggccttgtgttccatccaatagatgactgtgagcatccacttctgtatttgccaggcaatggcagggcctcacaagagagagctatatcagggtcctgtcagcaaagtcgttctggcatacgcaatagtgtctgggtttggtggttgtatgtgggatggattccccgggttcagagctaagaaggaaaggccatctagagaatagttttatttttaacagcaaggtaagcttagtcttactaaagaggacaaagcttttgtttttttatttatttatttttttatttcttaaagacttgggcttaattcatttaccagtaaaaggatagaggccttttcttttactatgtaataaaaattatagcacatttttcatcaagaatgaatgagtcctttctgcaccggcactagggtttttgtccatatgcatatgtaagtatggatatgtgtgtgtgtgtgtgtgtgtgtgtgtatttatgtaaatatgagctaagtagttgagcctaactagaatgcatagaaggtgtatgaatatttatgcatgagtttgtatatgaatgtatgtgagtttatgctatttgcttgtgtaaaagtttttctttctgtgagtgactctcttc

SEQ ID NO: 3427 - DNA, 1000 bp, mus musculus
gtgtccttgagttcactggtgagttctctctccttacatgagctttaacctaacttaggaggctagacccttacaatcacacaaaacttccactgaatcagtggccccaaagaatgaaatcaacagaccacaaatactgaattttccaaaggcatcttatggattcatgggtgagaagagaaagggagaaggtaaagttcctgcagagcaagagtagggagggttcttagaaatgagacactgtcaaggggcgctgccttgtagtgaatatggctttactggaggtatggggaacagatgagtcattggtccaattggcctaatacaaggtactcaagtgcctctcagattcagtcatatcctcaagaataacttatagaaaggcgctgtcatttgggggaaatgaagcatggaaaaaccagaccttctttctggtatttataatctctggagagaataaaactactaagaaagtctaggacattcccagcgtcttagccaaggaaaaactgtttacaaccagggtctctcttataaactgcctgacaagtttctgtctcccagcctcataaataagagataaggcagcaagtaatactaatgtgggttttttatagtaaatctcctaaaggcacagtcagttcttgagcagaagctacacaatagtggggttctttgctctaagaaatgtttaaatgataggatttaaaatcttacaatgatataaattacgaatggaaaagtaacaatattgcattaagaggcaagcctctttgctgacaaacaatgtgcattctcaatatgaaataaagattattatatgtcaagggccatgcaggaggaacaacaaatgataggttatgggcctgcgaccactttgcagtggtcaaccaccacagtgacctggggaggccggactaacatcataacagaatttgttaagttaggaattgtcagtgaattctagaattattagattaaagatttagaagcccgtatt

SEQ ID NO: 3428 - DNA, 1200 bp, mus musculus
ttggcttttggggtttttttttcagtcattttatttatttacatttcaaatgttgacccccttcccggtttcccctccagagtccctcatcccattctcccttccctctgcttctatgaagatgtttccccacccactcacccctcaccaccctagcatccccttacactgagccccctagcctccacaggaccattgagataaggcagtcctctgctacctatgcagctggaaccatgggtccctccatgtgtactctgattggtggtttactccctgggagccctggggggtctggttagttaatattattcttcctatggggttgcaatctcttccactccttcagtccttcccctaactcttccattggggaccccatgctcagtcagatggttggctttgagcatctgcatctgtattggtcaggatctggcagagcctctcagcggacagccataccaggcccctgtcagcaagcatcagtaatagtgtgtgggtttgctgtctgcagatgggatggatccctaggtggagcagtctctggatggcctttgcttctttagtctctgctccactctttgtccctgcatttcctttagacaggaacaattctgagttaaaatttttgagatgactgggtggccccaatccctcaaccaggggccatgcctatccactggatatgttctctacaggttctatctcctctttgttgggtatttcaactaatgtcattccctttcagtcctgggaaccccttgcttccctagcatctgggactttccagtggctccctccaagttccccatcccccactgctacacacctctgttcaatttcctgaccctctctgtacttctcccaccaccacccccatctcccccttgcctgatcctgccccctccttccctctaactcctctctctccctcctaggtacctctctccctctatctccctgattattccagcttctaagtaggactgaaacatccacacttcgattttcttcttgagggaagcttgcatttggatctggtattgctattcaacactactttaactgttcatgaaggtattcagtccagatcaaaacattcaaagcaaagacttcctaacattgtcctctctaagaatcaaggtttccagcctgccttaattggctcacatatatatgggatcatcagagagcatttgc

SEQ ID NO: 3429 - DNA, 1200 bp, mus musculus
gagtggtcttgatttctgatagtaggattcttacgtttgccttttgccatcccgtaatctctggagctagttgttatagttgtctttgattagagcttgttcctcaggtgattttgttagcctctatcagcagacctgggagactagctctctcctctgagtttaagtggtcagagcactctctgcaggcaagctctccacttacatgaaatgtgcacagatatctggccttagggcctccctcctggccgaagaagaaggcccaaaacaggacctgtccggaaagctgagttgctttggcctctcctagacgcgtttagcttctgttctgtactctcacctgtgcagaatacactcagctgggtcccagaaccaagatgtcggctcccaatgctcaggcaaagtgcttccgggccatgtggacccctttcctctagccaggaaagtggccggatgtctggtacctgtgcagaatacactcggcagggtcctggaatcaagatgtctgcttccgatgctcaggcaaagtgctcccgggctgggcagacccccatcctctggctgggaaagtggccagctgtctggggcccgaaaagggggctaccttagaagctctgtggctcccgcctgtcctagaagctttaagcttctgtattccgtactctcacctgtgcagaatactctcggctgggtcccggaaccaagatgtctgctgctgatgctcaggcaaagtgctcccgggtcacgtggacccctttcctctggccggaaaagtagccggatgtctggtgcctgtgcagagtacactgggcgggttcccggaaccaagatctctgctgctgatgctcaggcaaagcgctcccgcgccgggcggacccctttcctcaatattctgatttttattttattttaactgaactgctcttagctctgattgggcagccctcagggccacactctcctctctcttaacctatggtcgctcccatttctcctcttctgctcatccttattcttctcctggttctcttctctctaagcctgcaacacataaaaccccatctatgtctcttttgcccagctattggctattggaatttttatttaccaatcacaattaaataaagacagggtcacttaactagtgtctacatgtagactcgctcatctctgggacagccagtcttgtgggctccaaat

SEQ ID NO: 3430 - DNA, 1400 bp, mus musculus
aaagtagactgaaaaaaaattctatgcatccatgtaacctaagagtgctctagaaaataacagaaaccaatttgtattcatttttctaatattacttgtagatgtgtaggtccaataacatcagagaaacatgaatgcactaaactgtttcactaattgatattctcaacccatgagtgaggtttatcttctaagaaaattttataaatgttatctgcagttaaaacccattgattacatatgaatctaatatacatctgaattctagtacaaatgccaatattctgtcatataggcctatttctatttccaattttgcattaaaatgaaagacataagatttctttttctatgaaagaaatatacttgtgtgtgtgaattttgaaaccacttactttttactttttgtgatgtaggtcgaggtcactgggatgaagatagtgtggtcagctctccagaccctgggtcagccagtgaatctggtgaccgataccgcaccgaacagtatcaaaatagcccacatgaacctagcaaaattgaaactctcataagagccacccagcagatgattaaagaggaagagaacagattacagctaaggaaagcccctccagaccaactggcttccattaatggagctgggaaaaaacactccctctgttttgcaaactatcaacagcccccacccacaggtgaggtctgccacagctctgctcttgccagcacttcaccatgtgaccatatccagcagagagagggaaagatgctcagccctcatgaaaatgactatgacaacagccccactgcactgtctcggataagtagtcctagttctgatcgcattacaaagtctagtttaatcctggctaaagactatctacattcagatatgtctccccatcagacagcaggagaccatcctgccatctctccaaactgttttggctcccaccggcagtattttgataagcatgcctatacattgactggttatgccctggaacacttatatgacagtgagactattagaaactattccttgggctgcaatggctcacactttgatgtgacttcccatctaaggatgcaaccagacccagcacaaggacacaagggaacatctgttataataaccaatggaagttgatgtttttctaaaatattttgttcttcaagggtctctgaaacatatttatagtctaataccccattagcaacatttactatgccacagattgttagaaagtctaagttaaattttagagttatttgatgagttcctgtgaaatcaaagaaaacatagcaccgacattcaaggttatacacaggtaaatgagctaaaatgtatacagaaattgcccacatattatagaggaactataaccgatacatttaatttg

SEQ ID NO: 3431 - DNA, 1000 bp, mus musculus
gtgctctcaccaggaaggtggccggctatctggagctgaagatggcgccgcccagaagctctgcgactctcgcccgtcccagaaacggctggcactctgtattccacacggtcacctgccctccgcggagtcccggagccaagaaggctcccgccggcgcctgtgccacaaacctctcaggccaggcagacccccgtgctccccactgtatctcttttaaagcagctatcacatgacatggagcttttaaaattatttccaaaaacaatttcacactgtgcctagttgataatgatatatatatctaagaacttagtgaaactcttagcaaacctataactattcaaagactaacaatacacctgagactattagaaaaagtagaggagaattttttaccttattgatgtatggacgatttttcccccctcaggaagaagtgagacttagaaataataagagggcctgagcatctgcgggagacatcttggatcccggactccactgagactactctgcacagaggataggtgtctgcccggcccgggagggctttgcctgagcatctgcaggagacatcttggttcccggactccactgagactactctgcacaggtgagagtgtggactacagagggtaacagcttctgggacagacaggagccccagagcttctgaggcagcccacttttcaggctccaaacatccaggcaccttccctgccagaggataggtgtctgcctggcccaggagggctttgcctgatcatctgcaggagacatcttggatcttggactccaccaagacgactctgcacaggtgagagtgtggactacagatgctaactaacagcttctgggataggtcctgtttcaggccttcatcttctgccaggaggcaagtctgaacgccaaatatctgtccaccttccctgaaagaggagagcctgtcttcagagagttctctgatcactgatactcaggagagagctagtctccc

SEQ ID NO: 3432 - DNA, 1400 bp, mus musculus
gtatatatacacacacatatatgtatatgtatatatatacacacacacatatatatatgtgtatatgtatatgtgtatatgtatatgtgtatgtgtatgtgtatgtgtatgtgtatgtgtatgtgtatgtgtatgtgtatgtgtatgtgtatatgtatatatacacacacacatatatgtatatgtatatgtgtatatgtatatgtatatgtgtatgtgtatgtgtatatgtatatatacacacacacatatatgtgtgtatatatacatacacacacacacacacacacacgtgtgtgtgtgtgtgtgtgcgtcacaaattgcttatcacatctataattgggctgcctgacatcgttgggtcttaaaaatagtgttctaggccatcttccttctgtgcccagtggaggccgctaagggctccaaagtgctctccacacctcagaacctcaggatcatcttgggatcaggggtgagtggaacacaacttcagctccaaagaatcgtggagggtcttgtgccagcaggaacaggaacagaggaaccctgcctgacaagaggctgggatcagttccggttggggccacccccacccctgcacccctgccatcttccttctgagcccagtggaggctgttaagcgttcgagagtactctcctcactgcaggacctcggaatcacctcaggagcatggattggggccagtcccaccatcttctgcttgaaccctgctgagggcaattagggcaccagaggactctccacgtcacaggacccctagcacatccaggacctcctgatcacctgagagcatgtgcgtgatagaagcaacagagcttcttgatcacagtcccctcaggccttcatcctcaccaggaggcgaagctgagactcagactccttggcacattccttgccagaggagagtctcggcctagagggagggttctgaccccagaactcaggaggtagatcagagctccagactgctggacacctgccctgcaagaggagagcttgcctgcagagagtgctctgaccacttgaactcaggtgagagttggactcccaggagtgctgacagaggctaacagaaatataggaggatcaagcaccaaccagagacagcttgattattaacaccagagatttccagatggtgaaaggcaaacctaagaatcttactaacagaaaccaagaacactggatattatcagaacccagtacacccccacaatgagtcctggataccccagcacacccaaaaagcaagatgcggatttaaaatcagatttcatgatggtggtagaagatttaaagaagggcattaataactcactaaagaaatacaggagaacagtgctaaagaggtagaagccctaaaataggaagcacaaaa

SEQ ID NO: 3433 - DNA, 1200 bp, mus musculus
gaagctgtagtatctttcaaatcacacatgttcttcacactatcccatccatttctttttttttttttcaggatttcttattttttattaaatattttctttgtttacatttcaaatgttaccccctttcctattttccccttcgaaaacaccctatcccctcccctcttcccctgctcaccaacccacacactcctgtttcctggccttggcattcccctacactagagcttatagccttcataggaccaagggctctcctcccattgatgaccaacaaggccatcctctaggccatcctctgctacacatgcagttggagcccaccatgtgtattctttgattggtggtttagtccctgggagctttgggggtactggttagttcatattgttgttctttttatgaggctttaaaccccttcagctccttgggtactttctctagttccttcaatggggacccagtgctcagtccaatggatggttgtgagcatccacctctgtatttgtcaggcactggcagagcatctcaggagacaactatatcaggctcctgtcagcaagcacttgttggcatccacaatagtgtctgggtttggcgattgtatatgggatgaatcccctggtggggcagtctctggatggtcattccttcaatctctgttccacactttgtcccttaaccccgttccatgggtattttgttcccccttctaagaaggatcaaagatctttgatcttccttcttcttgagtttcatgtggtttgtgaatcgtatcttgggtattccaagcttctaattaccacaatacttgcttattattttaaccaatcattttctttttttttttttttttatgtcaccatttattttattttttttttattttttttccattttttattaggtatttaactcatttacatttccaatgctataccaaaagtcccccatatccacccacccccactcccctgcccacccactccccctttttggccctggtattcccctgtactggggcatataaagtttgcaagtccaatgggcctctctttccagtgatggccgactaggccatcttttgatatatatgcagctagagtcaagagctccggggtactggttagctcataatgttgttccacctatagggttgcagatccctttagctccttggctactttctctagctcc

SEQ ID NO: 3434 - DNA, 1600 bp, mus musculus
attacacaaattaagcaactgtttaaacatccctcagatagtacattatttctaactataacaagcctctgatgtccctgtccctcagtcagagacctacaattagttcaatgtatttattgttctttctgaaactattttcctacaaaagggtctttatgagaaattcagaatatggctaatgaaaattcagtaaacaaaaaaaagtataaaacaaacagcaccatattgaaatgtgtaagatgaacaagtttacttatttcacagtactgccttactcaaaaaggcatagacagtgactttgactcacaacttcttccctgaaagaaaagagaagaaagtatgtacataacacgtaaggcctggtggagtctttcctgtactgctttacacatagtggtaatgggatcagcataagttaacatttgagactagctcagaacaaaatgatgaagtaggtggcttaatatagctagaatagttctgcaagattaatagaagtcacacaaacattagggagctcagtggtacatgcattacatcttctgttctgtgaatgtactacctttgcaaacagagagggcaacttactataaccagcatgattctaaaagatagattaaagtaagccttggaccagctgcctggttggtgcttcagtgtctcagagctcccaggggttaaagttagttgagacaactgcttgtcttcctatagggtcatcttcttccatcattcccataatgcaaccatagggatccccaacttcagtccaatggttgggtgtaccctattggggacagggggaggagaaatgggataaggaactatgggagcagcactggaaggggggcaacagatacttgaagatcttatcatacagatctttgacttccttagttagagtcacacccagatattttatattatctgtgactattgtgaagggtgttgtttccctaatttctttctcagcctgtttattctgtgtatagagaaaggccactgatttgtttgagttaattatatatccagctactgcactgaagctgtttatcaggtttaggacttccctggtagaatgtttagggtcacttatatatactatcatatcatctgcaaatagtgatattttgacttcctttccagtttgtatccccttgatctccttttattgtctaattgctctggctaggatttcaaatactatattgactaggtagggagaaagtaggcagccttgtctagtctctgattttagtgggattgttttcagcttttctccatttagtttgatgttggctactggtttgctgtacattgcttttatcatgtttaggtatgggccttgaattcctgatctttccaaaacttttatcatgaatgggtgttgaatcttgtcaaatgctttctccccatctaaggagatgatcatgtggtttttgtctttgagtttgtttatatagtggattctgttgatggatttccatatagtaatccatccctgcatccctagaataaaacctacttgatcatgatggatgatcatcttgacgtgttcttggattcggtttgcaagaattttattgagtatttttgc

SEQ ID NO: 3435 - DNA, 1200 bp, mus musculus
gagagaaagaaaaagaaagaaagaaagaaagaaagaaagaaagaaagaaagaaagaaagaaagaaagaaagagagaggggggagggagggagagagacagagagagagagagagagagagagagagagagagagagagagagagagagagagagaagaaaatcagccaggctagaaacccaagtcatcatgagggcttctagtagccacccagtaagcctcaggcttactgtggaaagtgttctacctggatccagggattttgaacagatgcaagagcctggaagtgggggtggaggggagccagagcagctttcttgggaaaggtcacccaaagggttgatgtcttaactcgtatgtcagatggaggcgtgactataaaatgtcaacaaccccttagcccccagaaaaggctggccagccctatctgggaaattagaggccctccagcagaccgaccctaccaattaatatgctggcgtctgtgtgagaattttagccaactggtaaatagaagtgtggaactgagtgggcttggtgtggggccaggcagaagccaggcctgcaagatggaccaggatggcacagctcacgtggttgaagttcgtatgtccagtagtagcggcagtaggtcacatgatggaagctgtgatgttggcagcagcgttcagccaggtgtcgagagttctggcccagtccactgatggggtgtaaccactctgagcagtgatgtacctatgacagccgctgccacaggctgcggggtgctggaccatgtatccacggtcttagcctccattggggtccccactgcagctgttggcattaccagctaagtttccaggttttcggcaccaaaatgatatgttataatggcaggtcgagtctcaacagcacactaagccaagatggttccacttggaagaggttttattgggtgagagagaggtggcaacagaaagagaagagagggagagagggggattctccttatttacatggaaaatgcaggtaaaggtgggaggtgagccaagtggaagctgggaatatggtgcctgttgccttggcaaccagtctgcatgttgttggtcgcactgtcacttatgtgatgacataggtttgggaggtcttgatgccaacaccatcaaccaggcagcatacaccagctgataagaggctcccaacacatacaaaacagagg

SEQ ID NO: 3436 - DNA, 1200 bp, mus musculus
aggtgtggtcttgttggaagaagtgggtcaccgtgggcatgggctttaagacccttgtccaagctgcctggaagccaatcttctcctactttccttcagacaaagacataaaactcaacttctccagatccatgcctgcatggatgctgccatgcttccactgtgatggtaatgtactgaacctcagatcctgtaagctagccctaactaaatgttgtctttataagagttgctgtgctggcagaacctcccagagaacagccacactaggttcctgtcagcaagtacctcttggcattagcaatagtgtaagggtttggtgtttgcagacaggatggatctccaggtggggccgtccctggatggctcttccttcagtctgctccattttttgctcctgtctttcctttggacaggaacatttctgaattagaaattttgaaatgggtgggtggccctatccctcaatggggggctgtgcctatttactggagatggtttctacaggttctctcttcccttggctgcacatttcagctaaagtcatcactgttgactcctgggagcctcttgcttccctggcatctgtgaccttccagtgcctacccctagttcctcatctcctactgctacacatttttatacaatttcctgaccctctgtacctctctcccattccctccagttcctgatcctgctctccttttttcctccccctcctctgtttctccgaggtcctcctccctccctccacctcctgcacctgaacaatgcagatgcagatgcttggagccaactgtcagactgaggttgaggactgtggtaggggatctggctggaggactgaaggagcagagggggattgcaaccccataggaagaacaatgtcagctggccagaccatccagtgctcccagggactagactaccaaccaaagagtgtacagggagggatccatagctccagatacatatgtagcagaggatgaccttgtctgacatcaatgggaagggtgattctttatcctgtgtaggtttgatgccccagcatagggggctactgaagagatggggcggggtgggaatgagcaggtaggtgggagagcacactcaatagaggaaaggggaggggcgagagggcagatgtgggatgggggattgtggaggggtaacagggaagggggatatcatttgagatgt

SEQ ID NO: 3437 - DNA, 1600 bp, mus musculus
tagaacatactgttaggtgctgagaagaaagtatattcttttgttctaggttgaaatgttctgtacatatctgttaaatccatttggttcaaaacctcttttagtttcactgtgtctctgtttagtttgtgtttccatgatttgtccattggtgagagtgggctattgaaatctcccattattattgtgtaaggatcaatgtggtttttgagttttagtaatgtttcttttacaaatatcggagccccaaaatttggtgcataaatgttcagatttgagagttcaccctgatagattttcacattaatgcatatgaagtgtctgtccctaactcttgataacttttggttgaaagtctattttattggatattacaacagctactccaccttgtttcttgggaccatttgcttggatttttttttccatccttgaagtctgacattgtatctgtctttatcactgacatgtgtttcctctatgcaacgaaattctgggtcctgtttacttatccagtctgttagcccatgtctgtttattgtggaattgagtctgttgatgttacaagaaattaaaaggagtgctctgatttcaggattcaggtgagattgccattttatttccagtgtctctgtaaggtgggtccactcaggagagctcaggccacagaagcaacagagcttctaggacacagtcctactactacaggccttcatcctcagccaggaagtagagctgatcctcagtcctctgtgcactagtcttgccaggagagagctggtctcccaggagtgctgacacaagcttacagactcacaggaggaacaagctccagccagagacaggtagaacatctaacaccagagattatcacatgacgaaatacaaatgtaaaaatcttaccaacagatatcaagactacttgtcatcatcagaacccagtactcccaccacagcaagtgcaggataacccaacacaccagaaatgcaagatttggattgaaaaatcataactcatgatgctggtaggggcttttaagaaggacattaataactccattaaagaaatacaggagaacacggttaaacaggtagaagtccttgaaaaggaaccacaaaataccttaaagaattacaggaaaacacaactaagtaggtgaagaaattgaacaaaatatccaggatctaaaaatggaagtagaaacaataaagaaatgtagtctcccctcccccagcctgaaacctgcttgctcagggtggagcttcctgctcattcgttctgccacgcccactgctggaacctgaggagccacacacatgcacctttctactggacccgagattattcggcgggaatcgggtcccctcccccttccttcataactagtgtcccaacaataaaatttgagctttgatcagaatgaatttgtcttaattccgtttcttctttcgccccgtctagattcctctcttacagctcgagtagccttctcagtcaaaccgttcatgttgcgagctgctggcggccgcaacaaagaaatcacaaagggagacaactctggagatagaaatcctaggaaagaaatcagaagccatacat

SEQ ID NO: 3438 - DNA, 3200 bp, mus musculus
cgaatatccataagaggtactcagagaaccttgtgcaaacccatgtaggctctttgcgtcttttccaactcactgaacccatacaagccctgcttgattgatgcactgggccagttctcatgtcattgaccactctgatttctgcagtctttcctcccaacttcctagggttccttgaatcctgagagaagggtaccaatggaaaccttcaatttgaactctctgcatgatgtctggttgtgggtctctgcatgctaccatcttctccaagaggaaacctctctgatgatgactagacacagcacagatgtacaagtatagcagaatatctttatgaattatttcattgatttttatttcagttgtgtttggttgtaccctaggtctctgagctatccagtttccagttactggacatctaggtatctgagggcatgagctctcttttgtgggtgggcctcaaattaaaccagacattgatcactcccacgagttctgcatcaccaatgcctcagcatatcttgcaggctggacacattgtaggtagaaggtttttgtggctctgctgatgtctgggtttctctttctgtaccctgcaggctgccttcccacatcaaagaagctagaacatggggtaaaggctccaagacagcaccagcttgacttctccattttcaataagctgtatggatgttgtccttggcaatgggtccagctgtcagtcttcagagagcaacctgttgttctagcatcagcctgggttatttagggacctctttagctaaaatctcaacagtcccttgactggaagccttttctagctacaaatggccagttcagactctgtatctcccattactaggagatctcaggagattcaccttcatggattgcaggaagtttccatcccactaggttcccacaacccccatccaaatgctcccagttccagtcactctctccatcctctccccatctatccatctcccacacctgatactttctgtgcactagcggaatctattctacgtcctcttccaaaggagatctatgtgtctctgtagaacccttctctttacctaacttctctgtgtatatggactgtagcttgattatcatttacttaacagctcgtatctacttctaagtgagtacataccatatttgtctttctgggtctgggttaccccactcaagattattttttctagttccatccatctgactacgaatttcattatgccattttgaaaaacagttgtgtaatacttcattgtgtacattactacattttctttatctattcttctactgaggtacatctaagttgcttctagtttctggctattatgaataaaaaacacaatgaacatagttcagcaagtgtagttgtaggatgcagtgtccttttggtatattcctgaatggtatagctgagtattgaggtagatcatttaaaaaattaaacttcatttatctgtcattaatttttcctaaatcaggtataattagacagctttttcctctttgttctaaatataccaaaataatcatttacaatgcaaaaaataattcatggatttgaatgctgccaaataatcttgtgtcagcaggagaattattaataagtataaaaataaatctgatttcatcacatcttaactttttttagaatgttaatagactttgattaaataagcaagctgcttaataatcttttagctttttaaaatgcattgactattaaatctgaagggaaatggtttttccataaatggataaaaatgaaattctcagaatatgctaggtatgaagataacaactttgtttatgtctctttctctcccatttcttcacacatatacatacatggatgcatatgcacaaatacaaataccagcttaatctagtttttataattactggatactcattttccttgctactccaatcagtttgattgcatttgttttaccctcatttttctttgtgtagaaatattattgatttcacagctgttccaaaatttcatcacaaaagcaaaacattcaccaaaaagcatgagctgagatttgatgttggtcattcttttagtttgtcttgcagctacaatggtttaagtgaatacacaaatatacaaatacacaaatacctgagttgatatggacaccgcagactgggatgagaagtgacctaaaccttgttccccttttctattaagtcacattcctaattttcataagaatttcaaagatgatttcttggtctacttttgttgctatgatagaataatggaaaatgagaacatatgagtacagaatgattagattgctgtactagagactgagaaattcagtatcaatgagtgaagacaagcacgagtgggagataggtcacctcctctccccccacactggataatgtctttgatctcaccagtgatggtagagcactggtggcctaattacctcttaatgacccttgatctctacatactcttgcaacagcaattaaacatttacataagttttggatgacataaatgtacaaactatagtagatagcttaagataaaagtaggacacatttttctggatgatgcccacatgcagtttgtatttattcccgatacctgtgtgtgaacacatgcaggtccacatgctgaatgtggaggtctggggaccaccttgggtgtcattcctcaggcaccacctacttttattttgaccttaacttgctcagactatgctgactgaccagcaagcccaaggatgctgggaatcaactccaggttatcctggttgcaaagcaagcattcatgctgtctgaaatatctgacccctgggcccagcccatttccacacacatcttgcattctgagagcatttgtgaattccagtgaagatgcatactgcatcaagaagtgaaccagtagagaagacctgaacaggccctctgaaattagcctttaaaatcctgtggcttttgggttgacattggaagttaatgtccagatggagaagacccagagttcctgtatgcattctctagcactgccctttataaaatcattcatatggcatctttgctctttcaggaccttccttttatccaggtgtaagagctgctgcatctggaaattgaatgtcctatttccacattttccttcttaccatttcatctatagaaaaacaatttcc

SEQ ID NO: 3439 - DNA, 1000 bp, mus musculus
ttacaccgtgtattatttccatcctttcattctactgtgttttcacagacaccattaagatcatgtcctctgaggtccttgtcttatacttcagctatgttgcattactcagagcctgtagtctcccctcccccagcctgaaacctgcttgttcaggggtggatcttcctgctcattcgttctgccacgcccactgctggaacctgccgctttgctgttctgaagccatcacgtgctcaccctactactggacctgagattattcggcgggaatcgggtcccctcccccttccttcataactagtgtcacaacagtaaaatttgagctttgatcagaataactgtcttggctacatttctttctctcgacacctagcccctcttctcttccaggtttccaaaatgcctttccaggctagaacccaggttgtggtctgctggccggacacaagagcctactgtagtagggttgttgggttttggtggagacatattgtcttggctgttaaggactgtattttgtgctggtgtctaggcatctggggttgggatgattgtggcaattgtaggtgttaatatctgtctcatatttgttgtgtacatgttcctgtttggtttcagacctgagtcaagggactgaggtgtacattttacataaccaaaccagatctagcttccaggttctccagcatccctcattctctacctggcatatcctgctccccatcctgaactttccagtccagattctgggctacccttctcccagatgttcctccctatgtaatctagatattttgtttaccctcctcctcctcctcctcctttctttctcactctgtctctgtctctctgtctttcctttctctcttttctcccttccttaaccttccctttcttccacatggtgacttccatggccttggtccttgggggtcagcgaaatctcccaagggcagcttttcaataaacttgcctttaatataatccaatctggctt

SEQ ID NO: 3440 - DNA, 1200 bp, mus musculus
ccatctcttgtattttgttgctgatgctagcatctatggttccaattttctttcctaggttttctatctgcagagttgcctcagtttgggtcttctttattgtgtctacttccctttttaggtcttggatggttttattcaattccatcacctgtttggtcgtgttttcctgtaattctttaagggatttttgtgcttcctctttaaggtcttctacctgtttagcagttttctcctgtatttctttatgtgagttattaaagtccttcttgatctcctctaccatcatcatgagatatgcttttaaatcagggactatcttttcaggtgtgttgggttgcccaggactgggtggggtgggagtgctgcgttctgatgatggtgagtggtcttggtttctgttagtaagattttatgtttgcctttgccacctggtaatctctggagttagttgttgtagttgtctctggttagagcttgttcctcaggtgattatgttagcctctatttgcagacctgggagactagctctcacctgagtttcagttgtcagagtactctctgcaggcaagctctcctcttgcagggaaggtgcccagatatctggtgttcaaacctgcctcctggcagaagttttgatccactcacagaggtcttaaggtccaatggaaggtcctgtggataccttgcgggtgtccgcagactctgtgcccaaggtacccctgtgctggcatggactggaagggacttgtaccctgattggattggagcagaagctgtgttccactcaccagaggtcttaagatcccgtgtttggtaccttacgggtgtccacagactcctcgcccaagctatcccggtcctggcatggaccggaagggccacccaaatctttaagagaatagattggaagagaggctactgaagagtagtttaggtagacaaaatcagttcgttcagtggagctgaaattagttctgttcagtttgtgcagcagaagcaggtgaatccataaataaagatatggaatattagaacaaattgccagagtgagtttgaggcaaaacagaataattcagtgagaaacctagagaagttagattaatttagtcatcttggagaggagtttgagccagaactagctagctagagttcggaaaaaaactagaaagtgtgagttcattcagcagttagccttaa

SEQ ID NO: 3441 - DNA, 1000 bp, mus musculus
ttaacatagaaactttgggtcaccgcctctcctttggttctgggactaccgattgcactggaacaataaattcctgttgctttttgcatcaattctggctccacgtggttcactcagggggtccctgcttctggctattacaaataaggctgctgcccttccggtcagctccagcaccaggtcaccttgggtgcggagtcagcggacacacccaaagtccctagaggactcttcaaatgatcttagaaccactgtgagtggaacacaacttctgttccatttcaatcacacgagacctgagacagcattagggaagcaggaaacctggcctgaccagggtcacaaatctcttctagtcagcaccagcaccagctcaccttgggcatccacagatagccccaaggtccctagaggacagcttctgaggcagaccccattttgggctccaaacttcagagcacctcccctgccagaggagaggtgtccaccccgcctgggagtgctttggtggagcaactgggggagccatcttggtttctgaatccctccaagactagtctgcacaggtgagagtgtggactacagaagctaaaagcttctgggacaggccaaagttacattgcttctgggtcaggccctgtttcaggccttcatcttctgctaggaggcaggtctgacgccagatatctgggcaccttccctgcaagaggagatcttgcctgcagagagtgctctgaacactgaaactcaggagagacctagtctctaagttctgctgatagaggctaacagaatcacgaaaggaacaagctctaaccagagacaactataacaactaactctggagattactagatggcaaaaggcaaatggaagaatcttactaacagaaaccaagaccactcaccatcatcagaacccagcactcccaccaaacccaatcctgggcacctcaacagacccaaaaagctacacccggagttaaaagcatatcttatga

SEQ ID NO: 3442 - DNA, 1200 bp, mus musculus
aatctgaaatatgcacagcagcaaatgttttgaatgcttcccccacccaacttagactttgttttgggaagttttagaaagaaagacataccaggaggaaacagggcactgaaatttttcctttgaggtgccttctgctttatatcctgttcctggattcatggtgtaagctgttttcctccactcctttcctaatacgattgacagaatcctttgaagccatggactggaaaaaaaccctcctctgtaggaccgtgaaaggcagcctggtttctggttgagctaagactggaaaccccagcgaacctgagggactttaggcattttgccatgctcctggacaccaggctactggcacaaggccacaggtatccataggtttgtggacatcagtcacataggagcaacgccccaagcccttccacaggaaaaagacattaatacaaggcatgtagactcaagacagatctcattttaatgaggtacctaacggcccgttggcttatccagttaaactgcccttcctagacactcctccctgcaaacggtatgtaacctcaggcttgccctgagaaggtagagtacggttttactcattgccactctctgccacgacaacaaatgctttaaaaccatggactgtctcttttcatcgggatctcctatggagagcaatggagaaagaaggctttcgcctaaagagcccgacctctcctggaaggtctctcagctctcccagacatcgcctctacgaagctaatctgcctggcgaacaaaccaaggattctccttctcatggaaccagctggagctaccctcttttttcccttggtcatgggctagatccagcccgtgggcccccactccattctcagttcttccctagctcctagaggctcctgggtgctcaagagcctgagaaacagatggttccagcctccctgcaggcgtgggaatccccgaggtcaggtctggctgtccctgggacctcagactgtcttccctacctaccagagctgtgccccataacttggcagaccctgacaccctccaggcattggcttggggtaagcgcagtcaaaactccctcaggggttcacgagtggatgcagaacaccccaaacgcaacactcctcacttttttgagattattttctcatacatatgaaaaataaaaaaaaaaaaaaaaaaaaaaaacaa

SEQ ID NO: 3443 - DNA, 1000 bp, mus musculus
ggctaggagcctgattataagcacacagtgagagaaaatagggaggtgtcgagggggtataatataatacagagaaaagggatggacatctggggcagatgctgattgtaggcatcttgcagcttatcatggaatgtcggccctaaaatggtcctggtcagccttcaaacattctgcagtttatcttggagtgccataaacagtcccaggcaccaaacagagacatggaggaggaggcgaagctgccttaatctaagcagttctaggcaccaagtggagacatgaaggagggagtgaagctggcagtctcaagcacctggtagagacaattaaggagtgggtgacataattcccttcaaagggtaagccagatctttagagtaagagttactgcgggacctagtttcccacagtttggtctctcacatctcccccccccccttttttttttattaaatttgcggggtggccatgaaaagagggtcggtgaaacacctgtcttaggcctttattgtggcaagcacccacatctagcaccacaatagctaggtcttttcaggttctaggtgggcaagcttaggtcttaggctatgtgagttgcctccactccaggcaccacgtcttattccaatgacttgatcaggctactggtagtcctgatgagcacccaggcaatggacccacaataatcccatcattgggtaaccttgcagccaataggtggtgtacatctggctcatggcaccgcaagatctggtcattggtaactccacagcttatggtcctcaaccactataagatctggaggtcactccatctatcattgtcatttccacagattatggaaccaagaaggctctgtttctgcagcaagggtggaaaactgaaggccaagggctgccctctctgcatcattggaagagggatcttcagctgagactcggatatctagacgatggtagtggactgaaactgttttgtttacggcagaatcaatctg

SEQ ID NO: 3444 - DNA, 1000 bp, mus musculus
ttgactacactaaagctaacgccatgcatattgattgtgagccaccttgtggattcaggaaactgatacaatggcgctgtaagaggaacaagtggtcttatctactgaactatctctccatcctgataaaaaggaaagcagtaaaaatagaaaaagtgtgtccacgcctttttctgcagcactactgtgtacttacctgattgcttactgtgcacttacctgatccttcttaaccatgtcccccacctctagtccctgaatctgctcctatccacctccagcaactgaagtgattcattgggaaaaaggaagatggtctaattcctctttaacctcacttcccatcacacacaatagttctttattcgactacagacaggactctaatgatctgtactggctgatttggtgtgtcaacttgacacaagctggagttgtcacagagaagggagcttcaggagaggaaatgcctccatgagatccagctgtaaggcattttctcaattagtgatcaaggggtgagggcccattgtgggtggtggcatccctgggatggtagtcttgggttctataagagagcaagcttagcaagccaggggaagcaagccagtaagaaacatcccttcacagcctctgcatcagctactgcttcctgacctgcttgagttccagtcctgactttcgttagtgatgagcagcaatgtggaaatgtaagctgaataaatcatttcctccccaacttgtttcttggtcatgttgtttgtgcagaaatcgaaaccctgactaaaacataatcaaagacaccctatatgagtattgttgtgctgtcgagataagcatcctcagtagctcccttcccaccacaccagcttccccatgcatggcaattcactcacacatggtcttccagagtctcttccatactctgtgtgtgcagcttcttgagatttttacatggctctcttctttccgtaccttacatctctgctcaaacctcagc

SEQ ID NO: 3445 - DNA, 1600 bp, mus musculus
tttggtcttctcattgtgtcctggatttcctggatgttttgggtttggatctttttggattttgcattttctttgattgttgtgtccatgttttctatggaatcttcagcacttgggattctttcttgcatctcttgtattctgttgctgatgcttacatctatgattccttatttctttcctagggtttctatctccagagttgtctcactttggtttttcttcattgtttctacttccatttttagatcttgtatggttttattcaattccattacctgtttagatgtgtttccctataatttttaaagggatttttgtagttcctctttaaggacttctacctgtttagtagtgttctcctgtatttctttaagtgagttattaatgcccttcctataatcctgtactagcatcatgtgatatgaatttcaatctgaatcttgcttttctggtgttttggggtatctaggacacgctgtattgggactactgtgttttaatgatgctgagtggtcctggtttctgttagtaagattcttacatttgccttttgccatttatcatctctggtgttagctggtctagctatctctggctggagtttgttcctcctgtgattctgttagcctctgtcagcactcctaggagttcaactctgtcctgagtcccagtggtcagagcactctcttcaggaaatttctgctcttgctgggaaggtacaccgagttctggagctcagctctgcctcctggctgaagatgaaggcctgaagggaccctgctcaagaagctctgaggcctgcacactctcctgtgcagactggtctatgagagacttgggatataagatgtggctctcacctgcatcctgtggtcagagccctccctggaggctgactctcctctggtggggaaggtgcccagaggtctgggtctcagctctgcctcctggctgaggatgaaggcccaaggggatcctgtcctagaagctctgttacttctgaagcctgcacagtctcctgtgccgactggtctctgaaagacccgggatacattatcaggtgttttcttttttaaatcacatttccatgatatgaaaatatactatatatgttggatttagtgtctccagagaccccattaaaacagatttgaataagagaagcagagaataagaataattatttgctgttctgaatgcattttgggaaacatccatcctgttctatacaaaatatcatatctgagactaatttgccctgaacattgggtacaaaacacaaaacacactgatatttttaaaaaggaaggaatttcacatgattaccgtgggtttatttataggcatggatattataatgattttctctggctctgtgcagtagtttcaaaatacaactacaataatcatcctttattcattcattttcagattcagctgaaggactgaacttcattaaccttgttggaaacatagaaatacaataaacctgcttgagcattccctttaacctataatttaaatgaatatgaaatgcaaagagatggaattcaaacccgaattggtggaattaaggacacactgtgatttcaagcca

SEQ ID NO: 3446 - DNA, 1200 bp, mus musculus
cccggaccaagatggcgaccgctgctgctgtggcttaggtcgcctccccagccgggcgggcacctgtcctctggtccggaaggtggccggctgtccccggcccacacagggtgctgcctcagtgcctctgtgcttccgcctgttccagaagctgtcaggttctctggcgcaccctctcacctgttcagactaatttcctaagttcggcgggtcccggaccaagatggcgaccgctgctgctgtggcttaggccgcctccccagccgggcgggcacctgtcctccggtccggaaggtggccggctgtccccggcccacacagggtgctgcctcagcgcctctgtgcttctgcctgttccagaagctgtcaggttctctggcgcaccctctcacctgttcagactaatttcctaagttcggcgggtctcccttttttttttttttttttttttatcagatatttctttatttgtatttcaaatgttttcccctttccaagtctccccttcagaaactccctatcccattccccatctccatgccctacccacccactcctgtcttctcatcctggcattcccctacgctggggcattgaacctcctcaggcacaagggatgctcctcccactgatgtccaacaaggccatcctctgccacatatgcagccagatccaagggtccctccatatgtactctttgtttggtggtcctgtctttgggaactccagcagtctggacagttgacactgttgctctcccctatggggctgcaaactccctcagccccttcagccccttctccaattcctccttcggtagtcctgtgctcagtccaatggcatcctcttctatatttgtcaggctctggcagactctctcaggagacagccatatcaggttcctgtcagcaagcatttcctagcattcacaatagcatcccggtttggtggctgtatatgggatggatccccaggtggagaagtctctggatggcctttccttcagtctctgctccacactttgtctccatgtttcctcctgtgagtattttgttcccccttcttagaaccactgaagcatcctcactttggtcttctgtctttttaggcttcatatggtctatgaattgtatcttgggtattccaaacttttgggctaatatccacttatcagtgagtacatacatgtattcttttgtg

SEQ ID NO: 3447 - DNA, 1000 bp, mus musculus
ctgggagtgcaggaggtgctctaaactgccgagccacctctgcatcccctgccactacttccctcaaagcccacagactagtgcacgtctctgtccacatcaaagaagcctctgcttccagtgaacagcagttaatatggaaactcacaccaggtcaacgtacagagaataaaattctatgaagtgctcaaccacacagtacagaccctcaagactcaggacacaatgtagaagagggggcagaaaacttgaaagttccaggggactgcttccaaacaagtagcttatggacatggcaggattgttacacttatgaactgtcagcagcagctgcctgcatgggacctgcacaacactaagccagtcaacaggccaacccggactgtgagaagctgaagagagaagagccaagttttcttcagggtgtggtacctggtaggtaaccggttctccattcatgccctgacacctatgcatacatgggtggcatgaactggactcagtgggttatagagaaaaacaaatggatgacataaagtttggggaggatggggtgagagatggccttggggaagagaagaggtgggtgtgaccaaaacacactgtgcacatgtatgaaattttcaaccaataaataaaattgtattttttaaaaggtaacttcaggagcacgcaagtctatggagggaaaaggtcagcaaagatgacgtggagagtttgggcagtaaggtgtgaagaagactctgctgagcgcttcatggttaccagcatgggagcacttctgttctgccaagcatctcctccattctcctcccagcatctgtgcatgttatctatgccaactgtcagtatgacttcatgatggacatcattctgagggacaaatgacatctgaggacaagtctaatgcactctaaacagttcgctatgatggctaataagagaaagcttaagaagcaatcgtttaaggagaggaccttatgtagataatagaaggtac

SEQ ID NO: 3448 - DNA, 1000 bp, mus musculus
gcaaaaataaatgaaacaggatagaaacatgatctgatactctccccagcatcatcctatgtgctggttcttttgcatatacttgacacaagctacagtcatttgagaggaaggatcagcaactaagcaaaatgcttccataaaatcaggctgtaggcagacctgtagagcattttcttaattagtgatgtatggttggctggaccaactcattctgaacggtgccagccctgaagtggtggccctgagttctataagaaagcagactgtgcaagttataaggagtaagtcaagaattaacaatccttcatggcctctgcatcagttcctgtctccaggtccctgccttgagttcctgccatggctttcctcagtgatgaacttcgaagctttaagtgaaatagagtctttcctccacaactaattctttggtcatgggatgcaaaatagcactcctgcatggcctctgcttcaggtttctgtattgaattctccaggttgctattctgaattccgttcctgagttcccttcatggtagactgtgcgctatgaaataaaatgaagcctctcgccatcaaggtgctttgggtcacagtgttttgttacaatgaagagcaaagtaatatggcaccagagcagatactgtggaagtctgaataagcgtgacctcaggaggctcattgattcaatgcttagccatcagtcagtggcactacttgaaaaggattaggaggtctggtcttgttgacggaagtatggcccaatccagacccagtatccctctcttccttctgcctgtgtatcaggatgtaaaaccctcagctacttctacagcaccatgtctgcctgtgtatcaccatactcccagccatgagaataatgaacttaacactctgaaaccgcaaggcagccccaacgaaatgctttgttgtataagagttgccttggtcatggtgtctcttcacactgatccactgattggacagtgaccaagataga

SEQ ID NO: 3449 - DNA, 1000 bp, mus musculus
aaaaaaagtctttcaagtaaagatagttttgtcttaagagaaaggttcaactgagctgaggtccaaatagctttgatgacatatctagattcatcctccactggaatactgaagctgatcttgtcatctttgctctcttttataccagacagacactattgctgatgccaagaagcacttgctggcaggagcctggtatagctgtcccctgagagactctgacagcaccagaccaatacagatgtagatgcttgcagccaaaccatctaagcactggggccccaatggaagaattagaggaaggactgaaagatctgaaggggactgcaacaccataggaagaacaacaatatcaaccaaccttacccctcagaacttccagcgactaaaccaccaaccaacgaatacacctggaaggactcacagctctagctgcatatgtagcagaggatggccttacctggcatcagtgggaaaggatgcccttggttctgtggaggctcgatgccccatcctaggggaatgccagggcagtgaggcgggaggagggtgggtgggagagcaccctcactgaagtagggcgtaagggggatggaatagggggggttgcagggaagaagttgggaagggggacatttgaaatgtaaataaataaaataaaaaaaaaagaaaagaaaagaaaagaaaagaaaagaaaagaaaagaaagagccaggcagtggtggcacatgcctttaatcccagcacttgggaggcaaaggcagaagcaggtggatttctgagttcgaggccagcctggtctacatagtgagtaccaggacagccaaggctctacagagaaaccctgcctcggaaaacaacaacaaagaaaacaaacaaacaaacaaacaaaatacaaaaaaaaaaaacaaaaagaaaagaaaaagaaaaaaaaagggatagtgcagcagagcacccttgctcatcagtactataagtcacttgcatatgctgatcagaaa

SEQ ID NO: 3450 - DNA, 1400 bp, mus musculus
gaaatttgctttataaagagcaccatagctcttcaaagtataacctgttgtactataaagaagtgagtcccatgttattatgaaaagtggcaaattagcatattaaacactgtatttcaggattcactgtattttaggattcccctaactatataagttaagaaaaacgtcaatgataaggtatgtatttaaaatatgatattgttctattttagcattttaaaaaatgatgtttcatggtttgtatcttaccaataacttcttttgtaatatatacatgctatatgtctattaaatatagtaaagaaaatgaaattgaagacatatttctttgggtattaaaattaaataaagtagagaagtgtaaaataggtcttacataaatatatacaggacaacatgaagctcaagaagaagaaagaccacagtatggatacttaggtccttcttagaagggggatcaaaatacccatgggaggggatacagagacaaagtttggaccagaaactgaagaaaaggctatccagtgactgtcacacttggggatccatcccatatacagttccaaaacccagacactattgtggatgccaacaagtgcttaatggcaggagcctgatgaagctgtctcctgagaggctctgccagtgcctgacaaatacagaagtggatgctcacagtcatccactagactgagcacagggcccacaatgaaagagctagagaaaggacccaaggagctgaaggggtttgcagttccataggaggaacaacaatatgaactaaccagtagccccagagcttccggggtctaaaccaccaaccaaagtgtatacatggtgaaactcatggctccagctgcatatatagcagaggatggcctagtcagtcatcagttcaaggagaggcccttggtcctgtgaaggctatatgccccactgtagcgcaatgccagtggccaggaagtgggagtgggtgggttagtgatcagggggcgagggcatgggatgggggcttttcggtggggaaatgagaaaaggggataaaatctcaaatgtaaataaagaaaatatctaataaaaaagaaacaaacaaacaaaaaaccaatcatatacagcatacacatagacacacagaatgcatgacacatgcacacacacatatacaaaattaaaaaaaaacagatgtggtgaagcatattgttttctactgtatcattactcttatagcaaaaaggcctttcatcctcagtcaaatttgctacattcattggcttttgctctgtaactgtcatctgagtcaataacctatgtgtcccaactcagctagaacagtctaactctgggcctaagtagttttaacatttgaagaaaatggaaaaaatatagaattggtagag

SEQ ID NO: 3451 - DNA, 1000 bp, mus musculus
ataagattaatataaatttaaggataaaggtaaatattaaaagcagccttatcagtttgttgcttgaactagcatttgctcacactgatcttacttcattttagaaactaattctagaaccctggaggcctactgtcacccagagcaaatggttgagatccacaagcaccaagcccatatgtgctggatcctcattaaagcccagcagccataaagtttgctctttcccctttgtgctatattttccagtccatacctctaaccacatcccagaggcttgtagcaatcaggaaccaccaggtgagaaccctatatcccaattccctgccagctggaccctctggacaaactcagcagtggcaaactctgccctgttccttctgcactctatttcctgggccatggctccacctgcatcactggaggcttgctgctgcccaaggataacagataaggtcctcaagcaccttctggtccttctggcctctgcctactgggtcatctggcaaggccagaagtcttgaggtctgctctgtcacctctgtgctccatcttctggtccacacctgaacctgcaatccagggtgcttgaaaccatctggggccaccaacactacctgcatccctgtgggccctcccctatcccaaacaatctgcagtctgaaaccatcaggtaccaccaactctgtccacatacctgaaagtctgctgacaccagaacagtcaactcaacttgaaatcccagaggcctgctatcactagggactgttagctctacttgcagccccagagacttgctcctatcaaggactgccaggcctgacaacattagaaatagatggctccaggacaacataagaacacaatcaacaaaagtcagggcaatgtggcattcttagaccccaactattttacgacagtaagcccttgatatcctaaaagatctgaattgtgagaaaataaccttaaatctaatatataaagttgatagaggccttta

SEQ ID NO: 3452 - DNA, 1400 bp, mus musculus
gatctttttgcattttgcattttccttgattgttgtgtcaatgttttctctggtatcttctgcacctgatattctctcttctatctcttgtattctgttttttttgtttttttggttttgttttgttttgttttgttttaatgcttgcataaatggctcctaactttttttctaggttttctattttcagagtggtctccctttgtgatttctttattctttctactttcatttttagatcctggatggttttgttcaattctttcacctgagtggatgtgttctcctgtatttctttaagggagttatttatttccttcttatagtcctccatcatcatcatgataaataactttagatccatatctaaatggcatatccaggacttgctatggtttttgagtttggttctgatgatggcaagtaaccttggtttctgttctaacgcttgcctcctgccatctgattatctcaaatgcttgctgccctcaatatatctgactggaacctgtccttcctttaatcctggttgattcaagactcctcaaactccagttttttttctgtgatcctgggatcctgggatcctgtgaacctgagattctgagtgtgtcagagttcttggcagtcaatcttcctctgagaccctgagatcctgatgtgaccaagctcctgggatcccgggatcctggaaacctaagatggtgggtgtgttagagcacctggaagtggtatctcctctgggaacggtggggatgcccgctgtgttagaaaccaaggcagacctgtaccgaccagaaggaacccaagccgctagtcaggcggggctctgtgtccttgctcctgctgacatgggctcctcacaattgttttggaacagatgttgtactccactcacccatgatcctaagatcctgggcatgctagggaacctgcagtgtggagagtcctctggggactgtgggaccgtccgtggagttcgaacccaaggtggccattagctggcgctgaacggaagacttttccctttcagacttaaataattttactgtatgaagtcaaggttaagtaaattatatatttctacttataacttaccaattaacaacataagaataaatgtgttcagacattttcagtaactgtaaaaggaagagcattgttcattaaaaaaacacagtgggggacatcttgacagaaacaagcatcttaagcatttgatttagtaataatcgatacaactgtctatgttgtcaaggatctctgtgaaaacaaagaaggttttacttaatttattgaacgcccatattttcacatacctcaaaggattttgatctactttgtacactacacgtaacaacaataagaacaataacaaaaaactctcagtcatcattcat

SEQ ID NO: 3453 - DNA, 1400 bp, mus musculus
ttcttgagcagaactggatttcatctccacataaaactgaaggatggatcttaatgttctgaggtaggtggaaagcataacaagaatcataacagcactttgccatgtttcctggaaataccacacacgaatgatgcttatgaaagaaataccaacttaattctctagattctacaccaaaatttaagaagagctttaaaatatatcctggaatcactatgtttgatttttttttgttccctaataatccttttcaatactagatttttacatgttccaaaataccttctgaattgtgcctatgaacattgccagtccctcccttgtgaagaattatatcaaatgctaactataatgaaactgacaatttagaaatagtaatatagaacatgcccaagatcagaggatcagaggtgaggatgacacatgtgtccccaacactgggagtaactgggactggcaggacccaggcacacaggaactctgccagaccagtggcatgggttgcttctgatctgtctgggccagcgccctgaacagagcttggatgcaagctccacagccagcccaacacccagatgcagctccactccgagatgttctaacatgcccaggatcagagaatcccaggatcccaggagcttggtcacaccaggatcttaaagtcctaaaagcagcttgactcccaggagctccaacacactcaggatcacagaatcccagaatcacaggatcacagagacagcttgactcggaggagttctgacacaaccaggatcataggaaggacaggctccagtcagacatatccaaggcaggtagcactagcgataaccagatggcaggagttaagcttaagaacataagcaacagaaaccaaggttacttggcatcatcagaacccaattctcccaccatagcaagtcctggataccccgatacaccagtaaaacaagattcatatctaaaatcacttctcatgatgatgatagaggacattaagaaggacataaataactcccttaaagaaatacaagagaacacaggtaaacggctagaagcccttaaagaggaaacccaaaaatccctaaaagagttacaagaaaacacaatcaaacaggtgaaggaaaggaacaaaaacttccaggatctaaaaaatgaaactagaaacaataaagaaagcacaaagggagacaaccctagaattagaaaacctaggaaaaagatcaaaagtcatagatgcaagcctcaccaacagaatacaagagatagaagaaagaatctcaggtgcagaagataccatagaaaacattgacacaatagtgaaagaaaatgcaaaaagcaaaaagctcctaacccaaaacatccagaaatccaggacacaatgagaagaccaaacc

SEQ ID NO: 3454 - DNA, 1200 bp, mus musculus
attgtagaagggtctgtgcgtgaatgtgtgtttttgtgtgtgtgtgtgtgtgtgtgtgtgtgtgtgtgtatgtgtgtgaatgtagatactaagatagccagaagtgcagagtctccacaaactagagattcaaaggattgggaagcatctgacatggatattgagggtcaaactcaggttctctgcaagagcagcaatgtgctattcaccactgagtcatctcttctgcccctgcctttgaatccttggaagctttcgctaaagaaagttctattgtgtttaaaatccagaaaattcttatttaaaaaactcttggtggaagattcacttagaacaccagaggagtacacagtaagctgaacagagcttctggtttctctgtccacttgtagcagatcctctgccacagggctccacaggcaaatagctctgagaaggagcaagcctccaggagtgtgaaaaggcctgtgagtgcaggtaggactaccactgctgctcagagtaacccacctggaaccctcaggacacaggaactgaggggctgcctgaaacaggattcttccagtctccttctgtgcccagagctgatcatgtaccaccgagctacatacaaaatacgaccaggagagagctggtctcccaggagtgcctacaaacctgcaagcatagataagaccaccacttctcttcaaattcctggcccaagagggaccctcacagagccatcaggacacaggaaccaaggattatctggggaaaggatccttctggtctctgtctgcaccccagagcagatgctataccacatctctccatcccaaatcctcctgaagagaagtggtctctcaggagtacttctcccatcacagtgaaccctggttaccctagtacaccagaaaatcaagaccctgatttaaaatcacatctcatgatgatgattgaggaatttaagaaggacctaaataaatcccttaaagaactacaacttaacacaggtaaacaagtggaagaccttaaagagtaaacacacacacacacacacacacacacacacacacacaaaatcccttaaagaattacaggaaaacacaaccaaacagatgaaggaattgaacaaaaccacccaggatgtaaaaatggaaatagaaacaataaagaaaccacaaaggtagacaacactggagatagaaaacctacgaa

SEQ ID NO: 3455 - DNA, 1000 bp, mus musculus
atccaacaccccttcatgataaaattcctggagagattaaagtgatgcagggatctacctgaacaaagaaaggaaatttgcagcaagcccatagccaacatcaagttaaatgaagagaacctcaaaggaattccactaagatcagaaacaagacaaggttgcccactatcttcttatataatagagcatgaagacaactgatggagatcaaaatggaaacaaggaagtcaaagtatctttatttgcacatgatatcattgcatacataagttaccctaaaagtaccactgggaaactcctataactgataacacttggagtaaagttgctgtatagaaattaactcacaaaaatcagtagccttcctctacaaaattaaatacatactgaaaaactaaatcagggaaataataaaattcacaatatcctcaaaaaatatcttggggggcaactctagccaagcaagtgaaaggattgtatgataaaaatttcaggatatttgaagaaagaaattaaagaagatatcaaaagatggaaagaacttccatgcttgtggcttggtaggattaacatagtagacagggacatccaaactaaagaaatccccataaaatagcaatgcaattctcaacaaatcttgaaaggacaattttcaacattgtactggctggtttaatgtgtcaacttgacacaggctggggttatcacagagaaaggagcttcagctggggaagtgcttccatgagatccagctgtagggtattatctcaattagtgatcaagggggaaaggccaattgtaggtgggaccatttatgggctggtagtcttgggttctataagagagcaggctgagcaagccaggagaaggaagccagtaatgaacattgctccatgatctctgcatcggctcctgctttctgacctgcctgagttccagtcctgacttccttggtgatgaacagctgtgtggaaatataagcagaataagccctttcctc

SEQ ID NO: 3456 - DNA, 1800 bp, mus musculus
cagttgatagagcaagagctccagggggtccgtgttcccaccttgagtgggggcctgtgcttggcctggtccagagggctgtgccacttggggaggctgggattctctgcagaaggttggccagatgctagggatcgaggtatccatgcccgaatttgctgcttcctccaggggcagtaagctatcctgggaaccttcatgctcccagctgccagaatttctacccgaatccagtggggctggcacatgctcttccttttggacttcgtccagcagttgatcaaggaggaggagttccagagggcctgtgctgtctgcttgagtgcgggcatcttcttggcccgctccacggggctgtgccacttgggaaggctgggactctctgcagaaggagtttgagtcgctggggcttgaagtatccaggcctgtacttcctgcttcttcctgtggccaaaagctctcctgggaaccttcatgcaccctgccaccagggtctccatccaaattcagaggggctggagcaggctcttctacttggacttcatccagcagctgatcaaggaggggttccatagagcctgcgttgcctgcttgagtgggggcctcttgttggactgctccacggggctgtgccacttggaaaggctgggactctccgcaggaggagggcaagtcgctagggctcgaggtatccatgcccgtacttcctgcttcttcctgtggcaacaagctctcctgggcaccttcacgctctctgccttccggacctgcaggggccccatccgacccttgtgacgccagcaagtcttgatcttgagctgtgggcctgcccctcctgtggcgccaccgagctcttcggttttgaaaccatatgtggatcgtgtcctcgggcaaccctgtgtcacgcgccagctcctccctggtagcaaagcctggtcgtgggttcctctcaaaggcttgccctaggatcctgcgctgtagcgaggtgagtcgagtgcgaggccttctgccagatgagcgcatgcctctaccctgtggcctggatccaagctcttcctggagctgtggcgaggctagccgcctggagcctctgatggacctctttgaggcatgcccctcctctccactgcgattcctgcggttctgaaaccacacgcggatgcggcaatctgagacccccattcccttggccagctccttcctctccttgaagctcaggtatctcttctccttaaaagttgatagcagggcctgctcttgccaggcctgccaaaccatcttcctgcgccgccgggattcccgtgccacaccactgccaccaacagggctgccagcttctgccatggtgccaatgacggcctcccaggagtcctcaccttgggagactcgactcaggacagcttcagaacaaacacaagctgcaacaactgccagcagagtggctgtgaccactgccccttaaatacctctgcctctgctcaggtagtcccgcccactacctaccagttaggcgccttgggctacagaacatgcctacccctttctcgcattgcccccaagaagcgccaagcctgccacgcctggcacctgacatcagggcaccaggaggcggacctcaagcgtcctctgacactcagcaaaatctccccaaaggctcctcatccctggcaagccacggggtcgccagtctagacccacacccagggagcacacaagagtcagaggactcgccattcccatcagccaaatcattcattgactggcaggtggcacaggtaccaggacacctatgagaagggg

SEQ ID NO: 3457 - DNA, 1600 bp, mus musculus
ggccctggagaaggcacttcattattatccccacctgcaatcaatccttatagttagcgagacaccttgcatttcgggaagtcactggagttgggtttttgatgcacatccttgctgggatgggtcacttctccagttccaaatcgggtctcttcaggactttggcctctcgggtttctagaagcaagaggtactgtcggggagtcagagcatatctagaagagtctgatattcttctggagtgagaggcagatcaggtgttgtgtccatttgctcccatgtttcctccacattcacaggggcaggcccctgctcctcaagttggacttcggtcagcagttgatcaaggaagagctccagagggtccgtgttcccaccttgagtgggggcctgtgcttggcctggtccagagggctgtgccacttggggaggctgggattctctgcagaaggttggccagatgctagggatcgaggtatccatgcccgaatttgctgcttcctccaggggcagtaagctgtcctgggaaccttcatgctccctgctgccaggatttctaccccaatccagtgggactggcacatgctcttccttttggacttcgtccagcagttgatcaaggaggaggagttccagagggcctgtgctgtctgcttgagtgcgggcatcttcttggcccgatccacagggctgtgccacttgggaagtctgggactctctgcagaaggagtttgagtcgctggggcttgaagtatccaggcctgtacttcctgcttcttcctgtggccaaaagctctcccacgaaccttcatgcaccctgccaccaggatctacatcccaattctgacgggctggagcatgctcttctacttggacttcatccaacagttgatagagcaagagctccagggggtccgtgttcccaccttgagtgggggcctgtgcttggcctggtccagagggctgtgccacttggggaggctggtattctctgcagaaggttggccagatgtgcatcaaaaacccaactccagtgaagataaagtcacgaccatggttggggttaggggcagaggaagacacgaagagagagacaaacacagatgtggagagaaggggggaagggatttagggacagagggtggagggtggtaaggagagagtgacagagtgcagaaggaagggaagaatcgatacagagagatagggaagtagggaggtagaaagtggatgggggggagtgaatatgggagggtagaagaatggggatggagacagagaggggaagagatggtgaaatggaggcagggagggaaatggagggggagcaaaagaggaatggagggagagagagacagacagagacagacagacagacagagacagacagacagacagagacagagagagagggagacacctcacaaggtgtttctttcacagactgtataaaaaggagcctggaagcttgagacaccagtaggttgtgcactttctatggagcaggttgaagaaaagagttgatcgtcttcttgcatgtgctgtgtttgctggcggtatgttctgtgctcttagatctctggagttagccttgaacact

SEQ ID NO: 3458 - DNA, 1600 bp, mus musculus
cagatgctagggatcgaggtatccatgcccgaatttgctgcttcctccaggggcagtaagctgtcctgggaaccttcatgctccctgctgccaggatttctaccccaatccagtgggactggcacatgctcttccttttggacttcgtccagcagttgatcaaggaggaggagttccagagggcctgtgctgtctgcttgagtgcgggcatcttcttggcccgatccacagggctgtgccacttgggaaggaaaggactctctgcagaaggagtttgagtcgctggggcttgaagtatccatgcctgtacttcctgcttcttcctgtggccaaaagctcttctgggaaccttcatgcaccctgccaccagggtctccatccaaattcagaggggctggagcaggctcttctacttggacttcatccagcagctgatcaaggaggggttccagagagcctgcgttgcctgcttgagtgggggcctcttgttggcctgctccacggggctgtgccacttggaaaggctgggactctctgcagaaggagggcaagtcgctagggctcgaggtatccatgcccgtacttcctgcttcttcctgtggcaacaagctctcctgggcaccttcacgctctctgccttccggacctgtaggggccccatccgacccttgtgacgccagcaagtcttgatcttgagctgtgggcctgcccctcctgtggcgccgccgagctcttcggttttgaaaccatatgtggatcgtgtcctcgggcaaccctgtgtcacgcgccagctcctccctggtagcaaagcctggtcgtgggttcctctcaaaggcttgccctaggatcctgcgctgtagcgaggtgagtcgagtgcgaggccttctgccagatgagcgcaggcctctaccctgtggcctggatccaagctcttcctggagctgtggcgaggctagccgcctggagcctctgatggacctctttgaggcatgcccctcctctccactgcgattcctgcggttctgaaaccacacgcggatgcggcaatctgagacccccattcgcttggccagctccttcctctccttgaagctcaggtatctcttctccttaaaagttgatagcagggcctgctcttgccaggcctgccaaaccatcttcctgcgccgccgggattcccgtgccacaccactgccaccaacagggctgccagcttctgccatggtgccaatgacggcctcccaggagtccttaccttgggagactcgactcaggacagcttcagaacaaacacaagctgcagcaactgccagcagagtggctgtgaccactgccccttaaatacctctgcctctgctcaggtagtcccgcccactacctaccagttaggcgccttgggctacagaacatgcctacccctttctcgcattgcccccaagaagcgccaagcctgccacgcctggcacctgacatcagggcaccaggaggcggacctcaagcatcctctgacactcagcaaaatctccccaaaggctcctcatccctggcaagccacggggtcgccagtctagacccacacccagggagcacacaagagtca

SEQ ID NO: 3459 - DNA, 1600 bp, mus musculus; identical to SEQ ID NO: 3458

SEQ ID NO: 3460 - DNA, 1000 bp, mus musculus
aacttcagagttaaacaccctgctctatggaccaaccaaagcacttgctgccagcctagtactaagttgaatccttaagagagtatctgagacagtgtccacatgggtcatgtggagcaagaacttactcccacaagttgttctctaacctccacagatggccatggtgcatatgcgccaacacacagttaataaacataatagacaaccactgttataaagagtcagctttcacgggactcacataagctttgcttccctgatcgcataagaaaatcatttcccattcatatactgggaactgtatgggaagataagtgcccaaacagttcctatgttgtcatgtgcttatccagttagcattgtaaaaggaacatgcatattactaagaagcaaaaacatttcaggatgactgatttctttttttattaaatcactaagcttagttttctattttgttctccttataaatttttccttcataaaattacttaacatacttgtaactactaatgcatcttttacatttttaagcaaaacaaaacaaaaatttgccagttatctggaaaatattgcatacattgtgatgttggggaaatgaagcattttaaaactatattacacataaaatgcatagtattcaaatgggacatgaaatgcactataatgcagcttcgaatgtatggctttcaaaagtgagcgtgagccaggtgtggtggcactaggcttcaatcccagctctctgcaggcagatctctgtgagtcctaggccacccagggctgcatattaaaaccttgtttcagaaagaatgactgtatctcgtattatctttgtgctaatatctatacttcatacataatctaacttgccttgccttagaaaactgcatcctatatcaggaattctagatatttcttataatatcaaaatgagtattttgattgagattcataaatttagaatcattcaccactgatacatactttaaaaattcttttc

SEQ ID NO: 3461 - DNA, 1000 bp, mus musculus; identical to SEQ ID NO: 3460

SEQ ID NO: 3462 - DNA, 1000 bp, mus musculus; identical to SEQ ID NO: 3460

SEQ ID NO: 3463 - DNA, 1000 bp, mus musculus
aggcttagcacaaacaactcccagggcaggctagtggcaggtgtaggaggcagcactatgggctgcttcgagagtgctcaggactgccagcttcaggggcatttgctgagggcttactccagggcttccattgctcttctcaagtctgcagtgctcactggttatcttttgttttcaaagtcttcctttatacatcttctttgatgttaatgtttactcagtgagagggctggtacctctctctcaacaagggggtgtggctcaaggactcccaggttccagtgcccagcgttctatcagttctagtgccatcaaaccatagttcctagtgtttctcctaaaggtgtctgtacagagacgggagacacagtggcctcttttgccagaagaatcatgttgcccccctgtggacgcctttgttgtataagaacagtcactgcagtggagtcttgctggggatgtctcagtgttgtactcggagtccacagaagtccccaaacctccagcaccccttcaattcacctctccatctcttaaagtatccgtcatggctggaagttcctcgtgcttggctgaccatgagaagcttgtttaacaggcagcctccggtcattcatactttatatgattaggggaaaaaaagtcaactgttctggttttaagttctgtggcattgaagggaacaagggttggaggagcctgtgcatagtttctgtgtctgagagctagccagacaggaaactataagcttccccacagtgtgatgagagggggctgggagtggcagactgacctatgctccctttggccactcaggccagaaaagatgacctgccactgttgcagtaaatctccaacccaaataagctcgggcaatgaaaacacagctcagctaatataaatacatgctgtgcaactagattgggcagaactaccaccacactaccatattccccatctatgagaccccttagaacttgcagcttctccaggccatgtg

SEQ ID NO: 3464 - DNA, 1000 bp, mus musculus
ctgggcaggcagactcagtagaactgggatgttttccatgcggccccaggtgggcatctggctgtgtgaagccactgaccccacatggcccagccctcagtaccaggttctcagtctccctcatctcacaccggatacagtagaggagctgagaacagaataggggccccccggggcgacactctcgtcctcggagatatgggaagagggcagagagagagaggtccccatgcaggtgagagcccttagtctgggctttgatgaacagagacagtctatgggtttagagctttattgtagaaaggcagaggaaaagagaaaaagtagagagagagagagactgaccatggccaagaggagagaagggggaaaaggaaagagagaagaaaggctagagagtaagaaaacttaaagagagagaggtaaaagcttagagagtaagagggagagagtgaggtggggccaagcagcccctcttatagagggcttgttatcttgctgttgctaggtaaccggaggagtctagcctgaaggtcagaagcttggggcattgtgtaagtgactgaaagccaggagcctctcctctggggctgtgggggccgtaacttagacaggagccaggggtccaggagggaacgccttccattccatgtaggtgggaattaccacccattgggtttcacaggggttcaagacctcagctcgattggagaccaggctgtttgtgcatagcccattgccccacatgcactgacaaccaggatgactcaaagtgcttggggcatctgagagagcaaagcaggtgcaaatgtcctgcacctgggtgcattctatcgtgatgcaaggccagttttttcaccacatctaatacagaaggaactacaccatgggttgacttggcagttgcttcccatcatgtatgctgtttaaattacctagtgtctgaatattagtcccccaaaagcaagtattggtacttaattctcaatgtcatggtaat

SEQ ID NO: 3465 - DNA, 1000 bp, mus musculus
aggtgccattggacttagtgttggaacaagagtagagatcccgagggcagttgcttgagaagggctttagttatatgataagtaatcatggttgttatatgatgatttccatgcgctgtatattatattattattgctcttaggaataggagcttttcaaaagccacatattcctactagtatacagcacaacggtagagggtttgcctagcaagcctaaggctgcaagggtcggctcccggggctgcgcagcagacaaacgacagtgtatgagaactcttactttatcgccgcacttgggattattgttgccctttgcatatttattctgggaccgcctgcaaatgcccagcaacccaagagagccatctcttctgcagagaagaaatggggtgtcgctgccactgtcccggagagtgctaagggcttagaagacagtcactggcaataacgaagctccagaaagattcccagaagaggtgtggagggaaccaggcttgaagcaagtcaagagtttgaacagagtgtggaggggagggtagaagggggcggggatgtcactgtaacacactgtctgtctgtctttgtgaattaggattttatcacagtctgtcttcttggcagctgccagtcaaacaccactgccatcgttttatacagatgtggaaactgaggcacagggagcttaaatggcttgggagacctggatggcctaatagcatagcctctgcgcgtccagtgcttctcagtgtgagcgagcgcacagcttgatggcgtgtgccgtaatccacgtgtcatatagttcatccatgggacatgaaccacccgagcctggccacttggctaagtgggtggggtacttccccagcctacacaaagctctgggttcgatccccgatattctgtgagactgggcgtggcaaggctctgcctgtgacctgtgtccccagcccttaggacatggacacaggaggatcagaagttgaaagtcacccttgac

SEQ ID NO: 3466 - DNA, 1000 bp, mus musculus
gtggtaatagagacagagacaaacccaaggttgacaaacccaaggttcagagtatgaaaaagggacaagagagccataatgctgataggggtatggcccaggcagggaagcacagaagctggagagagggatgggttggagccacatgggtctggggcaggaccttgggcagctgtgtctcatggctctttgtcctttttgctgcagacctggccgactgcaagcttgtttctttccccatctgcatctacaaggtcctgaggaacgtctctgatcagatccatctcatcacgctggctaacaatgaactcaagtccctcaccagcaagttcatgaccaccttcaatcagcttcgaggtaggctacgggttagctcgcgcaaggagagtatgaccagccagaccttgactttcagggtctcaccccatctagggaatgtccccagagctagccttggttcaagccgacctatacagtcattcccaggggtagtctttgaagatagacctgtgcctggaggtctctgggtcaaattctatttccatttggctgaacggaagactgaagacaagaagatgagtcttggcttgactctctgatctgacgaggccagcaggcccaaggacatgaatgactgatccccttctagtcccgagcacggcttgctctttctctctttctctcacacattcctttcttggtgcagtttgtgacaggtgccagcaatgttggcttatctctctggcacacacagagtgagtggaaatggttcatggaggatgttaggcaggaggccagcaggtaggcattgtagatcttttgcagtggtatctctggtggctgagcatgatgtactgaaactgtgggaccgtggttctccatccttctggtccatggagcaagacacttgtgtaacagtaggatgctagggtaggagaggtcaggagacacaagatgcctgagtaaggcgggtcctgcctcctagggctctctgtctgtg

SEQ ID NO: 3467 - DNA, 1000 bp, mus musculus
tctcctcgccatacatcccttcttcccttctcctcagaaaacatgtggtctcctttgcatatcaaccagccttggcatatcaagttgcagtaatacctgatgcatcttctcctatgtaggctagacaaggcaggcctgttagggtaaagccgttcaaaggcaggcaatagagtcatatacagcccctgctccgttttaggagccccacataaagactcagctgcacaactgttacatctgtgcagatgacctaggtctgccccatgcatactctctgtctggcagttaagtctctgtgagcccctatgggctcaggttagtgattctgtaggttttcttgtggtgtctttgacccctctggttccttccccctcttccaaagattcccaagctccatttaatatttggctgtgggtctgtgaatctgtttccatcagttgctgggcgaatctctctgatgacagttatgctagactcctgcctgcatatatagcacaatatcatcagtagtttcggggtgggcaccctctcagggcctgggtctcaagcttggccaataatccattggtccttccctcaaatctgctccattttttacccctgcccatctcataggaagaacaagttgtggctctgaggctgggttgtagctgggttggtgtaccaatctctccattagaaaccttgcctggttacagaggatggctggtttgggcaccgtatctccaattgctacacattttagctatggtcaccctcacagattcctgagtttccattagcctaggtttctaattcatcccagagatgcccccttcccaatccagttgtctctcccatcttctccccaccctgtccctcctgtttccatcctcgtcctttccccacacagtctcctccctctatccatccttgatgtctcatctatttcctcttctcagtgagaattaagctttcccatttgggccctccttgttacttagcttctttgagtctgtgg

SEQ ID NO: 3468 - DNA, 1000 bp, mus musculus; identical to SEQ ID NO: 3467

SEQ ID NO: 3469 - DNA, 1000 bp, mus musculus; identical to SEQ ID NO: 3467

SEQ ID NO: 3470 - DNA, 1000 bp, mus musculus
gaatttacattttcatgccagcagagactgtcagatactctggaattggacttacagtcagttgttagctgccttgtgggggtcctgggaaccaaactcaggctctctataagtgtatctataactctttggacattctataacctgccagcttcccaataatgtcatggagacctttaattaattatgaaacctttaggccataggctaggtttattcccaactagctcttatacttaaattaacccatttatattaatctatattctgctatatggctcatttcctctcctcagtttcatacaatagacttcctctgtgtcaggctggcatctcttccagtgcctgactcttgcccagagtctgttctctccctgaaagtcccacctttcctcttctgactcaactatgggccttttagctcttcattaaacctaacagaagttgatggagggagtgtttacaagcgatgacacagccgtatgaagaacaataccaaagtccagtctgcactcaactctctgccagcacagacataagcatttgagtaatataaatgtaatctttacacagtgcacaaaagacgatcacttcaacatcaggatgttctgttctcctatgagctatctctctagccctccaagtttctcttcactccacttcagctccttcagtcctttctctaactcctccattggtgaccctgtgctcagtccaatggttggctgtgagcatctgcctctgtatttgtcaggctcaggcagagcctctcagaaaatagctacattaggctcctgtcagcaaacacttcttggcatccacaatagtgtctgcatttggtgactctttatgggatggatccccaggtggggcagtctctggctggcctttccttcagtctgctccacattttgtcaacatatttcctcctttgagtattttgttcccccttctaagaaggactgaaggattcactcattggtcttccttcttcttgagc

SEQ ID NO: 3471 - DNA, 1000 bp, mus musculus; identical to SEQ ID NO: 3470

SEQ ID NO: 3472 - DNA, 1000 bp, mus musculus; identical to SEQ ID NO: 3470

SEQ ID NO: 3473 - DNA, 1000 bp, mus musculus
gaagacaacttaggtaatcaattatttccgttatgtggttcccagagatcaaactcaggtcatcaagtttggaggcatatatatttacccactgagaaattctaccacctctatattttcttcaaattttttagctaattacttatgataattgctgtagaccctcttggtcccttgtctgcgaagaacgggtctctggctgcagatggacaaggagtcagcaaataaatgacaagacagaagcaacagaggagattgtgtagaatctgaatgcaatttttcaagtcgagcatctaactttttatacagaagagcaacaagaaacccggtaagatacatcctctgagttacagtgacacaataccaaaggaatgtatacatcaaaagaaggcggggaccaggcagacctctgccactaagaagggacccaggtgtaaagctagcctattgttaaacccaccaccaggggttcttagtaaatgcctgttttatgctgttcctttgggcatagagaagaaacctgactcagggggattccctaactctttcatggtaaacccacctattagctaggccattgtgaattcccttgtctgggtaagactggctattgtcccaagtaaacactctgcagaccagccctgagatattcatgctctgttctttgtaatgcataattagtttcaccagtctctactagaagtaaatttgaatgttacttcttacttaattccttcttactgaattcctactgaattccaagtttgtcagcttcaaggattttctgggacattggaacactggtgaaggcttagctatgtcagaattcaatctttaaaggcacttataataaaataatactaaaagagagcacatggatgcatacaccagactaactcgggatagggtatgagtatacgggttatgagaatgctgaggctccaggaggttgagtttccgtgaaattctttgcctcatgagtgcttccaggcctctcggc

SEQ ID NO: 3474 - DNA, 1000 bp, mus musculus; identical to SEQ ID NO: 3473

SEQ ID NO: 3475 - DNA, 1000 bp, mus musculus; identical to SEQ ID NO: 3473

SEQ ID NO: 3476 - DNA, 1200 bp, mus musculus
agaaaataaccttaaaggttctcagagaaatgaaatttggcaagtggatatgattcgttttacagaatttgataaactgaaatatgtgcactatactatagacacatattcaagatttccatggccaacagctttgagctctgaaaggctgacctatttttaagcatttataagaaatcatggctgaaaaatttggtgaacagtcgaacgatccccagaggactctccatgctgcaggtgccctagcacagctaggatcttgggatcactggtgagtagaacacagcatctgttccaaatcaaccaggaggggcttgggccagcaggaacagggacacaggaaacctgcccgaccagcagctgggattcattctggtttgcatcagccctgtgccaccttgggcgtgaactcagtgaacggacccatggtccccagaggtctctacatgacacaggtaccctagcacacccaggatcataggatcactgaggagagtgggcctccaaagagggctctgactctgggactcagggagaaaaccatcttgtatcctggatctctcagaaaccagtccacacaggagagcacactggccacagaagcaacagagcttcttggatagggtccctttgggccttcatcttcagccaggaggtagatctgagctccagacctccctgcaccttccttgccagaggagagcttgactgctgagagtgatctgacccctgggactcaagagagagtttgactcccaggagtattgacagaggataagagaatctcaggaggaacaagctctagccagagatagctggaacatctcacaccagagattaccagaaaaggcaaacttaagaatcttcctaacagaaactaagaccactcggcatcatcaggacacaatatgcccaccacagcgagttgtggatacccggacacacccaaaaagcaagattcagatttaaaatcatatctcatgatgctggtagaggattttgagaagggcattagtaactcacttaaagaagtacaggagaacacgggtaaacaggtagaagtccttaaagaggaagcacaaaaaaatcccttaacgaattacaggaaaacacaaccaaacaggtgattaaattgaataaaaccatccacgatctaaaaatggaagtagaaacaatagagaaaatccaaagggagacaag

SEQ ID NO: 3477 - DNA, 1200 bp, mus musculus; identical to SEQ ID NO: 3476

SEQ ID NO: 3478 - DNA, 1200 bp, mus musculus; identical to SEQ ID NO: 3476

SEQ ID NO: 3479 - DNA, 1000 bp, mus musculus
gagttctgcaggaccccggcacccagtagtcatgtggaggatgaaggctccggctaagaagcccttgattaaaagagagaagccagaagaaacatgggcagctgtcagaagaggctctgccaagaaaaagatccacccagttcaagtcatgagtgaattcagagggagacaagtctactgaataccctcatccactctagtgcccatttctacaccccaggctaaccacactgctttatttcatggttcattggttctttaatttcaccaagtttcagagttaagctcacaaataacataaaacattggggttaaacaagtgtgtaagatgtgtgtttgggatcttgtcattgtgtactctatacggccagcacaacctagttaactggttggtagtacctaggaaataaaactcacgggtgttgcttaccactacccttcagagggaagacttatgttcattacaaaatgagcgtaagtgataatgtgagttcctattacccagaaatgtctgcacccatgcattctatatccctgggaaggaaaaccctgacatacgctttgcacttgcattttgctagacataaaagagtttatcaactattttcccaattagcatccatactttctttaacccacctaaccttgcatctaacctgccaaaaatgtgtcaccctagccctgggaaattttaatcactgttcatcatgaataggttagatacctgtaaccgagtgggtgtggccaaccttcttcctagaatttaaaagtcaggcatgttattcaagaagtgctttgatgaccctctgtaggctgccatcttggaacataatgcttgaaccttgtatttctatagtgatcagaagttctggactcttagtattgggcttatcagagcatacctgtagagtcatcacccactggagaagtgaatttttgtttgttgttggtgtggggttttttttgtttatttgtttgtttgtttttggtattggaaata

SEQ ID NO: 3480 - DNA, 1000 bp, mus musculus; identical to SEQ ID NO: 3479

SEQ ID NO: 3481 - DNA, 1000 bp, mus musculus; identical to SEQ ID NO: 3479

SEQ ID NO: 3482 - DNA, 1200 bp, mus musculus
tttttaattaggtattttcttcatttacatttcaaatgttatcctgaaagtcccctataacctcccccctccctgattccaaaagcacccactcctgcttcctggccctggcattcccctgtactgggtcatatgatcttcgcaagaccaagggcctctcctcccaatgatggctgactaggccatcctctgctccatatggaactagagacacagctcttgtgggtactcgctagtttatattgttgttcctcctatagggttgtagatccctttagctccttgggtactttctctagctccttcatagcaagattcttatgtttgcctttctccatctggtaatctatggtatttgatcttcttgctgtctctggctggagcttgtttttcctgtgattctgttagcctctgtcagaactcctgggagtccaactctctcctgagtcccaatggtcagagcactctctgtgggcaagctgtcctctggcagggaaggtgcattgaggtctgaagctcagacccacctcctggctgaagatgaaggcccgaagagaccctgtctaagaagttctgttgcttctatgtcccatgtgctttcttgcttagactggtctctgagagacccaggatacaagatggtgctttcacctgaatcctggggtcagatccctccctggcggctgactctcctatggtgggtaaggtgcccagaggtctgggtctcagctctgcctcttggctgaggatgaaagcctgaagggaccctgtccaagaagctctgtgtgcttctgaggcctgtgtgctctcctgcacagatttgtctcctctctctctctctctctctctctctctctctctctctctctctctcagagactggggatacaagatggcgctgtcacctgaattccatggtcagagccctttctggaggccaactctcctcagtgatcctaagattctgtgtgtgctagggtgcctgtggcatggagaggcctctggggaccatggtaccttcctcagagttagtgcccaacatgacactgggctggcactgatctgaacaaaccagtacagaggtttttatactttccgaattttataaccaataccaccatccatttcagaactcacaatgaagcccacaaccacccatataacacatagtttcaagctcttgataaccatatactgtta

SEQ ID NO: 3483 - DNA, 1000 bp, mus musculus
gctaggaacatgaattagactgaggaagaacacaaagaatgactgcaggttgaggtgacttagacaacggcattttccactgacaaaagaaatagtggaggagtcttcaagtgaccaatagaagggtttaaattctagtcttaaaaatttctgccccacctaggaatccatctcatttgcacacaccaaacccagacactactgctgatgccaagaagtgcttgctgacaggagcctggtatagctgttccctgagaggctctgccatagcctgaccaatacagatgtggatgcacagagctaaatatccgactgagcacggggaccccaacagggaagttagggcaaggactgaaggagcagaaagcggttgcaaacacataagaacaacagtgtcaaccaaccagatccccccagagttcacagggacaaattcaccaaccaaagagtacaaatgggagggcacatggctccagctggatatgtagcagaggatggccttctcgggcatgggaagggagccccttgggtcctgtggaggcttccagagtagagaaatgctagggcgctgaggcatgagtgtgtgtgtgggatcgccctcatagaggcaggggcagatgagaagggatagggggcttatggaggggaaactgggaaggggtataacatttgaaatgtaaataaataaaataaccaataaaaagctttctataataacttgctaagtgatgatttgcagatttctaggaaagaatttaaagcccattacatgttatcttggctacatggaccacaggttgatttacatgaagtattaggaatgtaccatagcactgggataatgtcagtgtcagttttgtgttgtgggaaatattaaaaaggtgaatcagcacattcccacaatagtgttggctccaccaacactctgtggctagcccctgcaccaggagatctcacttgcttcatctctcaacccaccaactccccggccctgtggcca

SEQ ID NO: 3484 - DNA, 1000 bp, mus musculus
gcctttcaggtctctcagtaactccaagcctctctgaacttaggtcaggctgggccagcgaaaagctgccaatccagtgaggagtgcagtaggacctcgggtggctcttcaggagagaagatctcttcccaagtgttacatagagctcttggaacaaaagactcagacaaaggaatagttctcacatacctttaattccctgcatggatttatatacagttctgggggtgattcagggtttgacagcaggcacctctcattgacttggactgagagtttggcgaaaccttatttgcatgtgggaaggcttggtgctgttcctaagcagcctatagccatgcttctcttgtgggggttgtgagggcagtaacttcaacaggagcccgggtccaggagacatgagagaactccttccatcccatgtaggtgaattatcaccaccggttacctgggctcaagatcaagcctcgactggaaaccaggctatctgtgtgtagcccgttgccccacaactatggtaatagaaaatgtgggaatagctcctatcttcacagctactatcttacattgtggacaatttgaccaacacagtcaggtaagaaacaaaaataactttcactctttcttactacatctaatcttctctaatcacacaccttcactaggattcttactcaaagactcttgtccaactatgatcaagtattttattatttcctattatttcaaaatactattagatttgttatgggaattattgaattgtggcagtaaaattaaagctatctatcctgaggcctatgagatagcttagtagggaaaagttgtctactgccaagcccaatgatctgagttcgattcctggaatccacattggagagagggaaaagtgattcccacaagctgtgctcggactttcacttgtgcacaattgcctgtgcatacacacaatcagtagaaatgcaattaaatcatttttataaagactacaatataggaa

SEQ ID NO: 3485 - DNA, 1200 bp, mus musculus
cttctaacaacggaactaaggagtcctgtgtttaggaaagttctctgcgggggaaaaaaaagagataaagtggtggtatttgtgatgtagactttcattgtatgttgaagttcttcgattttttaaaaataattcaaatcaaatgttaatgaaatttaaaaaagaagaagaagaagaagaagaagaagaagaagaagaagaagaagaagaagaagaagaagaagaagaagaagaagaagaagaaggggggggatctgtttctgttggggccatacctgccatctttcttctgagcccagctgagggcgccaaggactccagagtgctcttcatgcctcagaacctcaggatcacctcgggatcatgggtgagtggaacgcaacatccactccaaagaattgtggagggtcttgtgccagcaggaacagggacggaggaaccctgcctgacctgaggctggaatgcattcaggtcagggccagccccgccatcttctgagtgaacccagccaagggtgtctagggcaccagaagactctccacactgcaggacccctagcacacccaagacctcctcatcacctgagaacacatgggccatagaagcaacagaacttcttggtcagggtcctgtcgggccctcatcctcagcaagggggcagagctgagacccagacccctgggcaccttcctttccagaggagagtcggcctacagggagggctctgaccccaggactcaagaggtggatcagagctccagactgctggacaagtgccttgcaagaaaagagcttgcctgcagagagtgctctgaccactggaactcaggtgagaggtagactcccaggagttctgacagaggctaatagaatcacaggaggatcaaggtccagccagagacagcttgaacattaacaccagagatttccagatggtgaaaagcaaacataagaaccttctaaaaacaaaaacactgggcatcatcagaatccagtacgcccaccacagtgagtcctggataacccaacacacctgaaaagcaagatgtggatttaaaatcatatctcatgatggtggtagaagattttaacaagggcattaataactcaaagaaatacagaacactgctaaacaggtagaagcccttaaagaggaagcacaaaaaaaatccctcaaggaattacaggagaacagtgcca

SEQ ID NO: 3486 - DNA, 1200 bp, mus musculus
tgtaagaattgccaacgttttctaacttgttttacaaagtgcaaagtgactaaacacactgcgggtgctcagtagatattttttagagagaggatggttaaaaaaggatggaggggccttgaggttgctcagaagataatggtgtttgtcatgaaaagctggcagcctgaatttaagtcccagaccccgtgaaaggtggggacagagaaaactaactccagagttgtcctctggcctgcatgtgtgctccatggtaagaagatctcttcatacacacctcccaactgcacgcacgcacgcacgcacgtacgtacgtacgtacgtacgtaattacgtatgtacttacacatctcccatcgaggtactcaccaagagaaggttaaaaaaggatgaaaggaataaacagaaaaggaaggaaagaaagcagctgatgggatgtggtgtttccccctccatcttcccagactgcacctcctgagcaatgcctctcgcctgcgtcctacctccatgattccatccggtcttctggacccattccttcactacactgaagttttctttctctcgagcagtagttgtcacaaggaccttgagttgtagctgtgtgtgagccaaggtgtcttggtctgtgaaggtaacctgaaggcatgggagcatgccttgcttctgtcagacatctctagggtcaggggtagccatgaggctgtgcgttcctttaaaatacttcagggtggcctaacttttcttagatggtggtctattttgtttgatcggctacagttcggtttgataaaggtgtgatgggaaatggtcccatttggaagctggctgaggcctagaagtacatgtagtactcagctgagcagcacgatacagacagattctcgctgatattctgctcttggtagctgtttgtaacggacaacaacaaagctttcatatgagttgactagtgatggtgtttttgcttgttgcctgtatatgtgtgaggtgtatacacatgtgcacgtgtatttgcatgtgagtggacaaacaggtgtgtgtgtgtgtgtgtgtgtgtgtgtgtgtgtgtgtgtgtgtgtgtgtgcgtgtgtgcatgtctttgtgaacatgcctggagaggcctgagattgacattgggtattttccttgatcactctctacctgatgcagggtcccacatttgaactcagctcacag

SEQ ID NO: 3487 - DNA, 1000 bp, mus musculus
agctgtggtcagtcaaaagcctgccttaagatacacacacccattcattttctctgttcacttggtccagtctccaggaagaggaagaaaagaagaaaagagggaggacattggcttcagcatccccgactctggcctcttgagtctcaggactgctgctgaatgctctaatgtctgtgggttggctggggccaagaaagcagcatgggtgcaggcccctgacagttgtgcagatgaaacttagctaagtctcctgaaaatccactttctgaagaagatgtcatcaggttagctgtgtaaacacaagaacctagcgttgtccaaatccctcccctcataatccccagggctcaaacctgttgtggtttttctttaaagatgtgataggaatttggagctattatttccttttatgagttgagaaggggtttgcaagtggtcttacttatgatgctagacactattgctatagctctccccggggagctgccattgtctggtgacacaggacactgctttgtaattctgacaggccgactctggtactgtccgtatgtccaggaaagaaaattttgtggtcaaacatctgaaaattggcatgccaggtattgaggacatgtacataaacacaggccagaactaacattgtatatttaaagcaaaaacaaacaagaaaacccagaaaagacagtaacacaccaaaaggttttcagtgtagaaagggatgaaggataccataaaggaagagttttaaagcatctgaaaggcaactcatatttttttaaagacagtcaaaatagtcttggaacaaagagagttcaaaaactgtttggtcctagtaccacataatctaaaagacactgatgttgggggacacattgatttcggggctctagcaataaaatctagatgtgagcctgtaacagataccaatgtaaatgatgtgtgcaggcattgacaaaacactttgcctgcctgctattaatgttttccataatta

SEQ ID NO: 3488 - DNA, 1200 bp, mus musculus
ctttctccctaccttttcaacatagtacttgaagtattagccagagcaattcgacaacaaaaggagatcaaggggatacaaattggaaaagaggaagtcaaaatatcactttttgcagatgatatgatagtatatataagtgaccctaaaaattctaccagagaactcctaaacctgataaacagcttcggtgaagtagctggatataaaataaactcaaacaagtctttgtcttttcttaacctcactgacctttccggtttaacagagtcccggagggacagcgtggccagcaaaccagttggctgatgaagggttgggggcagctgaggcaagggaaacacggatcaggaagattcttcaatgactctgctcaaatcccacagtccttcctgtgggaaggacacctagcaaagtccagaaaggacatggctgtgtactgtgtggtaggttatttctctgttgcgggttaaaatagccaattcaaaccagattagattatactaaagcacattcattgggaagctgctctcaggagagttcactggccccaagaattgaggccaggggagtcgcaatgggaaaagggctggggagtgggggcggagggggggggcgtacacgaattgagagaaggagaagagagaaggaagatttaaaagtctggattatatagggaaagcctctgggggaagggcagcccagcccctggggtggaaagttcaaggttggggggcagggtatgccagaaagggactgaggaatgctgggagaacctggaggccaagcggctttgatgtgtaaaatatgctcctcagtcctttgtcctggtccagcaccaaacactgtgttctccgcggttcctttactatggatgactttggtgaagataaagagacttctggacctggcatgaggtggacatcgccctgaaattcagccacgttgctcattcagatgatgaatccttgtaaagggatccagaatatccctgccatctacctacatccttggaagctttggtccatgtatgtctaccacagtctcttctggctaggctttgtcaaattacacaaactagagacagctgggaggagagaaactcagctgaggaattgactccattaagttgacctgtgagcgtctctggggcatcttctggatagctcctcaatgtaggaggctgttgtagccctggac

SEQ ID NO: 3489 - DNA, 1000 bp, mus musculus
ccttctcggtgtattgaagtggaaatttatggttgtgtcatttgatgcagactcagcatgatggtttgctgaagcaatatccatgagaggacacgtgacatttgagggagtagaagtaagacccaatagacagtgatgggacacttgcatagctagccttgccacacttcgttggtctcaagagtcttcactttgttgagagaggcacagcaacggacttctccgggcatcccatctggttctggtcactcctgctgactaatgtcaattccgaggaggcctggctgtttctgctggattgtgccaccgctgctgatttgtgtttggtatcctgacactactaagctggactgctagtatcctgataacagagtttagaattgctccccaaagaactacttctaaacaggtccacatccccttgtcctatttaccatcctttctcccctgactttggacagtaggctagaagtggggatagatgcatttaagaatccatattaaactgggttttgaacaatctaagcctagagggtagagtagtctgtgcaggcatctgcacagaaattagagatttgtgggttaaaagtggtgtcccacatccgctcgggactccagctgcttggtgagacgggacctggaagtttgactgcacacaccccttgcctggggtgggggactggggtgttgctgcgagaagccacaggaccccactccaggagtaagggaggtgcagtctcagactctctagcaccacagatgttgctgtgtgcctcggaagagcttggctgcatggagggcagggacatcaggttctagctcttggacaccacagataccactggatgtcaaggaagagctgtgaccgatagccacagaattatggagctggggcctcatgtcaggagcctagtgtctgggagcatggcaaacaccttccattccctgcagaattatctgctgggtctctggggtttaaacctagcttgaccagaaaaga

SEQ ID NO: 3490 - DNA, 1000 bp, mus musculus
ctttgatttattaagatttgttattgctttgatgttcttggtaggaactgccctttcccaccttctgggttatcagagataggtttgtccatctgcagcctgattcaaacagattaggccagctgacttcttttccccactctcattacatagcccaactgccctgccaaccttccttcatttcccaagtgctacgatcctttgctcgtggcaccacactggcttgccctcctcacttctggtctatcagttgctctttgctccccccaattcttcagaacaaacaccacctgggaggtgtgttttgacgtccaggcctttcattcgaccttcagttctgtgtgtttctggtgtccttcctccaccacgtcggtagtcctgccatggtctgacttctgctgtttgtcaccacccatgtttcttgtatgattttgttttgttctgttttgttttgttctcaacatggaaccctttacgatatacacaggctgccttcgagtcttttgtcttcatcccctacgtggcccatatttgctgtttgagcacacgtatttattttatcctcgtttctcccagacacatctttaattttcttctctcctgttatttctcatagactatccactccagggtttgttacaagcccagtgaatcttcctccatccattaaataaaagtatccagatggctgagggctggagtagatgctaaatctctctggttggccttggctctgccagagtctccagcagccatccagttcccgagaagacagaagttaatgagctggggagagagactaggggtgagaccaggataagggagcagcatctcagctcggaggaatcactgacacctgaaagtgccccctccccccaggcagctagaatgaggatcttaaagcccaaggttcaatgacagacctactctaacaaagccacacctactccatcaaggccacacccactccatcaaggccacacccactctatccgggcca

SEQ ID NO: 3491 - DNA, 1200 bp, mus musculus
ctgatactgaggacaacctttgtactgtaactccaaattcgatatcttctgtaaccaggtaaaacctcaagtggagggactgggacaccaaaccagccacaaaaccttcggcctacaggttgtcctgcctacagagtgttcttggacaggaacccagcagaatcataattaaagcgaccagagagacttcatctaacaactgatgggagcagattcagtctcatagccaaacattaggcagagttgggaagttctgctaagaagagggaggaaggatcagagaaaccggaggggtcagtctcacaccacaagaacaacagcctggcccacaggttattcaattgtctgggactgatggggactcagagataaggggtctgacctaggtcctctgcatatatgttatggaagagtagtttggtgttcttgtgggaatcctaatgtgggagcaggggctgtccctgaatcttttgtctacttgtgggacctttttcttcctatggggttggcttttccagccttgatatgaaggtatagcttgttatcctgtgtttggctgatgtctttggtaggcctgctcttttctgagtggaggcagagggaagatggatctggggaaggagggaggtgggggagagagagacactagagggaggtgaggaaactgtagtcagtatgtaaatatatgagagaataaaaaaaaactaaatttaaaaagcagagcacatatttccaatatacaatggcacagaatataccttaccattccaaaatggaagaaagagagataatgaggaaacagtgggccaaaacaagactgaaattcagcagggcaagctctaaattctgcatctccatgtctgatgtcaaaaatgctcttcaggtctccaactcttcttggctgcagcacactggtctcttaggctggttctgtatgagtctgcagctttcctcagcaggtctcttgtgactctggcatctccagcatgttgggtttactaacataatccaggcttcatctttacagcttcacacaatgccctctcttggcctccatgcagtgatgttctggcacatgccttgccccagcagctttccttagctgtggagggagtttccacaaccccatttttgtatccttgacactaaagctaggagaaggaggaggaggaggaggaggaggaggaggaggaggaggag

SEQ ID NO: 3492 - DNA, 1200 bp, mus musculus
aaattatactttacaacttacttcttacactttattagtgaaatatgtgaaattgtgtcttcatgatatttataaagataatgatagaatctctgtgtattagaataaataggataaaaagtttcaaattatgaagagttatagtttaaatgaggatacatgatatagctatttcttgtgagtctatgccagtgcctggcaaatacagaagtggatgctcacagtcatctattggatggaacacagggtccccaatgaaggagctagagaaagaacccaaggagctaaaggagtctgcaaccctatgggaggaacaacaatatgaactaaccagtacaacacccccccaccaccaccaccactgagcttgtgtctctagttgcatatgtagcggaggatggcctagttggccatcaatgggaggagaggcccttggtcttgtgaagattatacaccccattacagggcaatgccagggccaggaagcaggagtgggtaagttgagaagcagggcatggggagggtataggggactttcagagaggaaactaggaaagtggatagcatttgaaatataaatgaagaaaatatcttaaaaaacaacaacaacaacaacaaaaaaaaaaaaaaaccaaaaaagtgactcatgatgtttcaacataaagatcatggctgagagtcatccaattggttagaagtttagctttttttggacatccgatattttcttgttagcagtgacattaacaacccatgcacttagaatactaggtgtgggtttgatctcttgaatgccccagtatcaaccttgtgttgtctttgttgagttgggaggcctggggtcctaactgtaataacaatgatgatggctactgctgatcaagaattcatagatgtttaatttgaagtagctagaaacatgaaattaacaggttattctagaagtttctgttataattttttgttaaacaaaatgaagaaaaaatgttgcaagtgtcagagagaaaacagacagagatagagatggagggaggaaagcaagatgagaaaggaagagggggaagaactttctagtgcatttctcagtgctccataaattactcatgaaggaaataccttgttgttttctgcattgctacttattctgttagcttagctatatcctatattatattgataactattgttgaagaaatatat

SEQ ID NO: 3493 - DNA, 1000 bp, mus musculus
acccccctgtctccatgtggatgtcaccaccacccccccatgtcacctgacctttaaactccctggggcctccagtctcttgagggttgtgtgcatcatctctgaatgaacacagacccggcagtcctctgttgtatgtgtgttggtggtctcatatcagctggtgcgtgctgcctgatgctaaggagtgctcacaaaaagagacttagcatgacctcactccagaagacccaataagcagcagaaagagccagaggcagatagtttcacccaactattggacagaaggagctgactcctgttgttgaattagggaaagactgaaagaagctgaggatgagggcaactctgtagaatgtcccctttcaaatcatctgggattgtcaatcaaaaagtgctcatgtatcttatgcagccaaataaataaatattacaaaccctccacccattactatccaaacactgtgtggtaaaagtaaataaccacagcctatggatagttttactttcaaccaacagatacaggatctgaaatatggagaatgatattttattgaccttattttgcatggatttgcatattaagtcttgacaacttatctaatcttaatggagttcttttaaaattctattttcttcctgttaatgtaaagatggttgaatatgcaatattttaggcatatctatggtgagtaaaatttgtatataagtcaggctaaggggagaaaaccacaatcaaaaccctacggagtattgggagagatgagttgtgggttcatgcgagtcttggctaaataatgaaactctgtattgaaaatataaaaaagtaaataatatatctctttactacttattgaaataaaacacaaaaatcacatatgcctctatctacacatcagttcacctgtacacaaacctgatgcaacaggcccttggatgaaagtgtgagtcttgtagctacaccttctttcagtctttataacactcacatatatccagt

SEQ ID NO: 3494 - DNA, 1000 bp, mus musculus
ttttcctgtccatagaactagctgtggagatctttatctctccagctaactagcaaagaaagttgcccagtgagcaccaggtcacacgaggaaagatatgcaattctaatgaccaccagcactgggcgtcacatgtcctacagcatacttacctcttggctgaccaaaagctccttgaatgaaggaagagttcgttttgactcagagacttgggggttggggggtacagtctgccatggtgggaagacagggtgccagtgcatcagagagcagaagaaacatagggcagggtcttagctactctccaccttttctgtttaattctgtctgggtatccattccatgggatggatgtgggctgagtccctgaaagccttaactatggatgcaattaccttggcaacgaggggtaaaggttgacaaactccacttctaaaagcagagatctgagatgatggaaggatgttcacttggtgcatcatttagatataattttattacatattataaaagtaacgttctctctcttagatgtaagtgtagggattcagacccaggacaaacattgaggtaggtgcctattttacataccaaagtggacttggcctccaggttcttctagcatccctcaatccctacctgttactgagcatggctggcatgcccagccttgtccccggaacgttccagcgcagggcccgggcttccccagaagctctttaccacagaacacagatctttttgtatctcttcgcttcgctttgcttcgcctcacctcacctcacctcgcttctgtctctgtctcccagtgtgtgtctgtctgtctctctctgtgtgcctgtctctgtttctttctctgcctttgtctatctgtctgcctctctgtttgtttgtctgtctctctctccttaaatgtgcccactctttctcttttggtcttccacctccagtctgcctccctccctctccctggtggcttcactgaccaactcctgtgtac

SEQ ID NO: 3495 - DNA, 1200 bp, mus musculus
agaagcctttcaaaatgacatcttcctttagatagataacaatgcaaaggtccccaaatcctataagagataaataactaattaattttcacattataaaccccacatcaaaaagttgtttttagatggcaaaacaatccctacctttcctactttacacaagaatttatacagctttaatccattcagttgactttttaaaacatgcattcaatttagataatcctattcattctttgtatttaaagctccgattgtgatacatcaaaaattttgtttcatagcatgtaaagatgacacagccaatagtatcagcttttgaagcttttctctcaggcttggtactacacgaggtagcaacggaggggtgagttgcttcttagagtaagagttctgtccacattgctattcatccttaaacttgatggattaacaacgggttttatatttatttggggttcctgtgtttgagtatctttaggaaaaattgccctttcacccccaaagtaatatttttcttcattttatgtttttacacgtgttcactgcatgcttgtacaggacatgtgtgccacaagacacatgtggaatgtgtgtattttttgagagtcagttctctgcttccaccatgcagtcagactcggcggcaggtgcctttcaggggtcagtcactcccgagctccaaatttaagaagttgcaccccaatttgaatctggtttaatcagtaacctcgagttaaccatttgtgcacataaataaataaataaataaataagattgctcttttatgtttctttcttcttcagcatgtgtttaattttacttactgatgttgagtatatgtggtaggacttttgcagattttcgggttgagcagtgtgagagctatggaaactgggcacagaaggtgaggaacttgtccccggagcttccctgtcagggacttcccggtgtttattattgttttcccccatcagaggtaacttctttccttattttatatgcacaaaattgtatggggtcatagagtatttactattctgtggactcctcttccaaaaaatcgctggcacttaaatatatccttggactgcctggttttcattactgaggaacactcaataatgtatttattagtaagagtctgtgataatgagaagagacttgtggatcctggcagacaaatggtaattgtaaag

SEQ ID NO: 3496 - DNA, 1200 bp, mus musculus
cacacaaaaaaattatatataatataaaaaattaaaaagatttatatataaaaattatatatatgtgtgatttttttcttttttttttttaaaaggagctgctccctagaggcagtgccaacatggctgctgtatcacatgtgcatcagtaggtggcaaagaggagagaggctacgtctttgctcagtgttcggacctgtgaacatctgaatgattagtagactagccttccctgaaaaaggtgaacctgagaagacctctagtatggtgccacacgggcctgggcttgctccaatggtggagagcaagccgaagactagaagaaccctgcctggggctgctgcctggcaccagtcaagtgccctacaggcctggagaacagaccattcgcaaaatgagccctacccagtgccataatagacaatcaggacataacactcctaaaatcactcctgagacaaacccagaccctcacccctggtacataaaaggaggaagtaagcaatgaagaaatggaagagaaagagaaacagaaggatgcaggtacaatgatgacccacagaactgcagaggatagtgagaaacagcctgatgtgaatagccagtgttgccacctgggaccatgtcccattgcaatggggcttctgggtctgtgctgccaccaccaccagaggccacttctgagtctgtgccctgcagcagtagtggtcgcttaccaccaagtctgggcagatgtccctgatctgggctactgatcagggatatgttgatgtctgagggctgtgtgagaaaagagctgaccctgggggaagtgagagcagaagagctgaacaagcccctattcaatattcaagagagcagtctggcacattgtgggagttgcaggtgagccggatgagagtatgaaagcagtagagttggtgagatgactacccccagatacctgtcaagcctctatccagggctttgaattagcccacctgaacatcgaccctacagatgaactgctggagtgcttaaaggggctggtcctatagatccaaaacgacaggatctccatgacctagggtaagaacaggatatctgagtcccactgagggtccagtattgataaagtagcagaggccacactcataccagaccaatgagtcattgcaatggacatttgtaagcaaaggagtgtggacaaaagggtatact

SEQ ID NO: 3497 - DNA, 1000 bp, mus musculus
actgagaccagaggagacgatccttttaggtgtgtgggatccacaggccagcagaaaacagactcaggaacagcccttgctccagttgtttagcacaccaaggtatcatatgctattcatgtgcagggggcctaggtctagctggtgttcaatctttagttggtgagtcagtctctggcagcctctcagagtcgggctcagttgactctattggttctcttgtggagtccctgtcctctttgggtccctcaatctttctcccaactcttccttaagactactggagctctatttaatgtttgggtgtgagtgtgtgcatgtctttccattggctgctgggtggagactctcagaggacagttatgctaagctcctgtctgcaagcataacagagtatcattaatagtgtcagggatttggttctttcccatagggtgggtttcaatttggggcagtcattggttggccattccctcactcttcactctttgtctgtgcacaccttataggcaggacacactctgggtcaaatgctttatgggtgggttgctgcccttatccttccactgggagacctaccaggctacaggaggtggccacttcaggatctctatccaccactgctaggaattttagctagagtcacccccttagataccctggggtctctctctgtcacaggtctctgacatgccgtagagatcgctccccaaccccggtgacccctctttatctcccctgctctccctacatatgattgtcccctcttcccttcccatccccttttctacccagttccctccttccatcgacctctgatatccattttgtttccctttctgggaaagtttcaaacatctcatagaagccaaataacaaggatggcacaagcctcacttcttaatactgttgaacatgggtttaagattaaacatagattggacataagatacatatgcaaactggaacatttatgtacaaaattaaatgccttagtaaa

SEQ ID NO: 3498 - DNA, 1400 bp, mus musculus
tagtgttgtcacagtctttgtttaggctcatttctcctcctttcgaatgagaagatgagttaagcaatatctaattctcgtgtgtgtgtgtgtgtgtgtgtgtgtgtgtgtgtgtgtgtgtacacctatacatgtgctttcaaggataaagtgagtttaccaatatgatgtggatttgaagtcttaataattcaaaaagccacaaagactcattgttagctgaaaattagagaaacaaggcgcgccagatagtcttatgttaacgatacagagtatcagaaaggagggaacctcaataagaacatgtctccatagcatccagctgtcctaaggtattttcttaattagtgattgaaggggaagggaccaacctactgtgggtgatgccatgcctaggttggtgggcctgggttctataaacaatcaggttgagcaagccatgggaagcaagcggtagagggtaccttgcaatgtcctctgcatcagctcctgcctccaggaaccagtctgcttgagttgctgacatgatttccttcactggtgaacagcagcgatatggaagtgttctctccaattcctttctgatcaaggtgtttctcacagcaatattaactctaactaaaatggaagtttcctccaattcttccatcctagttcctttgtcctggatcaaagcaccacttctcaaaaagcttctagggatctttctcagacatattaggctttggaaacctcacaaataactttgtctttgttctatctctataatttcagtacaattctgtattctcttgacaaaacaattcaagacccaaactgcatgtgcttatttaatatatttatcatatgtatcaaatgcctattttaaatgtgtagtgtcctccgattcattcctctaaagcaaaaaggttggaggccaaaaccaggatgtacctttatatcttttttttctttttctccaacaaaatatctaagctcaaaagggccctaaaaggtgtaatgagtagtactccaatgtgtaccacattttctgtatccatttctctgttgaggggcatctgggttctttccagcttctggctattataaataaggctgctatgaacatagtggagcatgtgtccctcttaccggttgggacatcttctggatatatgcccaggagaggtattgcgggatcctccggcagtactatgtcaaattttctgaggaaccgccagactgatttccagagtggttgtacaagcttgcaatcccaccaacaatggaggagtgttctcctttctccacatccttgccagcatctgctgtcacctgagtttttgatcttagccattctgactggagtgaagtggaatctcagtgttgttttgatttgcagttccctgatgattaaggat

SEQ ID NO: 3499 - DNA, 1200 bp, mus musculus
tgtcctaccagagttccagtgctctgggtgggcagacatggaaggactgcggcacgctttccaggaggccccgggtgggtgtctgtctgtgtgaagccacagaatcccagcttgtgggagatggacgaggggcagtcctagataataggttctcagtctcaggcatcccatgctggatacatcggaggagctgagaacagaatgggggcgggggggggggggcaggtcagttagccccagggcagaagggaggagagggcagggggagagggcattgggtggttccaatgcgggcgagagtccttggtccagtctgtggctggactgcaggaaggccttctggcagaaggttagactcagctctttagaagaaagcctaacccatcattcaagtatggttggccttgatgagcagaggcagtctatggttttagagatttagtagaaaggcaaggggaaagagagaaggtagaaagagggagagaggccggccatggccatgtggagagaggtgggaagggaaagagagaaggagggccagagaagagagtaagaaaggtgaaagctaaaaagagcgaggaggggccaggcagccccttttatagtgggctgggctatcttgcagttgaagggtagctgtgaggaggagcatatctgggtatagtcaggtcactgtgggagtagagtctggccagaatcccagaagcttggaacattgactccgtgacttatagacacagaatcctggagtttggggctctgtggtatcaggcacctgactctgggaacgtggcttacttttccatcccttgtagagtttttttactgggtcacccagatcaagtctcattcaaccaaaatagtctgcctatcacagtcccacagtgtgtgtgtgtgtgtgtgtgtatctatctatctatctatctatctatctatctatctatctccctccctccctccgtccctccctccctccctcccttccttcctctctttctcttcctcttcctctttctctttctcattctctttctctttctctttctctttctctttctctctctttctctttctctttctctttctctttcattttctctttctcttcctctttctctttctccttcttctctttctctctctctcttctttcttctttctttcttttttttttattctttcttacttttatctcctatg

SEQ ID NO: 3500 - DNA, 1000 bp, mus musculus
ccatgctgctaagatactctctactgttctttagctaatttagcttcattctcataatatttctatttaactttcatctgtcttctcaggatttgatttgtctttctgtggtgagctcattgagccagccaccaccaacgtttttagtatcccttaaatctaagtttttatagttggccacaatttatataaagtctctattagctgatatgagattagaggggagcagttattgagatgcaccgtccacgtgactgcatccacacaaaagtctgaagtcgttacttcccagaatgggcgatctgtctagctgtattaaattttggctcaccttctggccacacagcactaaatatcaaatattatgaatcccaaggcatctggtcagatatccctataaaagaacaactgcctctgatacttcttctctctaacagattttaaaatttatagggaagagtagggcgataaaagtagcaactgtgtgatttgcagggacagggaagttagcagggaagcttgcattgcaggttccttgaacagcatccaggagagaggcatgcagatctctctgggcaagaggccactgcttgaagtcatgtttcttattctccctcctggaaatttgttattgattgattattgggtggttagggaaatctgtgtaaatcaatggctgcagggtgtaagtgttaaagaagtatggatacttccataggtgaggtgtgtatagctcaagatttaaagttacctctcagtgtagagtttctgttcttttctttcaagcaaaataaatggaatgggtgtatttctgataactcctttagaaaggaagacacaataatgcttgataaagtctcttttatgaaatctgtcacttaatgtagttcatgaattaactgagacatggccacattgacattggtggaggggttccttgatttgaatgctactgcagatgtttaaaaatcaggtctcaaactctcaagcctgagaattt

SEQ ID NO: 3501 - DNA, 1000 bp, mus musculus
gttctcctgtacttctttaagtgagttattaaagtccttcttgatgtcctctatcatcatcatgagatatgcttttaaatctggttctagcttttcgggtgtgttagggtgcccaggactgggtgaggtgggagtgctgcgttctgatgatggtgagtggtctaggtttctgttagtaagattcttacgtttgcctttcaccatctggtaatctctggagttagttgttatagttgtctctggttagagcttggtcctctcgtgattctgttagcttctatcagtagaactgggagactagctctctcctctgcgtttcagtggtcagagcattctctgcaggcaagctctcctcttacaaggaaggtgcacagatatctggcattcagaccatcctcctggcagaagatgaaggcctgaattagggcctttcccataagctgtgttgcttcggcctgtcccagaagctgttagcttctgtagtccacactctcacctgtgcagactagtctcagaggtatccaggaaccaagatggggcccccagatgctctggcaaagctctccttggtgggttggacacctcttctctggcagagaaggtgccctgatgtctggagctggaaatggggtctgcctcagaagctgtcctctagggaccttggggtgtccgcagactctgcgcccaaggtgacccagtgctggcacagaccagaaggggccaatcaatgaactctattataagctgtactcctttgcccatgcaaagcttgttgagtcccaaggaaggagagaaataggaaatggagatacatctgttgtctatatcatgtaaatcatgttcccatcatgatgttgtttccgtgttctatgttcgaactctgactgtgcacttggcaacatctattcattttataaaaagtgaatatctccatgttgagctgtcttgtgggctgaaattgtttctgatcaccactagtccatgaaaatagtgtccaact

SEQ ID NO: 3502 - DNA, 1200 bp, mus musculus
gaaagaaaaaaaaaaaaaaaaaaaactcttttcaactacatatatatataattttggagaatatctatatctatatatatatatatattcccccagagggctggagagatggctcagcagttaagagcactggctgctatacctaagttcaattcccagcacctatataagggcttacaatcatctgaaaactccagtgccagggttctgatgccctcttcaggcctccccaggcactgcatgtctgtggtacactgacattctcacaggcaaaacactcatacacacaaaactgtagccatacaggaaccccagtggagtgatagagacactaactcacccacaaagctttcaaccctaaatttatcctgtctacaagaaatgcagggacagggtatggagcagagactaagagaatggccaacgaacaactggcccaatgggcacaaatccttaacactattaatgatactctgttttgcttgcagacaggagcatgttatcctctgagaggcttcacccagcagctgactgagacagatacagacacccacagccaaacagtggatggagcttggggactcttatggaaaaatagaaggattgtgggccctgaaggggatagaaactccataggaagacaaacagagttaactaacctggacccttggggctctcagagtctgaaccaccaaccaaagaacatacatgggctggacctaggcctccctgctcgtttgtagctgatgtgcagcttagccttcatgtgggtcatgaacaactggaatgggggctatcccaaaagctgttgcctgttgtgggaactaaaagggggccctggggaagagaggaaggaaagaaccacaccctgccagagttccacctatgctctggacaggcggatgtgggagggctgccagacttttcactcagccccacgtgggcacccaagcctctgacccactcttcggggggtgggggagacaaggggcagcccaacctgtgagccctggggctactctctaaagccccagggttatgggagagagggaagagggaagagaggttcccacaccatcgagagtgagtgcagtggatcttgatgagcagagactctctatggttttagagctttattatagaaatgcagggagaaagagagaaggtagaaaaagagaggggaaaggctagagagaaaga

SEQ ID NO: 3503 - DNA, 1200 bp, mus musculus
ttacaggtgttgtcaacactccaggtttgcagactggtatatcatcacagggaactgcactcctgccacagacacactgcaacttggacggctgtgaagatgctatacccagggagcaaagccagtcacaaaggccatgtgttgagggtagtcctggcttctgtaagaaagtaggctcagcaagccacgaagagcaaaccagtaagcagcacccctccatggcctctcccatggcctctcccataagcttcagactccaggttcctgtcctgtttgagttcttatcctggcccagtaagcaggattcctccgtggcctctgcatcagttcctgcctccaggttcctgccctgtttgagttcctgtcctgacttccttctgtcataacatcactatggaagtttaagtttctttggtcatggtgtttcactgtagcaatagtaaccttaactaagataagttggtgccagaatagtggggtattgctgtgacagacctgactgtgttgttttgaggaggactgtggaaggactttggagctttgggctggaaaagccattggctgctgagagctcagtgagccgttctcaggagtttggaagataagaatcttgagagatggaggcctggcttgtgacgtttcagagggaaacaaagactctagttaaccttttgtgtgaagcatcagtggttctggtcagctgtgattaagacgaggccagcatcactgaggtgaaatctgggaaatgtttccttggggtcagcacacagaggctgtgctccagcggtggtcaaggttgtacctcctgatggcagctgaatttggaagtgtgagagtcacccacccaggtggtgctggttttgaaagcatgaaggggtcatggagagcggctgaggcttgtcactgcgtggcagaactggagtccctggagtggagtccctagcctgttggtgaaaatgtagcccagatacagaagaagactccactattttggagacgccagtaccaaagaacagcagcagcctggcatggatccagctgacacctacaatacaagctgtgtgtgctgcagagggcggagccagagaagtgacgcaagccccttggaggagcccagaagatggtgagtgaatccaagacactggatgtcgagctatttacacttttggagtttgggttttcccttttaagattacgtct

SEQ ID NO: 3504 - DNA, 1000 bp, mus musculus
gttgaagaacttaccaagagattccttgactcgtgattctggggtgctggtatcctggctataaccctgtggcacggctatgccacagctctgtgcttctacactatggcaaagaagcacaaaagaagctgcctcgtgcatagaggggacatgtgagagaaagaagcgagacggatgcagaggtgtcagcctctctctcccacagtgatgtgccttttttacagttcctctgagtgagaccatgatcctagaataaagtatcaaccctacttaaggacctacgtgcttgctgcttgtccctaccgatccctcactgtcctctggggaatcaaccttacagcatacgtaacactctgcaaactaccttcagactcagtacaacctttacaaaactcctgtcatggtcccctacaactccccactttttagaatttcataaactaatcctaaaagtcatggaagatgtaaaggaaagagaagccaaagcaatcctgggtgtggcttttagttttttggatttttgttttgttttgttttgttttgttttgttttgtttgtttgtttttgattcttgggatgaaggtctcatgtagcccagactgctggcttctgacttgctatgcagcctaggatgaccttgaactcctgaccctcttgcctttacttcccaagtaaagggattataagtgcacaccaccatcttgctttacatggtaaggaccgaacctaccgcttcttgcactgcaggcaagcactctaccaactacccagtatccccagactcccaaacaatcttaagaacaaagtcaggaggctcacatgttccagtcttaaaactcactaaaaactacagcaatcaaggttgtgtgagccaggctcaatagtacagactttgaaccccagctacttgttgagaagctgaagcatgaggtctgttcaagttcaagacctgcccaagcgacaaagtgagttctaggctaatctgggcaacgtagtgaac

SEQ ID NO: 3505 - DNA, 1000 bp, mus musculus
tcccccctagcccaaggaactgtgggatatctatgtgcagctctgagattctgcgagacaccttcagacaggcagtgcgtggagcacagggctgagcctcagttctcctgtacaggctcgctgtgggtcatctgaggatttaggaattgaatgtggacagagctccctggcacaaggcccctgggagcaagcacccctagtcagggtgtcttttcttccttttctctgcctgctcattccgcatggggcagcctcgggccttgaggggacatcaggagtgcggatgtggcatcagccaacccagagccaccgcggaagccccagctcgatttctaaggctgatgaagaagcagccttgctttcctgggtgacaggcagatcagggggaggaaggacgagccttccctcggggaagtgcaattgtgcagtttatttaaaggaggttatatttttggagccggcctcttggaacaggaaagtacagtcatcgcttcagaagaaaaagaaagaaagaaagaaacaagagttactgctaagtccccagagagaagttcattagcaaaccggtcagctaattgccttcaatgttcttctggagtttaaaggctgtgctacaatagtaattcgtgtctctggaacagtccactataaatagtggggcaatcagagctaagagctgcaaggaaccgggaaggcgcagggaatagcaagtacctggaaagccagttcgtgagtgctgactgaatgcacaggcggaaggcagaggaggcgccttctccagccctgcagcagtgtccctgccagcctggcacgcagcgtccgtgtcccagaaacctctccacctcctggccacaggcacccactcttgggtcagtgtagggggttgtaagtctgccctggcacatgcctgttttgtctggtcctgaggatccatgtggtaacccatgtggccttgcgttagcctggcacaaacagctctgctccaaacagctagggcaac

SEQ ID NO: 3506 - DNA, 1600 bp, mus musculus
ttgtgctgatgttctctgtgcaatcttctgcacctgagattctctcttccatctcttgtattctgttgctgattctcgcatctatggttccagatttttttcctaatatttctatctccagtgttgcctcactgtgagttttctttattgtgtctacttccctttttatgtcttggatggttttattcaattccatcacctgtttggtcgtgttttcctgcaattcatcaaggaatttttgtgtttcctctttaaggtcttctacctgtttagctgtgttctcctgtatttctttaagtgagttattaaagtccttcttgatgtcctctaccatcatgagatatgcttttaaatctgggtctagcttttcgggtgtgttggggtgcccaggactaggtggggtgggaatgctgctttctgatgatggtgagtggtcttgatttctgttagtaggattcttatgtttgccttttgccatctggtaatctctgaagctagctgttttagttgtcactgttaagagcttgttcctcaggtgactctgttagcctctataagcagacctggagggtagcactctccttagtttcagtgggcagagtattctctgcaggcaagctctcttcttgcagggaagatgcccagatatctggtgttcaaacctgcctcttggcagaagttgtgttccactcaccagaggtcttaagatcctgtggagggtcctgtgaggaccttgggggtgtccagaaactccgcacgcaaggaaccccggagctggagtggaccggaagggacttttccccctgatcaggccgggttatctgcttccctagttaatgcaatctcaggtccggcatgattggattggagcagatgttgtgttccactcaccagaggtcttaggatcccatgggggatcctgtgtgggttcttgcgggtgtctggagactccgcaggtaaggcaccctggtgctggagtttcctaatttctttctcagcctatttaccttttgtgtagaggaaggctcttgcttagtttgagataattttatatccagctactttgcacaagaggtttatctgctgttggagttttctggtagaattttgggggttgtttatgtgtactatcatatcatctgcacatagtgatacctgaatttttcctttccaatttgtatccctttgacctcctttagttgctctggctagaacttcaagtatgataatgaataaatagggagaaagtgggcagccttgtcttatccttgatttttgtggattggttcaatattctctccatttaatttgaacttggctgttgttttgctgtttattgctcacattacacttaggtgtgtgtttgaattctttatcactccaagacctttaacatgaaggggtattgaattttttcaaatgctttttcaggatctaatgagatgatcatgtgacacaacagtcaaagaaaatgcaaaatgcaaaattctcttaacccaaaacatagcactaaatgcctccataaaaaaaataaaataaaaaagatctcatatcagcaatttaaaggtacacctgaaaaaaaaaaagaagcaagcacacc

SEQ ID NO: 3507 - DNA, 1000 bp, mus musculus
caactccactcatgagactctgcctcatgggaataagatgaacagcgacatagcagggaacaagatgtcctcatctgtcctctgtgtatacacacacacacacacacacacacacacacacgcacacgcacacgcacacacacacacacagtggtgtgtgcctgttttctgaactatcagaggcaaaagcaggaggatcttctttgagatcagcttggagtacagagtgatagaaaacctaacagaggcatgtcaactggagcctgtgtagaccagggctgggtgagacctagaggtgttcacaccacctccagtaggtgggacaagcaagaagatgtccctgtctactccctgtaaacagtggccagaatgactcaggagtcaccaccagccctacacctccacaatcactggcccagggcagccaggacagattctcaccaagaaaaggcaataagggccagtgagatggttcactgggtaaaggtgctagcggctaagtctgctcacctaagggccccagcctcctcctccacctccatgaggtactagtctggaagtgccagctgcggtaacaggacaagagggggagatacaagctagacaaacagggacagaagaggtaaaggccgcttgttaaaggcctcctggaagctaaggtctgtggcacaacagttccaaccgccatgcactgcaagacatccggtggggctgcgccagggccactgaaggccagggcagcagactgtgcatattaatcagatccctcgagaagggagagaggaccacaaagtagaatgtcacacacatcccgaggcaggaggatctctgagttcaaggctagcctggtctatagagggagctccaggacagccagagctacacagagaaaccctgtctcaagaacaaaccaaaactaagcaaaagaaggaagaaaggaagagaggaagagagaaagagagaaagagagaaagagggaaaggaaggaaggaagaaagaa

SEQ ID NO: 3508 - DNA, 1000 bp, mus musculus; identical to SEQ ID NO: 3507

SEQ ID NO: 3509 - DNA, 1600 bp, mus musculus
gcgctgcatcacaatcaaatccacgtgagtgaggggacagccccgaggggttgtgctctgggtgtcactcgggtgtgtttgctgccagtggacaaatagtggcgtgtttagggtcctctctgtgacatgcttgtgtgtgctgcctagcctgccttggtcagatgctgaatggactgttgacctcttcctctccgtagcgccatctccctcttctacgagctctctgagaacgacctgaacttcattaagcagagcaaggatggctcgggcttcctcatcaacctcatcgactctccaggccatgtggacttctcttcagaggtgacagctgccttgcgtgtcaccgatggagctctggtggtggtggactgtgtgtctggtaagccttgggtgggagctgtaacagacagttgctggtgttttcatggcccagtaccacatttttgggggtgtaaattgaaatcatattcattttaaggcaaggatgaattctgctctaatttgaaattgtatgtgccagtccccatgtcagggcagggagattgtgaagtccacctaagtgtggggccagtttcctataatttcagtgctctgaggcagaggtgcatgggtctctggaggtgggaggggctgagtggcatagggcctggtacactggacacacttggagatttagcgcctgggcatccataccgtgtaccttggagagtgcttgtgtacatttcacagacaaaacatacgtggtcttcaggccttgaactgtcagtggtttagagtacttgagagttaagggtaaacacttagtccttttcaccctgtcctcaggcgtgtgtgtgcagacagaaactgtgctgcgccaggccatcgctgaacgcatcaagcccgtcctgatgatgaacaagatggaccgggccctgctggagctgcagctggagcccgaggagctctaccagaccttccagcgcatcgtggagaacgtcaacgtcatcatctctacctacggcgagggcgagagtgggcccatgggcaatatcatggtgcgaagctcttctatggggggcggtcagggccacgctccctgggaatctctgacccaccatgatgacggaaattcttcactttgacctgatgtctgttgaagaaactcagtgtctgagactgtgggcttgtggctgggctggctgctgaccatcttgccgggctaactgctgctctcctccctcagattgaccccgtcctgggcaccgtaggctttggttctggcctgcatggctgggccttcaccctgaagcagtttgcggagatgtatgtggccaagtttgcagccaagggtgagggccagctgagcgcagccgagcgtgccaagaaagtagaggacatgatgaagaagctgtggggagaccggtgagtacatggctgtgtgactgtctctacccctgctacttgtggacaatgcctgcctgccgatactatgtgactgctctctacaggtactttgatccggccaatggcaagttcagtaagtcagccaatagcccagatgggaaaaaacttccccgcaccttctgccagctcatcctggaccccatcttcaaggtgg

SEQ ID NO: 3510 - DNA, 1600 bp, mus musculus; identical to SEQ ID NO: 3509

SEQ ID NO: 3511 - DNA, 1400 bp, mus musculus
atgaaattcacaaagactaaaaagtggctgtcatggtttgcatatgctcatcccatggagtggcactattagaaggtgtggccttgttggaggaagtgtgtcactgtgggggtgggcttggagatcttcctggttgcccgaggatgcccagtccgttcctggcttcctttgggtaaagatataaaaccctcagctcctcctacaccatgccggcctggatgctgctatgcttctgccttgatgataatgaactgaacttatgaacctgtaagccagccccaattaaatgttgtctttataagatttgccttggtcatggtgtctgttcatagcagtaaaaccctaactaagacagtggctgtggagcgttttcttaattagtgattgatgcaggagggcccagccaaatgtagttgtgccatgcatgggctattggtcctgtgttctgtatgaaggcagactgagcaagccatggggagcaagccagaaaacagcaaacttctatggcctctgcctccagattcttccatggcttgggtttcttttttttttttttttttttttgggtttttcgagacagggtttctctgtatagccctggctgtcctgacctcactttgtagaccaggctggcctcgaactcagaaatccgcctgcctctgcctcccgagtgctgggattaaaggcgtgtaccaccacgcccggcctggcttgggtttctgttctaactttttgataatgaactgtattttagttagggttttactgcatctaggcaggcatggtgcaggagcaactgagagttctacaccttcatctgaaggctgctagaagaatacttctaggcagctaggatgagggtcttaagcccacacctgcagtgacatacctactccaacatatcccgagcttatccccgtcccgcgggaaataaacacaggacacaccagattcttccacggttaacttttacttctatatcatattgaggtagacaaagaaggctcagaaagtgtgtggcttaaatacttttggtgacgtgtctaaactaggactggtagcaacacccatgatcctcatgcaccctggggataggttaaagcccccaggggttgggcaaaagctggcataagctttatatggtttagcaccatctagtggcggcacatatattgcagccctttacaccaacaagtccatacctcctaatagggctactttctgggccaagcacattccactccctggcccccataggcttgttcaaacatatgagtccatgggggccatatctagccacagcataataaaaagtacatttaatccaacttccaaaatccccatagcattctcaacaatgttaaaagtccaaagttcaaagtctcttctgagatccatct

SEQ ID NO: 3512 - DNA, 1000 bp, mus musculus
agatattagcaaaaaaaaaaaaattacagaatatccaagatacagtccacagaactcagaaaggtcagcaagctgaagtgcccaagtgagaacaccacagtcccacttggaagagagaagaaagctatcgcaagtagggagggagggagggacctgggagggaaagtagatttggggggaagaggctgaaagagggaaacctgatctggtattgggtgagagaaaaggactgaagccccgaggcccagcagaaagaatggaaaaaggcaaccttgggagacaggaggttggggggactctccagaatgcaccagagacctaagaggtgaaagactctcaggactcaaagggagggaccttagatgaaatgcctgacagtaggaagagggaacttatagagcccacctccagcaggaagacaggacatcaaatgagggatggggttgccatcccacagtcacaactctggcccataatttttcctgtctaaaagaattacagggatggaaatggagaggagcctgaggaaaagacagtctagcaacaggcccaaagtggaatccagctcaagggaaggtccttaggcctgacactattaatgaggcaatggagtgctcacaaaaagggacctatcatgactgccctctgaaagatccaacaagtagctgaaaaaatcagatgcaattatttgcacccaaccaatggacagaagcagctgacccctgttgttgaattagggaaggctgaaagaagctgaggagaagggcgatcctataggaggaccagcagtctcaattaatctggacccctgagatctctcaaacattggaccaccaaccaggcagcatacactagctgatatgaggcctccaactcacatacagtagaggactgctgggtctgtgttcatttagatatgatgcacctaaccctcaagagactccagggagtttagaggtcaggtggggtggggggtgggggacatcaacgtggaaacagg

SEQ ID NO: 3513 - DNA, 1400 bp, mus musculus
aacttaatctgttggcttaatttcaacctgaatgtgtggggtattatttcagctgtgaggtagggggatcacttcaatatacactgagcaaccatctgtgtatgctagagccctgtgaatcaaaaactaagaaataagaaaagaagaacatgactggtcctgatttttggccccagatgaatgaataaaagaaaaaagtaaagaccatgattactcctagatattgtgagggagaattcttgtaaataaatgggagaatacagccagaggcagagataagtacgagatgaacccttaggcatgtgagaagaggagggaggggagatggaggaggcagaccaagaagtcaggcatgtaaagggtagataacaaaaaacaaaaccaaccaaacaaaaaatcctccaccccgcctctgagatatacgtggggaggacatatggggtaaagggtagccaagatcctagtctggagaagttcacggtaggggccaggcatgcaggccaacattgtaacaggtagagactgagatatgcagagggaacctggcagatagcatttttgataaataggcgccaaatttatttgtttctgggtttgagacataacactctctgcccaggaggaagacggggacgtgcctactgagtgcaggaaaagtgcagggaccactttgcagtccaggaacaagttctacagcaaagcctgccttatgatctaggcccgctcttggcctgtagtggaagccggagatgggaaacacgatgtctcttagggacactgctcctgtcactcaggcctcagtagccaatcagaacttcgagacgagccttcagtcatagtgggcgggcacttcctgtccgccatattacccgctttgttgtgaatctgaggaaagcactattgaccatctgccggtagttgagcggagagtgaggcgaacttggaatccgcgccatggtgagcgaggccgccgtccccacgcggggaggatccgcggggtcccatgtggggttgtcctggggtgcgggcaccggcagcgagatgtggcgaccttcgtaattgcgtttgtcacccgaagtcgccgagttcccttatcctccggtgtggaagcagcacctcccagtgagacggttccccgggctgcgccggcgcacagcataggaagctagagatgatgcttggacacgggcatccttcagcgggcacgcatgcgcgggttttgttgtcagtgggagagatttgctgactggcagagcaaattcttttctttagtgtcttccagaagttctgtacctggcacttgacattcgggtgtagcatccatcgcagttaactctgcgcagtgtaaagcctgtgtcattaacacattcgcatgtagatgccacggtggtccagtcacg

SEQ ID NO: 3514 - DNA, 1200 bp, mus musculus
atagtattataacaggatgaaaatgcacttaggaatactcaggttcagcatatctcatatctctatactgttcctgcattattagctatactttctcacagtatcactatggaattgctttgtgataacagggcaatagaatggatacatttttctattagttcaaaaaagttttcactctatattagtctgtggtttctggaccaataattctgggcagatttcagacaaaacaattatgtggtcaagaaccaatgaaaaattttattcttctctgtttccctgatctgcttgcagaaagcaggccagggcaggcttttgctgagcctctgccccatagcctttgccggactcagtctctaggtgcttcacctcaggctggcagagccagggaagggagccctagggcagaggtggacatcattgtcagccaggaatatggacacagcagttctcccacccagctcctaggctgccgagatggcagctgctggtgcccgaggcctgtggaccacctaccaccaactcatggataaagtggacttgttgctgccaaagaaattgaggctgctttatcacctggcaggccccagaacagtttttttcctgggctccaataatgaaatggggattggtatgtgttggattagctgacatgacatggtcagacctacagagaaactcagtgcagctcattccactgtgctgatggctacagggtttatttggtcaagatactcacttataattataccaaaaaattggagtttgttcgctgttaatttctttgtggggtcagcaggagcctctcagccgtttaggatttggagatataatcaagaactcaaaggaaatccagtaagagttcctgatcacctgaacattctagctgtagacagaaacattggaatctagtgtatttgattactgataaggtgatgctaactattctgataacattggaaaagaaggaaaacaaaatctaactgtagttaatagctagcacttcacaaaaaataaagcaaactttcagtaactgtctgtctttacgtatgcctgaagggactttgtttgtggatggcaccaacactgttttctaccatttgtccataataaaccgttcttatgataaaaacagctataaactttagtgaatgtttccgaggatgtagcactggctttttccacgtatccctttca

SEQ ID NO: 3515 - DNA, 1000 bp, mus musculus
gataatgttttaatgatggaactgttctaatcttactcatgtgccagtgagagctcagtgaggaaaattaatatggtatgcagaactctacctcatttattaattttctgggaaacattttgtcagtatgaaccttttcatgcttttgaagagtactaagacatgccaaggctttacctcattgattacattcacaggctttctatccagtatgacttctttcatgcctgtgtagaagattgttatgtgcaaaggttttaccacattgactgcattcatatcatttctctccagcatgattttttttctatgcaagtcaagacgcctgcgatgtgcaaaagtttctccacactgactacatacatggggtttctctccagtatggattctttcatgggtctcaagatgactgttacttccaaagactttaccacactgactacattcatggggtttctgtccagtatggattctttcatgcttcttaagctgactgctacttgcaaaggctttaccacattcagtacattcatatgccttctctccagtatgagttctttcatgtattttaagatacctcttacatgtaaacgcttttccacattgacaacattcataaggtttctctccagtatgatgtctttcatgcttgtcaagagaacctttatgtgcaaaggctttacttcattgattacatttatatggtttctctccagtatgaatactttcatatatttgaagagaactgttatatgtgaagactttaccacattgagcacattcatagggggtcctccagtatgaatactttcatgtatttgaagagcactcttacttgcataggctttaccacattgattacatttatgcagcttccttccagtatgaaattttttatgtatttggagagtacggaaacatgtaaaagctttaccacactgattacattcatagagtttctctccagtcggagttctttcatgtatttgaagatgactgg

SEQ ID NO: 3516 - DNA, 1200 bp, mus musculus
catcctgcgattttcaggcaaatggatagaactagaaaatattatcctgagtgagtaactcagttccaaaagaatatgcatggtatgtacttactaataagtggaaattagccaaaagaagtacagaatacccaagatacaatccaaagaattcaaaaaggtcaacaagcagaaggccttaagtgaggtcatgtcagtcccacttgggagggagaataaggcaattgtatgggggaaggtgagagggacccgggagggaaagtggacaggaaaaaggggggaggggacatgattgggtggaggaaaaggattgaaaccctcagagccagaagaaagaatggaatcaggcaaccttgggaggtaggaggttgggggtaccctccagaatgtaccagagacctaggcggtgagagacactcaggactcaaagggagggagggaccttagatgaaatgccctacagtggggagaggtaacttgtagagtccacctctagcagaacatcggggcatcaaatgcgggatggggttgccatcccacagtcacatctctgaccaataattgttcatgtctgaaagaattacagggatagaaatgtagaggagcctgaggaaaagaaggtccagagacaggcccaaagtgggatccagctcaaggggaggccccaagacctgacactattattactggggctatagagtgctcacaaaaagggatctattgtgactgccctctaaaagacccagcaagcagctgaaagagtcagatgtagatatttgtatccaacaaatggacagaagatgctgacctctctggttgaattaaggaaaagttggaagaagctgaggaggggggcgaccctgtaggaggaccagcagtctcaattaacctggacatctgagatctctcaaacattggaccaccaaccaggcagcatacaacagctgatatgaggcccccaacacatatacagcagaggcctgccaaatctgggttaagtcagagaagacaccctcaagagaggatcttgtggagttgctgaggtggggggtggggacatccttatggagacaggggtgggggcagaaaggaggtatgggatatggaacagtcagagtgtggactggaagggaattaaaatctggagtgtaaaaataaataaataaataaataaataaataaataaatctcacaaacaga

SEQ ID NO: 3517 - DNA, 1200 bp, mus musculus
tagagttatggatggcattcctgtatcttgaaattcaaggttttttttaaccttttcatatcttgttatcaggcttcaaactgaaatttaaaaactaatattagttttaatcttatagtcaacggcacatatcatataacatagacactatcactgtcacagtaatataactgtttaaaaatacaaatcaagagggtcacaatccctgccggtcggcgtcagcaccaggtcaccttgggcagagttggcggacagccccaaggttcctagaggactctccactcaatcttaggacctctggtgagtgaaacacaacttctgttccatttcaatcatgtgggacctgagacagcattagaaaagcagaaaacccagcctgaccagggttacaagtcccttctggtcagaaccagcacctgttcaccttgggcggggagttggaggacacctccaaggtcctccaactccccgcccaaggtgaagacagcttctaaggcagaccttgtttcaggctccagacatccgggcaccttccctgccagaggagaggtgtccaccccaccagggagggctttgccagagcaccttggttcccggatccctctgagactagtctgtgcaggtgagagtgtggattacagaagctaacaacttctgggacaggccctgtttcaggccttcatcttctgccaggaggcaggtccaaacgccagatatctgtgcaccttccctgcaagaggagagcttgcctgcagagagtgctctgagcacttaaactcaggagagagctagtctctcaggtctgctgacagaggctaacagaatcatgagaggaacaagctctaaccacagacaactataacaactaactccagagattaccagatggcgtaaggcaagcataagaatcttactaacagaaaccaagaccactcaccatcaccagaacgcagcactcccacgtcccccagtcctgggcaccccaacacacccgaaaagctagacccaaatttaaaagcatatctcatgatgatggtagagtacatcaagaaggactttaataactcacttaaagaaatacaggagaacactgctaaaaagttacaagtccttaaagaaaaacagaaaagcacaaccaaacaggtaaaagtccttaaagaaaaacaggaaaacacaaccaaacaggtgatggaaatgaac

SEQ ID NO: 3518 - DNA, 1000 bp, mus musculus
aagtggagagaaatttaatgcaaatccactaaaacaggtataagacaagactgtccactctctccataatcatttaacataatagtatttgaagtacaagctctaaaaataacacaactaaaagagatcaatgttttccttcaggtctgagtcagtgccctaagcagaccattggcactggctctgcacccagtcccacaacacctagagaatcttgactcccaggtgctctaacatacccaggatcacatgatctcaggagcttggtcacaccaggatttcaggaccccagaggcagcttgactcccaaaagttctgacacacccaggatctcaggatcacagaatcgcagagtcacagaatcccagagacactggactctgaggagtttggatacaaccagaatcacaggaggaacaggctccagtcagagacagcaataacaggtagtactagagataaccagatagtgagagacaaccaaaagaacataagcaacagaaactaaagttacttggcatcatcagaacccagttctcccaccatagcaagtcctggataccccataatactggaaaagcagattcagatttaaaatcacttctcatgatgataatagatgatggtgctccatattgggcaccatctagagagatcaacagatagatattatacaggtattaataaaatatgtttgtggctctaggcagagagacaaacagtaagatggtacaaagactgctttatatgcctccacaggatatccaaattctgtctaacatgagttccactggaatcttgggttatatttccagagcaattgagctatttataagtaaaaataaaatcctctttcataatcatgagaagtgattttaaatctgaatcttgctttcccagtgtgatggggtgtccagtacttgctatggtgggagaactaggttctgatgataccaagtaaacttggtttctgttgcttatgttcttgtgcatgtctctt

SEQ ID NO: 3519 - DNA, 1600 bp, mus musculus
ccgcggagagcaaagccagcccggcggggacagcagggggccccgtggctggagtcgccactgcgggcacgggcccggtagtggcacgggcaggggagccggcagagctgcgcgggccagcttcggtggcagcgggcggcgtggctcccccagagggggcaatgtctaacggggtttatgtcctaccgagcgcggccaacggagaagtgaagcccgtagtgtccagcacacctctagtggacttcttgatgcagttggaggattacacacctacgatcccagatgcagtgactggttactacctgaaccgcgctggctttgaagcttcagacccacgcataattcggctcatctcactagctgcccagaaattcatctcagatattgccaatgatgccctacagcgctgcaaaatgaagggcacagcctctggcagctcccggagcaagagcaaggatcgcaagtacaccctaaccatggaggacttgacccctgccctcagcgagtatggcatcaatgtgaagaaaccgcactacttcacctgagccacgcaacccagatgtatttgtctttccctctgtccccacatgagcctgttttcataataaactttattgtgacaaaaaaaaagtatgtgaaacttaaaggaattgacggaagggcaccaccacccacagaagcgagaaagagctatcaatctgtcaatcctgtctgtgtccgggccgggtgaggtttcctgtgttgagtcaaattaagccacaggctccactcctggtggtgcccttccatcaattcctttaagtttcagttttgcaaccatactctccccggaacccaaagactttggtttcccggaagctgcccggcgggtcatgggaataacgccgccgcatcaccagtcggcttcgtttatggtcggcggtatctgatcgtctttgaacctccgactttcgttcttgtttaatgaaaacattcttggcaaatgctttcgtattttcacaataaattccctcaatatagagagacattgcataagttctgtgactctagagaaccctgactaataaatacatggtccaaatggccactttatagggatgtctgagttggctgtaggcattgactggctttgtgaagtggaagggaggaggttccagagactattcttttgcagtgcagacagacacacagacacacagatacacagacacactaggctaacttccaccaagcagggagctggatagggatttctaggccaatcctgagttctcgtgaggtgaaatgtcattcagctgccaccctgaggacactttaataggtctacagagaagagtacacagacgccccctgagacaggtactaggaatgagggtatggaggtttgaataggtttgacccccatagactcatgtgtttgaatctttggccccatagggaatggcactataaggagatgtggccttgttggaggaagtgtgtcactgtgggtgggctttgagggcttctatgctcaagctacatctagggacagtccctttctgttgcctgaggatcaaaatgtagaatttcagctctgtctccagcaccatgcctgcct

SEQ ID NO: 3520 - DNA, 1200 bp, mus musculus
agggtgtcactgtaagaacgactgaactgtactttatttgacttgagcaaatggcacagtatgagggcaaagaaaattccaaaatgcaattcctcacgacgttaaccaatatcagactatgacaaacactagttaggacaatggtattttaaggccaatatttgggatccggaaagatggctcagcaatttacgagcacttgctactcttgcagaggacctaggttcgattcccagaacgcacacgttggctcaccgtctgtaactccagttccagggaatccaacactgccctagcttctgtaggcattaggcattcatgtgatacatgtacatgcatgcaggaaaaaccctcacacacatacaattttaaaacacacaaaaaaagtatttccagaagagaacagtgaagcacactcacaaattgtaaacaaggttgccatgttttccttgtttgaattggagtcttccatttgcagtgaagatggtacaaaagacaagctgtctgaggacacatctacatgacctgtccccatggcaacctcctgcgtgatagaagagacagccacaggctctaggctaaggccaacttcatggagggaaacagactctagggaggccaggttgtgtgaggtagagagtgccacgcttacagagttggtgctcatggccacggtgtggatggagtcactgagggtactgtcagacatcccattgacccggtttgcaatgtggtcagtttccatgaccacaggaagctccagaccattcccgtgaatgggtatcacaccaccatgtcctacagcttctgctgtaaggctgttgctcacagaatccacagagagaggctcatgacttctggagccatttgggatttggggatgctctcctgtaacaccgtccattgtaagctcctctgccattccatctgtggagattgggctggtaaccctagaaacattctccatggtgattgttgtgtccaatgctacttcgtggccatcattaggatgaagactttgggcaccatgtgtgtttacagagcgagagtctattgaaacaatgcctagttctaatccaacatttccattggcctgatacggatctagtgctgaagggttgttggtgatagataatgctgtatttccatcaacatttatagagttggggtggatatactgaggaggtggtctgtcagcta

SEQ ID NO: 3521 - DNA, 1200 bp, mus musculus
atacacatatgcatacacatatacacacatgtgtgtgtatatatacatatgcatatatgcacatatatatgatggtctaaaatacaaaagacctagaaatgctgcaagctatttaaatgaactaagtttgcaaaaggctataggtagtataaagtaagtggccagacacaacctgtttccaacaataaaaagtgctctttttaactctacgtatttttttttcaaatgtgtgtaagattttctttcgctcatgggtttcagtgcatagttagctggaaggtgaagtgcttgccagagaagtctgctttcttccaggtggacaggaaacaaaactagagaaataggccaagaacaggcacagccttagtgagaaacttctgctacctggcctccacctttgagtgtcttacattttccaataatatcatcaaacagtgagtccatcaattaacccagtgaccagttttgagctctcataattcaatcacgtctactagccctgccctttccccagcatcacatctggagtgaagtccccgacacacgagaccttagggtcattccatatctcaaccacaacagagtctttaaacacagaactagaagaagaaaattgagaaaatgtgaaatcagagcaaacagagcaacggcattctaaagagacaactttctgctaagggaaggaagtttcagtcagttgctgtctctcgtctaatcgcccttggcagccagcgtgactccttccattctctcccttttggagaagtcttgaataataatctatgggcaagaatcctgagcactgttcacttgcccttcccttctgtgggctgatgacacattacacatctctgtccaagacgcttggcagggaggcagacaggtagacagagctcaacggcaataccgcttgaatgctgtatcagaacctcagtgtgcgctggtggagaagagcttgctcttctttattacatataaagatagagacatgaaggtggaaggtgctaaggtcaccttttgtgtgtaggtgggtgggtgcatgcaggtgtgtgtatgtgtgtgtctgtgcatctatgtgtgtggggtgtgcatgcaggtatgtgtgtgtatgtctgtcggggtgcatgtatatgtatgtgttatgcatgcaggtgtgtgtatgtgtgtgagggtgtgcatacaggtgtgtgaatatatatg

SEQ ID NO: 3522 - DNA, 1000 bp, mus musculus
tccagtgccctatggtctatgtcatggatactttacacacacacacacacacacacgcacacacacacacacacacacacacgaacacacacagaggatagatagatacttagatagatggatggatagttagatagctagatatggtagatgaatgatggtagatagacagatacatagatattctacatataagagaagataagaaatgttttgtgtttctgattctgccatatttcatttaaaaataataatctccagttccattaattttcctgcaaagttatggggatcctcctgcctcagcttccccagcactgggattacaggtgctcataactgtgggttgtgggtgagtatcaaactcagttacacagcctcatgcagcaaacattttatgcctaccaagccatcccccacattcccttaatttattcgtattagtgtccatatctctaaaagtttctcctagaactgtcttaggatattctgaagactctgtaagttgtgtttcattttcatttgattctagttttaaattttttcactgtggtctactgtggatccaagagagtgttgctcagactccacaatacataccagtcttagtcagggattctattcctgcacaaaacatcaggaccaagaagcaagttgaggaggaaaaggtttattcagcttacacttccacattgctgttcattaccaaatgaagtcaggacaggaactcatgcagggtaggaccttggaggcaggaactggtgcagaggccatggaggagtgctgcttactggtttgcttcccctgacttgctcagcttgctttcctatagaacccaggactaccagcccagggatagcaccacccacaatgggcccttccaccttgatcacaaattgagaaaatgcccttacagttggatttcatggaggcatttcctcaagggaggctcctttctctgtgagaactccaacttgtatcaagttgacaaataaaacca

SEQ ID NO: 3523 - DNA, 1400 bp, mus musculus
tctataccaaggaccacatggtagaaacagagccaacttatacacattctctaagctctatctgcatgcacacatgcagcccccatgcatacactagaataaagtaattaaaatgccacttaaaaatattttactaatgtatttaatagtactgagcacattttctagatagtgaaggttatttcatcaaaatagatcataaataactgatatgctgccaaaagcttagtggtctgaaacacaaacagattttcacaatataatctgtatattttattgatttactgaaccttctctttcctaaataaaaaatgcttcaaagagaatagaaaaacataacagacccttgaactgttttcttttttatttagttaaatacttattttatttccattgtggtgctagagattaagctcatattttaacattttaacctaattttcatatcaaagaacatatacctcagaatcctagtgctacctcaaagatcttcctgtgtacaaccttcccacagagtcccaacagaacatgaaaccgcttaagaatttataaatgatactctggcttgaatgtgtccctggcactcatgttcagaaacgttcatgagtattacaggagcaagcttatgttccaggcagggatccgtaggaagcctgagttcctgttttcccactgacagcactgtaactgtcagtgctgtggtgctttctcatgcgtgatgatgtagcaaaagaccctcactagatgtggggccagcatccctgacttctcagcctccagaaccaacaaacaaatgaacttttttgcttataagtttacttgggctgtgacattttgttatagatatggaaaatggactaaggcagtattatcaaaattccttcttcaggtcactgccaagctatacctaccactggaatgaaaagtccaaacttctgttcaatatattcagctctttgaggcttaataggcattgcgagcctctgtgcttctcttatttgtggtttaatggtatgatgatctaaggtccttatgagtaatcacttagagactgtttctctctagctttatactcttatgccattgtcaaaccaaaagcatcattttattttttttatttttttttccattttttatttggtatttaactcatttacatttccaatgctataccaaaagtcccccatatccacccacccccactcccctgcccacccactccccctttttggccctggtgttcccctgtactggggcatataaagtttgcaagtccaatgggcctctctttccagtgatggccgactaggccatcttttgatatatatgcagctagagtcaagagctccggggtactggttagttcataatgttgttccacctatagggttgcagatccc

SEQ ID NO: 3524 - DNA, 1000 bp, mus musculus
agttttatatatgtattttatgcagttggatcgtacatgtcccttacaccctcatatccctttccttcctctgacatcaccccatccttccaacaatgccataattctatcccccacgttcatatctctttctcttgtgacccactgtgaaggccaacttcatgagtgtaggagtgtggtcaactcatccatgattactctcttgttctacagatccccagtggccaatagttcctgcagagtctgtgagcccccttcccctcccatgactggatgttgacaggctcagtcttatgcagacctagtgtaggctatttcagctcctatgattacagtggtcatacccagaagataggatctcctagctcttctcttcatcatctagctcttatgttctttctgtctacacctcggaggtctcatttacagatgaccactctacagtctcttattcttagcaccttgagcagccatgagtctttgtgttagctatcatttttttgcaaaaggaatcttcccccatcaaggtggagagcagcacatgcttatggatctacacctaattattttaaggtagtttaataacatgttctcttagcaaaatgaaagcagcaggtttagccctcctgggtcctatgatctcagccatgggcacttaacaggtccacagcaccaggcacgaactccagtccatggaggggccattctcagatccacccaagatctgttggttgtccccatgacaatcatgacactatcataccatgttatcacttatttttctgagctacttgtgtagtaccttctgtactataaaagctagccatcagggaggacactttcagtttattaaacttcagattaatttctttaagaaactgtgatatcttcaacaatatggttagttctggtgtacagccgagatcaatgcaaacattctgtgctcttttgggggcatgtggggccttccagaactggttatttttatctctctctcttt

SEQ ID NO: 3525 - DNA, 1200 bp, mus musculus
cctccagtgctcagctcctctccttttgaattcagtacaatgcctatctttatgaaatagtgctactcactcaaggtgtgtctttgactatcagttaacctaattacaagaagtaatccctcactgaaactcccttcttaggtgattctggatagtgttgccatgttgacaatgaaaagccaaccatcacgagggaacttccattttctccttttattgagtcattgtttgtttgtttttgttttattgtttatttgtttgcttgcttgcttgttttggttctggtttttcaagtcagattttctttgtaagtactgagtatccaggaagttgctcactttgtagttcaggctggcctcacattcaaaggtctatgtgtacctctacctccccagtgctgggattaagggtgtacgccaccgctgcccagcatctcctgttttcttaaaccaagaatatatttaagagtgatataataagaattttaatggattcttggctttttcagaactgtttgttttaaacctgtatgtccaacaacttccgtttataattccacaagacagtggggttaagaagacagacaatattcagtgagttaaagtaaatccaatgtttaaaactataatttcaatttttcaatgccaatggcattattgctggctgatttcactcttactttttgtgggtttgccagtgctaagcaatgtttctatcacgcagtacgcatcctataaatgcttgttaaataaatgaaaatgcagactggatacaaaagacatcattgaaattttatataggtcaattgcactataattagattctcagacatgatatgctgcaaagaccaacaatgagtgatattaaccagccttattatttgggactgatggcatatctgctattcctttgatgactcccaagccacagcactagtgttgccgtttgataatgaaacgttgcattttcaagacagtatgccagacacaaagtaagtggcttaaaaataacatccaagcagcctcactaaatgagtctgctgtccaatgaaggccaaatgaaatgtttagttttctgacttaaattattagctccaagggtgccctatttttatggtgtataaagcattaatctgcctataagttctctcattggtttaaaaatacaaggtttataggaataaaattaaataaataggat

SEQ ID NO: 3526 - DNA, 1000 bp, mus musculus
gctgtcacctccaaatatcctccaaataaaatcccagccagccagccctcaggaaggcattcctgtattcctttttctcttctctttccagagggagcccctttacagcccagctcttttctccactgctccacctttcactaaaacctaactggatccataattagcagattaaggactggcctgtgtgtgcccaggctccccagcatggtttctctgtctgagatggagaattgacctgcactgtctcctgttatcacaaacaaacccggctaagcctctttatccttagaagaggtctctagcgactctggtaatttctgcctctgacaaattagcagatcctacaaccttagacagtgggaagtgttccaagctcctgctggaccagaggctctgaagagaacagtgtgagacccacccatgaaactgctagggcacagtgccttgagtcaaggtccagatgacccaaggggctagcagacagactgagcaattggttttaaaacaacaaactcagatggtctccagcttagtcaaaacttctctaggcaaagcaaaccccacatcctagtcacccaaaagatgctacagcttaaagtgtcctctagccaggacgatttggaaaccttaccaagccaacaaatcgtcttgcttctctatctcagcatggggcatgggggtaatctaactcagggtgagaggtaagaggccaaaagcccttcctggtgtgccccagtaacatctcaaaacctcacctacaaacacgtttagcccacagcattccaacaaaaagcaataaaacctaagtccctctaaggcccctgcataggaagcacatatcaaaaattactctcaaaattagcagcaatttggtgtcactaacttagctacacgttcagcaagtcactcagaataaaacaactttgactcaatgcttcctaaaatccccctcttccagggtccaagtaaatgtagaaaggtctagccccatctacct

SEQ ID NO: 3527 - DNA, 1000 bp, mus musculus
atgtctgtgggctagccttttctctgttaatgactgatgtgggagagcctaggtcactgcgggtggtgcccctctgggtaagagggcctgcgattcggtttctgccgccagcttcctgccttgggtttctgccttgacgtcctttcacgatgaaccttgggttataagtagtgataaaccctttcctcttggcagcctgctttggggcacggagttgtatcacagctctggaaagcaaactaggacaatggacttccaacctcaagcactgagagaaaaggagtgtgtttaagctacttggtctggggttttgtcactgaagcctaagcgaagtagtatgtattaaatggagaaagggggaactgtttgtgacaggaaagagcaggcagagagactggagcttagggagtggcctgaagggtcaaatcccttcacaccgctgggcttcaggagcaaatgaggctctactgccatctagtggcaacataattaactcattcattcattcattcattcatgggctgttccaaatgggcaaggctttctgttgagtaagtgatgttggtgaacacggattaacacccattgttgaatattgctactttcccctttcctctccctccccccccccccgcatctttttctttcagacaagatctcactatgaaatccaggatggcctggaattggcaatgccaacatctcaagtgctgggattacaggcgtgggctcccacgtgctttgcatagggaaattattcaagctttagtacaaccctctggcataagtactaggacttctgtttcacagaggagaaagccgagatcctgagacattaacaagccaacccattgacgagccaattgacagacagccagtcagtgggagaatccgaccttctccagggaacctggcttggggactctacaaacacactctttgctacggaggctattagagagtcttcgtcttacaaaccaactgctttagaagagtcacg

SEQ ID NO: 3528 - DNA, 1000 bp, mus musculus
gccctgggtattaattaggtttcagccatgagcttttgagaaacccagacaccctgtataataataatggtttcttctggggtgctcttgtgcaggttcacatccaaagaagatgtctttgagtggatagggaaataccccagccttgtttgtgctcctgagaaggtggggtggagctcatcgtgaggggaggagggaggcaggagtctctgttcccattacctatgtgatgtttctgtttgtacagtggtgaacacagccttctgtcggcttcctcccaagcacatgggaacattctagaactggtgtgcttgcatgagaactgacctccgggcccacccaagctgttgtggtgaggtcacttgtagccctcgtcctgggtctgtttgccatctttcctgatgcgtcaccaaagctgactgtgggccacacccacaaaaacaactcacagacagattttccccttaaccgtggatggcattggtgcattgggatatttttaactgggtcacatagctatctggttgatcattcttcctctattttcaacagatatttactgagaatttcttctcaataccctctctatgggtgcctggtacccggaatagaaagatgagccaatcctagagggatccttggtcacagtcgcagtaaagccttgtgttgggaggagtgttttaaaacatccttccaagcctctctttgttctatgacccttgacctctgtttggctcatatgctaatgttatcacttgcaaatattccagagcacccaaactccatccctttgtacccaggccagccctgatttgtcctctggctccattcattaacacagttgcaagcactctgaacaccttaccagaagtccctttgtggtgttattctctgtgaggactaggtctgtgatacccagttctgaatcaatgagtgagtgaagcaccatacatgtctgtcagtgtgtgtgtgtgtgtgtgtgtgtgtgtgtgtgtgtgtg

SEQ ID NO: 3529 - DNA, 1000 bp, mus musculus
agagcaggagtggatagctacaaaggtgtaagtgggattagtggggaaaattcttaaatgggagcctggaacaccggcttctcgttcttactgtcgccgagctgctgactgatcgtgtaaaccactctgagctttgcaggaccagatcatcagccctaaggactcttctgctgccagagtcttttgattctgacttctgacttaaaggaatcgctagcattccatatggatcgggggacttgggggcatttgtttccagtgcaatctttgtttttactttgctcctctgctgttttcttgtcactcccgtcggtcctgtccttcttcccttttgaagatacttaagaagggccctttcatcacgctaaaaccgtaaatatgcccttgaaacacgcaaagaagcttttgtgtacttccaacaggaggttattatcggacaagtaagtcacttgagtgcacggcattcctcagcccgctccacggagggctttatggggttatattgtcctatctccgcagataagactctcccgctctaaaaggtgggttatctgatgaagcggggtgcctcacgcttcaggggtgtaagccaaaggtttcgggtgctgcccaaaagtcagacatacttctccaagacaagtaggtgcttcactgagagtgttacagtcaaggacaaacgttctaaaattaaaccaaccagctgttcaactgcagacgcccacgtgccaattctgccgtccttgccttatctagcctttcagaacgcccactctctgcagggcttttgtcaagcccgaaacttcacaggctttccaagaggaaccctatccaccaaggcagaatcctgttgtggggcagaggagggcacctctccttctctcacagagcatatgctctctgcgtctttcagttggatgccaaaaccttcagaaggttcagaaggcttcagagggcaatggcatgtagccttcctcattgatgttaaagaatattaacagtt

SEQ ID NO: 3530 - DNA, 1200 bp, mus musculus
gcctccactttagccacctctgaacatctttccaggactactttggtccataagtccatctctttctccctgacagctcccagggatgctttggccactctcactacctggaggtgggacaggcggtaggaagaagctcttgagctcaggggcaaacactggttgcattctgtgctccaggtgaagttttggtttctatagcctggattgggatattgctggtctccaaccaggacctgcacagagtggtggtggcatctctttgctgctactcattggaggccttgggaggggaagagcaaaagaaactttacgtttgcttccttgaaacatctttcccatcaaggcactcagtgccaggcaggcttggcagttggtggatcttcccaggacatggtggaggctttcttgtctccttatccaggtggttatgaaacatgggttgccaagttcttctgttcatcttgacaaccgcacagtctgccctatcatccagtagcattgtcatttaatccttgcacacatgtttgacggttgtcagagtcttcatttggatacatctacaagaacacctagaatatgatctggtccttcacccaacagtcctattgaagccactttagatttctagcgctcattccactgtgttctcctcctggccaacggtagtgatgcttccatgacacaatctctctccttccctgccctagttatcagcactactcgtgctccaaattctttctcaatctggaaaaatcctccagactcctgcccataaagacccatgctgctggggttgtcttgtcttgtctgctgtgttcagccgctgttctgttcaccgtattgacttgaagccaggccttatggtccaatctgaggagggtgaattagtgagaggctgctactctacaatccacagctcctgggttgctcgtgggtgttctgctgagagtatctgctctgatcataatttgccggctgccatcggctgtgaagagaagtagatggcaggaggataggatggaggcgctgtgtgtgagtggctgcatggggtagctctcaggtacctggggataactgtagtcactctgctcatatctcaggctgtgctgtgctagctctccccgtgcatatctctctcagtgcaaagttggagttgactagtctcagtggccttgttatcatcctgtggtcttgcat

SEQ ID NO: 3531 - DNA, 1200 bp, mus musculus
gatgtttgacctcagaaacttggtcacataaaagattccttcatagaaaaagccattgattaaataatccattaaagcaaaactctgtgcccaataattttgcgtcaaattctgagtgatttttacatgctgtgggaaagaggtttggattggaaagaaagggccagaagacttgtgggagataaggcaagtaactccacttgagcagcagaccaggagggatgaagctctgtggctactcatgcctggggaaagactggggtgagtacaccagagacagacgaggcccagcatgttgctggatcccagtggcatagtcgggaaatactagaagctaaaatatgggcaaggaaaaatggtactaccaccctgggagaaggcatgtgtgaagatggggactcaaggtgagtccagttagaggggataggagagagatgaaacaggtcctgcatcccaggagaaccagccccactgtctccacagatgcctcgatctgaagacagctgtgcacaaaaattcctggatactgaatatatccttacatatgctcggagccttttgtacagttccggctttccactaacgggcaaactctgtaataagttcatttatcaccagcatgagaatcctttggtaaactatcagttctgttgtgtctgaaatagttgcattttaaaagttggctctgatttgacttgtatacacccgataaataaaactaattccattctgtgtggaaaaaaaaaaaaaaaaaaaaaaaaaaaaaaaaaaaaaaaaaagacctggcagccgtcccgggcgccatcttggggcgggggccccaccagctcctcacaggtcagaagaacggattcacagggatgctcattaatagataggcagctctgtcctctcctgttttcctgtgctatactctgcagttgtcagaataagtacaccatgactgactgacatgttttggtaaccagagactgaactctgaaatgcctattggctggtagatttgaaatcctcaacatttgaaaacttctgcatgtgtatacaacatgaatgctaactgctttctcccaagaattccccttgaagtggaatagattctatcaacaaaagttttctctttgtttaaacagcacttaagcagtttaccctaaataaaacaaaatgcgacttaaatgggtcaaaactccctttataataggt

SEQ ID NO: 3532 - DNA, 1000 bp, mus musculus
gaagaaatggcagaggagtgaacatggtcagaatatatgcatgaaaatattggcttcaattaatatagacaaaaggtgtaaatggaagtcagataaggagcgacagtggaatcccagtacagagctctcagattctgaacctgcaccatgccatctgcagcgaagagtgtacacctcacctgaaaagctgcttgtgccatgcagaaggtcgctgtcagaaaccgacccttaccctgcaaagcccgaccaccctccttcactgaccgatatgatgcaaattgatctgatcagcaattaatgcaaaagtagttaaaaccaataagggattcgaaatgagcaggtagagctcagaatgcagtgtcccagaggaaacactgctcctccatcacactgatggtcttatcaccccatcacccacttggtaggggaggacaaagcccaaactgagctgagcatattgagttagcacatgagtagaaacctgagtgcaggtctgggttatccacaaatgactgcttcatgtatttcacagatgaaccttagctaataaaggataggcagaaagggctttactgaatagataggctcaccttcattttagttgctgaaatgacatcacctctctcatttgctttcatattgaccgggtttgttgaaagacctgatgttaccatcatcacttgggactgtggcatgggctaactgcatgttcaagaaaagctgtgtcagagcagtcaaagaagctgggatctcttgcatctgtgggtcatgtgtttcccccggaaaactggaagcaggacaggtggccgtgcgttatcaatgttttcatttacccgtctgtctctttcaattcaaagtttgcaaaagagaaataagataatgtgattagagagccaaacatattcagagttctaaaaactaggccattgttaagattaactgatggattaaaggggtttagattttggatttgcatattctgtcaagaatcttggttctg

SEQ ID NO: 3533 - DNA, 1400 bp, mus musculus
agtctggcctgcacatggttaggactggttttacagatttaggaacaaggggttgggaggagagatcaaataccttcatcctaacagattgtaaacactcctcgcttcacctcttagttttcctaattcaatataacttcctagaagtgtcagggtatgttcacaccttgcagttcagtcatgagttaagacctggtcatcttccagtatattcaataatagcacaaggccaataccaggcacccaacctggagaccaagagcagaccgttactcagacaagctatcgatgacatgtagatggaatgtttctctgtacttgtaggagaaaggaagagctggacctggctgaggtctctgatactaactcacttgtacagtaaggaaaatcagaggtcacacagaccttatgagaatcttaccaaggcacttggctcaggtagacagtacatctattcccacaagagaggagggtatgtaggtccttctacataaacctccatagtttgtgaaaatgaaactagatcctaatacaagggccaggtaattcaaaccctgtgagcggctactacaattggagtgccgatgggcctgtctataacaggtcacttgagagatggatgctgctgctgctgctgattatcctgacagatgcatgaacaaggactgtccttgttgacctagtggctgagtgcagcactctagcaacggagtatgaaggtaacatggcccattatcgtcaccttgttgttgacatcttggctaaatttgatttctacacaatgataactggagttaaataggacatgaacttgacagcttgggtttgccttcatagtgaaggacaaatttcactgtgcgagcaaaaccatcaggagagttcttgtccttagttatatggtcttatacgcgttcgcgcgcccggccaggaaagaacacaacaaaccaaaatcttctgcggcaaaactttattgcttacatcttcaggagccaggagcgcaaacccccagccccaaaagcgaaagccaccccaattacatctttaggagccagagctccggcgcgccaaagcgcagagcgcgctctattgtttacatctttaggagcaagcgagcaggcgccagagccagagagaatggcggaaaccccgtcccctttaaggaggagttatccttcgcttaggacgcatcactccctgattggctgcagcccatggccgagctgacgttcacgggaaaggcagagtacaagtagtggtaaaatacccttggcacatgcgcagattatttgtttaccacttagaacacaggatgtcagcgccatcttgtgacggcgaatgtgggggcggctcccaacatctcccccttttcttttaataagagcaaataggccacccatatt

SEQ ID NO: 3534 - DNA, 1000 bp, mus musculus
cttttatattttccaaggtcttctcaggatgcaacagtagagcatttactgagagttaagaataggctttgggatatgggatggtggagatgtttgtgttggcaaaatgattgctgtgcagttatgcctgaattcagattccctatgtaaaaacctaggcatggcagcacttactctggaagtaagagaaaagaaaatccctaaagcttactgactggctagttttgagaaattaatgggctcagggttcaggaaagatcatctcaaaacctaaagtggaaaatcatgaagaagtgtatccggtgttgacatcagtcccctgaacatatgcacacacaatatatctaccataccatgcacactcaaacagacctgcacttcaacatgtacacacacacacacacacacacacacacacacacacacacctatgagcacacacacacacgtgctcacatgcacacacagggagcaaaggttttgcttaggctcagaaaggttgaaagagaaacactctgacagcaacagttgatgcaaaaccaataaatgtgttattagttgctcaattatgtactgactacaagaagggattcctgactactgtgcacaccaatttctgttcttctctgtagactgggattgagcttcaacagcatcaccgttatggagaatggcagtctggccaatgttcctcatctgagggaactccacttggacaacaacaaactcctcagggtgcctgctgggctggcacagcataagtatatccaggtaaagcaaatcagttccttttaggactatctggaaaggaatcctcccagtgtgattctgggaggaagggaactctggacagaaagttattcacgtcatggctctctctattgtaacaacatcttatgagttgggggtttggagagcattcatggcctcagatcagagtaacagtatcgctaggttctggtgagagcctcacccaaactctgagcttctgatatcacca

SEQ ID NO: 3535 - DNA, 1000 bp, mus musculus; identical to SEQ ID NO: 3534

SEQ ID NO: 3536 - DNA, 1000 bp, mus musculus
ggcggcacacatgcgattgctcgcagcacgtaccggctttccacacttctcccttgtccctcaccatctttggcatttgaaatagctgtttctggggtccagaaactagaagtgactctgtcctgtgcctgttgaaccactttggagaataagccctgcacctgacctgggcatcacagcagagctggtcctgaatcttgtgggtgtggatgagcctgctctgagggcatgaaagtaggagagttggctctgccccttgctggctgtggcattggataggccagccaggacagagcagcagatggtgtggttgtgggagagctggcagcatgacctgctcagatacttcatccaggactttggcctatccttacctcttccctaccaatgaactgcattaaggggctggctctatgggtacaaaaattaatggaaatccttgacactgctcaacaacaggatctccaacaagagtcccactgaggattcagtgttgatagaacagcagaagccagaggccttgtactggaccaatgactcattgcaatgtatatttgcaagcaaagaagtggataaaagggtatactgtgggacacactatgacatccactgtgtaattttcttttttctgttgaggggaaggttataatggcagatgctgtttatggtggaactaggagatgagtgggatttaggttcatgatgtgaaattcacaaagaaccaataaaacgttttttaagaaatgggaacaaaacacccacggaaggagttacagagacaaaatttggagctgtgacaaaaagatggaccatctagtgattgccatatgcagggatccatcccataatcaacttccaaacgctgacaccattgcacacactagcaaaattttgctgaaaggacccagatatagctctctcttgtgagactatgccgaaatatacagaaatggatgatcacagtcagctattggatgggtcacatggcccccaatgcagg

SEQ ID NO: 3537 - DNA, 1000 bp, mus musculus
ttttggccagagatgtactacttgaattagtttcgtgactttttcccttttctaaaagacttccctgtagaggaagaaagcaggtggtgatgaggaggacagaaggcagtgaaggcagagaccatgggggaaaaaaaaagttctgattattgcccttgacaatcagtttggttgtggacagaggtgtcattgtttcggccaagtagcagttttgtcctatccagaaaccagagtataatgttcagagactttggcccatgcacaaaggctctgggccacttccagatgctctggtccatgcacagaggctatggtccatgcccagaggctatggtccatgcacagatgctctttgggacctgagtagagactctggctcatgcacattagttctggttcattcccaggggctctggtttgcacatagcagctctgatttgcacagagggtctggtccatgcacaaaggctctgattgatgtacagaggtgctttttttcacacatagaggctctggttcatgcccagaagatcttattgatgtacagaggtgctttttcacacatagaggctctggctcatgcatagagagtctggtccatgtacagaggctctgtttcatgcacaaaggtattgcatcgcacacacaggggccggttcacacaaagaggactggttcatttacagggactgattcacacagagaaactctagttcatgtcttgcttttgttttttctctctccctctatatcttttcacagcaacctaatgagcagttgactagaagccacacacgtgtgggctgggcccccagtgcagtcattaggactgtgaattgcctagatgcacctcatggagttctattattgcagtgtcaggaccaacaaccccatcttttcatatctaagtccagtcagttcaaacctcaacctacttcctttgcaggtaaaaaggtcccatcaatccccagacaaagctcctcggtggcaacttcctcca

SEQ ID NO: 3538 - DNA, 1400 bp, mus musculus
actattacgaatcttttaaaaattaaaataaatagtactgctgaaataacgtttccccaaaaatccaaagcagccaagagtatattttactttggcgggtttgaatcgatatttacaaattcgttgatacttctgatcttgaaagcagtctgctcttactttcatgtacaaaagtcatagtcattcactttcggtgagaatcattttaaaaggtggaagatcaccctgtctacccatgataggtttatgaagggtctacagcttccacataaagctattcagtttctctcacttcttccccccccccccatctctttctccacttctttgtcttccttttgttctttttcttattcttcttcctacttcctcttcctcctcctcctcctcctcctcctcctcctcctccttctcctcctcctcctcttcctccttctcctgctttaccattcagcctaattaaaccagcttccaggccaggacatagatgagacagtcttgggaaggctgaagctgctattggtgtcctgaggacattcatgcagcagtggagaattgttcaaggaatacaggccttgatgatcatgtgagaagcctttgcaaaggaatctaaactcttaagtcatgagctcatattttcatagccctagataacctcatgacaataattgggactgtgctccatggctttgggcttggcctatcagagacacagagagatgaggaaagaacagatcccagagacaggaacaaaaaaactgggatcaaatgggtagtgctcactctgctgctcaagtaccagttatgcacaacaatccagaaccttggttcttgcactacatacagaaaatggagggggatccgtctctgtaggcaaacagtcctagctggcagccatccatggggagggcctatggttgccaattttgcacactgtcagaattcatacttagaagagagaaaggctatgtcatacatccgcgcctcaccagggaaacattgccattatcactggtctgactcactgggtcttcattacagttatgtcagcattaaggtcatctactctttacacattcatttgggggctctttaactcccccacaaaaccctatatatgtttactctttctgtgtagtaacttagcacataccaagctgtttaaacaaatatttacctaccacctactgttttccaggcacaaaacattcatgacaaatttaagacagtgctctggtaggtaactcaaacaagcctttgtttatttacctgttagagacactctttcaaacgactttgtgggcagaattaatttcattagagctgttaaattcatgtgaactcgtaattaattcaaatagtttggaaactttactgtttttctatattaaaaggtgagg

SEQ ID NO: 3539 - DNA, 1000 bp, mus musculus
acatagtgagaaccaggcttccttcataaacagggagactgagtttggatgctcagcaactatttaagatgaggagccagatgacatgcaccttaaaacctagcaatggggtgacagggataggagaatctttgaaacttgatggcccaacagttcagccaatcagcaaactcagtgggagaccatacagttttaaaagacaatcaagtagagcaattgaggaaggtactcaacttcaatctctgaactcttcacatgtgtgctcccatgcacgtgtgtgtgcgcgcacacacgctcacacacacacatacacacaaatggtcaagtttataataaagtaagctattcatcttggggctgttttttgttccttctccattcttcataatttgaataaaatagtagtatttctgatagcagacactccatcaaacattatttggcaggagagagtgacagaaatgtcttgttcaatagccatgtttctgtcttgtcaggctcagaggatttgctcatatttatcgaacaatgagagctctccttgacaaatttatggaataaaaagaaacataatccatgtttgaaaatgctaaaaatcaaaatatgagttagacagaaatgaaaagttctagacacatcaggtaaccagtaaagagtctcatgagactccctgaacatttcatagcaacaagagatactgtcctgtagaaaaaggagggagatatttggacagatggcaaaatggttgtgaatacagaatatatgcttgggacatggaactatggtgccttacttacttagcctttaagttttaacttctgggaaaacccgttgttttacatcttctgtttgctttggttctagacctttaaatatacacaatggaagtaattattcaaaccatccaaatcctcaaactcgcaaacattgcaagcattcagtgaagtctaacatgcaagttcatttctgtacctgctctatgcttacatttctttcattt

SEQ ID NO: 3540 - DNA, 1000 bp, mus musculus
gggcctttcacccttgatcactaattgagaaaatgccttagagttggatctcatggaggcatttcctcaactgaagctcctttctctgtgataaccccagctgtgtcaagttgacacaaaactaaccagtacaaccttgttcatggggattgggaggattagctagcatgagccatacattgtgtgtaacagaaaacgacttagaacagtacctgcccaggtgtgcgctttaattctggtaactactgctagtgactcacttccttccatctgtgacacacagactactaaacctcacagtgtgcttctatcactttacgctgaatgtggtttacacgaagcctgggttttcctcctcaagcctactcagtctttgcttgctttgctctggatgaccagcctgtttctccctgtggaatgcatcccccgttgagttaccctgatttattcagtgtatctagtaatcatagatctggagacccgggctctattttattcttttgagggcttttgctcaaagtgatcttcctgttcccctccatgtgctggggaactgttgctgtttgactgattttcgtctatagaaatggcactggcattcggctgacctaatgcaagggttctgctttttacttcctcctagatgtttccatcaagacaaggtcagtgaagtctcaagttttttcctctcttccctagaaagacctggactttgggttttggatacttggttttctgtgttcagattctaagacggttcttctgaaggccggatgtctcattgtactgtgccgtttccctttccttgttcagactggcgtgaagcatacactcttggttggttcgtaagcgtattgaagatgttactcagtgcttacattattaaagtggccaaaggacatacgatcaggacattgatgtcattgcacttggcatctttacataaactgttggtggattaaaaaaaaatcagggtcccaagcagttaataaaagcagca

SEQ ID NO: 3541 - DNA, 1000 bp, mus musculus
atttagataggcttacatgataggacttgagtaatccaccagtatttttctgtacttggagcagcagagaaaccagaaatttcccaggctaggaaactcagcattcccagtgcagcactgacagcctgcaaggttgctggtgtggaattcgtgttgctaggcagaagaggctggagtgtgatgtcagcagaggctctcagcagaagtaagagacacactcagaacgagcgagcgctctccccagcaggacacagtgatgctttctcacgtttgttttgcatgctggctgctgatggggaagagctacttacccggagaatgggtcctccccatcctcaggctctgactcacctgtcaatctctgaaaatgtcccccaaggcacacagatgtgtctcgtcagctctacacatctttttctccaatcaaggtgacaacttaaagcagccatcacaagacattgtgggtcgatgtagcctctgattctcctataagccaatctaatgggtctcataactgtgcacacgtcctgtcagttctttccctccggagagctctggcatacgaatcgtacaaacagtcagagtctgaaacagtccttaactttcttgatctcagtttgctttcagtgctatataatacggtctatttggtaagcttttttaaaattacagcaaaatcaattctcaatgtgtagttaataactgagagataaatatcagccattaattatttgaagtatagaatgggctctgttatgataagaacttcatcatcattttctcatttagcttttacaagaatcctaaaaatgggtcttagaatatcactacagaagaacctaaaaatactagacatgtgtcccccacctctcccctcccctttcctcccctcccatctcccttcctcccctgcccccaattccccttcttcccttccttccttcttttctttttttctttttttggagaaaggatatcactttgcagctctgactggcct

SEQ ID NO: 3542 - DNA, 1000 bp, mus musculus
cagaactcaagaaggttaacaagcagaagggcctaagtgaggatgtttcaattccacttgggagggagaacaaaacaatcacaggaggcagagggagggagggaccttggtggagaggggaggggaaggagaaaagggaaacatgatctggtatggggaaaggaggcaggattgaagccccaagggagtgaatggaaatatgtaaccttgagggaagagaagtgtggtgaccctctacaatgtaccagagacctgggaggtaaaagaatttcaagactcaaagagaggcacttcagatgaaatgcccaacagtggggagagggaacttgtagaattcacctccagtagaaaaacagggcatcaggtggagggatggggttgccgtgctacagtcaaaactctgatccagaattgttcctctctaaaagaactgcagggaaaaaaatggagaagagactgagggaaaggaggtccagtgactggcccgacttgaggtccatctgacaggaggctccaaggcctgacactattattgatgctatggtgtgcttacagacaggtacctagtatggctaccctctgagaggcccaacaagcagctgactaggacagaagcagatacttacaagactcaaccagtgatctaaagttggggatacctgtggttgaattaaggaaaggctggacaaagttgaggaggagagtgaccccataggaagaccatcagtttcaactaacctggacctccacgatctctcaaacactgagccaccaagccaggcaacagatactagctggtccaaggcccccaacacatatacagcagaagactgcctggtctggcttcaatgagacaagatgtacctaacccttgagagacttgaggccccagggaatggggaggcctgacagggtgtgttttgatgtgtaggaggtggaaacatcctcttggagtcatgggagtaggaatgggatgaggaactgtcactgtcggagtgtg

SEQ ID NO: 3543 - DNA, 1000 bp, mus musculus
agaaaacccctatcccgtaccccctaccccggcctccatgagggtactcctccacctacccactcccatcttccagccctcgcattccctacactaggacatcgaacccccttaggccctaggacctctcctcccactgatgtccaacaaggccatcttctgccacatatatggccagcgccatgggtagctccatgtgtattctttggttggtccagtccctgggagctccgggggtctggcctgttgacactgttgctccctccatggggctgcaaactcccttagctccttcggtcccttctccaactcctccatcaggacccccgagctcattccaatggttggctgtgagcttcctcttctgtatttgtcaggctctggcagagccgcttagagacagtcatatgaagcttctatcagcaagcaattcccagcatccacaatgacgtccttctgggtttggtggctgtataatggatccccaggtggggcagtctctggatggcctttccttcagtctctgcgccacatcttgtctccatattttcttctgtgagtattttgtttacccttctaaaaaatcactgaagcatccacactttggtcttccttcttcttaggcttcacatggtctgtggattgaatcttgggtattctggacttcggggctaatatccacttctcagtgagtatacactgtgtgactgagtcacctcactcaggatgatattctcaagtaccacccatttgcctgcgaatttcatgaagtcgttgtttttaatagctgagtagtactccattgtgtaaatgaaccacatgctctgtattcattcctctgttgagggacatctgggttgcttccagcttcttttcagcctcctgagaaggttctggctttttccacttgagctggaaaaccaagtgacagaagccaagcacaagggacagactcgctctagaaagaatcttctctcgaaacttctttagtctcccaaga

SEQ ID NO: 3544 - DNA, 1400 bp, mus musculus
ttgaacaacttctgaattcgtggaccttctatttatacacagatattttggactaactagcatacactttagaagctattccagtaaaattatatatatatatatatatatatatatatatatatatatatatatatgcatataaataaaaaacatatatatatacacatatatacaaaaatcagtcatcaatgatgtcttattactttatgattctagaatacttgtttatttctaaacatatttttattatggcaaaggtgaaaatgccaccttcacaaaagcaaccactacaatttacccacaaaacaactcagttcaaaataggtatattttagaattaaaaaaaaaaaacaaaaaaaacaggaaagagtaagagtgagagagagagagaaagaaagaactttacatggggtttaaaacaggagaaaataaaaagaaacaaaaaaggaatccaccatcgtctgcatggtccagtagccaattctcagtctaggcatcagagacaaggctctgggtcgccttcttttacagctttgctcagttgtttagctggtgtcaatcatttccaagtaagcatccagctgggcgtccaggtcctctgcagataggtgctgctgctgtttttctactgctgctgctgctgctgctgctgctgttgctgctcctgctaatcctgaacctcctgctgctgctgctgctgctgttgctgctcctgctaatcctgaacctcctgctgctgctcttgctgctgctgttgctgatcctgctactgctgttcctcctgctgctcctgctgctcctgctgctcctgctgctcctgctgctgctgctgctcctgttgctgtgagttcttgctggtgcctcttcctcttccatggctgcctccaagtgtccctctcctggagcctcaaccactaaaccttccagagccagagtttcttataatgctgcccctatttctactttgtgcaggtcttccttgtctatcaatctgtgaggtgacaaggtggatgttcatagggcggccatccaaaggggcgccattgtactctctcatagccttcagggcatctgctttcctttcaaagtgcacatgtgctgtccctaaacttcgtccacagcgatcatagtgcacagcagattttttcaacgttccaaattcagcaaagagtagctgaatatcagcatctgacactccgaagtgcagatttgacaggaacagcttcccaccagtatccacgtggttttgacccctgaagcctccaatgaataggtcatgctgccacttgtctggaagttgttttggtctgcagtatggtgccagcctgttccttccaccatgggtgaaagctggtcgatacctcttaggcccagtgcctcgcttcacccgggaatca

SEQ ID NO: 3545 - DNA, 1000 bp, mus musculus
agcagagctccgaaggattcagcagaagccaggcattcacaggaaggagatagttaaaagtcagctgtcgtgtcggggttgggcttacagcagctggattatcaaacctgcataaacaaggacaaataagatatttaaacaaaacttgttttctctttgtttcagttgaggtctgaaaccacaacactctaagagactagtactctactcctgagctacatcttagccattctttattttgagacaaggttattgcttatgtaattgatgctaactttgaccacatgttcctcctgtcttagtttttcaagtatggcaattatatatgtatgcactatgtaaatagcaaccaccagctctaatttcaaatgttgttggctttatttacttgttttaattaatggtgagggggactgggagtaacacatggggagggcagaggacagcttgtgggacttagttctctctccatcatgtgggtcccccataactgacctctggttctaagttttggtagaaagtgactccccactgagcaagcagtaccagatcccaccttttaaatacaaatcttacatgttaaaaatatataagtaaaacatacaatactttatgtgaaacacaagaataaatacattggggctcagcacttggggcatatgctgctttggtagagacctaagttcggttctcagcacctacactgggcagcttaccactgtctataactccaactccagggtatctagcatgttcttctggtctctattcttacctgtacacaagtggcacacacatataaaacataaagataaataataaaaaaagtattactataggtgccttagaatcatgttatcatttcaaaatctaaatcacactgcccaacctaaatgaaatgtctcagtgagagcaacggtatccatggagaaatgcttgaagagaaattagatgggctcttttcactaattattagaatgatccagactggcctagagaa

SEQ ID NO: 3546 - DNA, 1000 bp, mus musculus; identical to SEQ ID NO: 3545

SEQ ID NO: 3547 - DNA, 1200 bp, mus musculus
gtgtggaagtcagtttcattgactaaagcaaacacctgcacacctgtagtaaatgtaactatggaaccttggtttagtcatcattatactgaaatgcagttatttgtgaaatcatagatcagtgtccaacatgaaatgttagtaaaataaaacacagaaaaccaggtcataaagcctcatattaggtggtctatgcttcctcgttggtggtccattgtctgagagatctcgggcacccaagctacttgaaactgctggtcttcttatagggtcgctctcctcctcagcttctagtttttccctatttcaaccacagaggttagcagcttctgtccattggttgggtgtaaatatctgcctctgactctttcagctgcttgttggctctctcggagggcagtcatgatagatccattttttgtgagtacactgtaacatcactaatagtgtcagggcttggggcctccccttgagctgaatccaaatttgggtcggtcactagacctcctttgcctcagcatcttctccatttttgtccctgcaattctttcagacaggaacaactctgggtcagagtttttgactgtgggatggcaactccatccctctcttgatgccctgtctttctgctagagatgggctctacaagtcccctctctccatgatagggcatttcacctaaagtctgtccctttgagtcttgagagtctcctatctctcagatctctggtacattctcatgggttcccccacctcctaccttctgtggttacctgccattttttctgctggccttcagtcctgttccccccacccaatacctgatcactttactcttttcttctccctgtccccgcttttcacccaggtccctccctcctttccctgtcctgtgattgctttctccctcctcctaagtgtgattgaggcatcctcacttgggcactttggcttcttaacctttctgatttgaggtatttgagtattatgtatttttttgtctaatatccatttattagtgagtacataccatctatgtccttttataacttttatgatctagccttagatatgatcccattaataaagaaactttactgagatttgctgaagttaatgagataaatatttggaactgatagacacaacgaggtgaacatttgataaataaattattttgataagcaagtgcttttccca

SEQ ID NO: 3548 - DNA, 1200 bp, mus musculus
attctagtctgcacttttgcatttagattttgttttttcatattcataatatttttattgattattcaggtatgttatatcatgatcccagtcaaactccaattcaatctcccattcttgcaacttcctccacagaaagaatgtagaagaggatgaagtgaagaaggaggaaaaggaagaagaagagaaagaagaaaagaaggaggatgaggagaaagaagaaggaaaaggagaagaaacatccagtttgtattgcccatatactcactggagcacgatcatactagcaatagccaactcctactacttcaccttaagccctccattggacacttcagtgtccttatcacaaatgttagaattttcttagatagctttctgtctgagctgttactttttggaggtgggtattgtggcatgatggtaggagttgtcacagaagctctctatgactctccttctcaactgtgagtctgcagtcatttatgccactgcaaaagtagattccttgctcattacagttaacaggagcacagatcatgggcttacatatggtttcttgtaactgcacagattgcagacctccatatggcctccaatgtcagcatgtgccactgacctcaacattgtctcaggtggcagaacaggacaaggacatcaacatagactcaggtggcagtgcaggtcagagacatctgcatggcctttagtgataatatgagtcatagatatcagcacagacccaagctaaagtagaagaacagacaaacatgtcccttggccacagcatagacaaaaatatcatcatgcccttgtgaggcagcacaggccactcataccaacatggtctcctggtttgctttttaaagaaaaaaagaaaaaaaaactacctttaatagaaactaaataattttatatctctttaggcttgagaataattaaatgtaaagcactgcttttgcaaattacaagagtttagatgtgaaatgtcacaagtaattgtttcagggtcactttcactctaggctttcgtctactttcttattttatctgttctttcccaccttatttatctttctttcaatatagttatttactagtttatctgcacattttgagaaccttaagtttaaagtatggaacatcatgctctgtctttgtaaaagccattgttatttaatgagaaaattgattgcaagt

SEQ ID NO: 3549 - DNA, 1400 bp, mus musculus
cagtgaaatgaatgcaatgtattcatgtataaaattctcaaatatataaagtaacaataaagtccatattttaaatggatttgcaagtgttaacagatcttttgagattcctatagtaatgataatatgttgctactgaaatatactaaaatttttgctgctagaaattataaaaattatgttaaattatataattatatataatagtgagaacttccttatactttagaaatagatactcttagtaatgtcaatggtttacaatatgtatgctttctgatctaatttgttttgctatatatcatataactgaaaatactgtgatttttttacaaatgcaaaatttaaaagagaaggaattgagttagcaaaactttacattgcccttaattttataattgcaaaaataaaataactaaataaatatagttaaagaaatcttcctatgtatgcttacacttgcctaaggagaaaattgattatttacatagagatattaatataggtatcctgaggtcatgattcacagtcaaatagagctgaataagaagaaataaaaaatactatataatgttaagtgaaatgtttaagattcaaatatatagtataaaatatccagagcaatattgtgattaatatttggatataaactcagaagtgagcttcatgaatgagagctcatttgattaattggaaggatcgtgattttgatcttgtgtctgttgtattctgcttctaatacactcctaataagaaccctgaatcactcatatgtgctttgtaaaatgtggaaaagcttgtcagctgtgcctcttcctttccctggagaagacagcctgccaactccagaaacagacttgccagtcagcacccactgccaacttacaccttgcctttagaaaggcttattgcataatggcattgcttcattatgttgcctaatttgtgccatcttttccctttatgcatttataactaaatctcagccaaactgccctttcttttccttgaatttatcaacaatagctccatcacaaaaactagaactgtctcccctcaaagagccacatggcattacttttccaatagcatccttgtattcaaaccctgtatcataaaccacactctctatatgaggcatacacaaattttcacatcaacaacatgtgattgcacattctattattattattattattattattattattgttattattattattaattttaccatacttttatcattacatgacatatgcctgcttattttttcatatggatatcactcaaaataaactgtaaatgccatgaggatctttcattacagtattattttcagatcttaggtgatagtgttaaaacaattttgaatggttcagttaataaatttacagagc

SEQ ID NO: 3550 - DNA, 1000 bp, mus musculus
aatgaagcagaacacagaaagaaacaacatgtccggtcaggtcacagaaataagtaagatttgtcccaaagatcacctaatggaaattctcatatcatgaagagaggaagacatatttctcaatccccagtgtctacatagatctacttcattgtggaataagtggctagctgtgactttattgtaaataatatttgtgcagatttctcaaaataattttattttccgtttctaaatgttactaaatggaatttttagctaattcatataatgtagttgagatatggtactggctggttttgtgtgtcaacttgacacaagctggggttatcacacagaaagatgtctcccttgacaaaatgccttcatgagatccaactggaagacattttctcagttggtgatcaagtgtgggaggacattgtaggtgttgcatcactgggctgggagtcttggtttctataacaaagcaagctgagcaagccaggggatgcaagccaataataacatccctccatggcctctgcatcagctcctgctttctgacctgcttgagttacagtcctgacttccattggtgatgaacagcaatgtttcctgaaatgtaagctgaataaacccattcctacacaacttgcttcttggtcatgatgttttgtgcaggaatagaaactccaactaagacagatattaatatttttattagatactttctttatattcatttcaaatttcaaatgctatcccaaaagttccctataccctccccctgccctgcttccctacttacccattcctgcttcttggccctggtattcctctgtactggggcatataaaatttgcaataccaaggggtctctcttctcagtgatggctgactaagccattctgtgatacatatgcagctagagacacaagtgttctatcagatattaatatttttattaatgcttttagcctgctaaagtgtctattaatattatgcttctttttattct

SEQ ID NO: 3551 - DNA, 1200 bp, mus musculus
gctgctatagagtagaaacagaagaaaacaagaacccagaatgtgcatctgctcagatggttcacaaatctctcaagctctgtgtatcttcattgtgtggatagttaaatattgaaagttgtatttttttaattaattgattttttttacaccccatatttcatttccccattcctgacccactctctatctgttccacatcccatacctcctccccacactcctctctccaggggcatgtacccagcctcaacccaccatcccacctgacctctaaactccctggggcctccagtctcttgagagataggtgcatcatctatgaatgaacacagaccctgcagtcctctattgtctgtgtgttgggggctgtctgtgtggtagcccagtgtttgagagatctctgtggtccagattagagactgctggtcatcctataggattgcccttctcctcagcttctttcagccttccctaattcaacaacaggagtcagttgcttctgtccattggtttggtgcaaatatttgcatctgactctttcagctgcttgttgggtcttccggagtgcagttatgctaggtccttttttgtgagtgctcagtaatagtttcaggctttgggacctccctaacttctaaagatgatgataggttctgatctgtgggcttcatgattactgtattagttagggttttactgctgtgaacagacaccatgaccaaggcaagtcttataaaaacaacatttaattggggctggcttacaggttcagaagttcagtccattatcatcaaggtgggaacatggcagcatccaggcaggcatggcacaggcagagctgagagttctacatgttcatccaaaggctgctagtggaagatggacttccaggcaactagggtgagggtcttaagctcacacccacagtgacacacctactccaaccaggtcacacctattccaacaagcctacacctcgaaatggtgccaccccctggtccaagaatatacaaaccatgacaaatacatatgaagagctttttactactgaacagacttttcacccacaatgtcaattctaactttctttcagcgattgtataattatttgtgtttaataacctatgaattatagcaaagagattctgatatgaaatctacaaatatacactgttatcaccaaagctaaacattttc

SEQ ID NO: 3552 - DNA, 1200 bp, mus musculus
gtatctgaatactttgtaatttcaatgagttaaatcctgagtgaggtaactcaatcacaaaagaagtcacttgatatgcactcaccgataagtggatattagcccagaaacttagaatacccaagatacaatttgcaaaacacaagaaaatcaagaagaaggaagaccaatgtgtggatacttcattcctccttagaatagagaacaaaatacccatgaaaggagttacagagacaaagtttagaagtaagacgaatggatggaccatccagaaactaccccacctggggatccatcccataatcagccaccaaacccagacaatattgaataattcagcaagattttgctgaagggaccctgatatagctgtctcctgtgaggctatgccagggcctggcaaatacagaagtgaatgctcacagtcatctataggatggaacactaggtcccccaatggagtagctagagaatgtatacaaggagctgaaggtgtgtgcaacccccagagctcatgtttctagctgcatatgtagcagaagatggccaagtcggccatcattaggaagagaggctcctaggccttgcaaactttatatgccccagtacaggggaacaccagggccaagaagtggtgggtaggggagcagggcagggggagggtatagggaacttttaggatagcatttgaaatgtaaataaagaaaatatctaataaaaaagcaatccctgaactttggtacaatgtctcataaagacgcttaagagatccccaatcattgaagaacatttgctgctcttgaggaggacttaacatctattttttttattaggtattttcctcgtttacattttcaatgctatcccaaaggtcccccatacccacccccccaatcccctacccacccactcccactttttggttctggcgttcccctgtactggggcatataaagtttgcaagtccaatgggcctctctttgcagtgatggccgactaggccttcttttgatacatatgcagctaaagacaagagttcccgggtactggttagttcatagacttccaactatttttactccaagtacaggagatcaaagctcttcagaacttaattgacataagttcatggtgcacaggcatatagtcagacaaaacactaatacacataaaatatacattgtaaaagttaaaaagaac

SEQ ID NO: 3553 - DNA, 1000 bp, mus musculus
ttctctgagtgggtaggtgcccctgtgtaccccataccctgatacatcatgtctccatgaggctaggtgcattttcttccactgagcccagggaatgcaggccagctagaagaacatatcccacatacaggtgacttccttagggatagatgtgtgggtccatttgtttggaacccacatgaagaccaagctgcacttctgctatgtgcagggaggcctaggcccagccccttgtatcttctttggttggtgattcagactctgacaaccccaaaggtccaagtttgttgactttgttggtcttcctgtggagttcctagcctctgagaggctgcaatcctaactcctattctttcttaagtgtccccaagctttgggtgtctgcatctgtctgagtcagttggtgggcagagcttctcagagaacagccccttagagggcatcctatctgcaagcataacagtaccattaataagtttaggggctggtgcttgctcatggggtgaatctcaaggtggactggttattgtttgaacattccatgagtttctgttacatcctcaatttctaaattttatgtagacaggataagttgtgggtggaaatttttgtggatgggttgaggtccctattgctccactggggttcttgcctggtcacagggggcagcctttccaggctttatatgcccaatgctgtgagcaatgctaagaacaaccccactgatttcattcattctcagggcatatggcctaccccctgctccaccaaacaactgaccctgagcccccacactcctctcctgatcccctcttctacccagttctctctctccatctgctttccacaaccattgcatttttccttccttgcttatggcctcctcctgtccatcttccttagctctgtggagtgtagcatggatattctgtattttatggctaatagccagttataagtgagtacataccatgtttgtccttttgggatcatgttgcct

SEQ ID NO: 3554 - DNA, 1200 bp, mus musculus
ggaaattatcaccattacataatgagaaaaatacttacaaagctaaaatgagcatgtaaagatatgaagatattgttgtttaaatgcaatatatgaaaactgttctgatttgcctttaaatgtaaaatactattttcatggttttaactgagaaagactatttgtttctttttaaaattttatgtatttatatttcaaatgttatcccctttcctggtttcccctatgcaaacccccaatagtgcccccttactctgcttctatgagggtactcccccgcccacctacccactcctgcctcaccaccctaacattcctctaaaagggtgcatctagccttcacaggaccaagggcctttccttccctttgataacagataaggccccttcagctccttcaatcctttccctaactcctccattggggtttctgtgctcagttcaatggttggctgcgagcctccacgattgtattagtcatgatctgccagagcctctcaggagaccacttttttccttttttctttttctttttctttttctttttctttttctttttctttttcttttttttttctttttctttttcatttttctctttctctttctctttctctttctttttctttttctttctctttctcttttccttttccttttgtttttcttttctcttctttcctcttttctttttcttttcttttcttttttttttcttttcttttcttttctttcctttgctttgctttgctttgctttgtttgctttcttttctttttttcttttttcttttttagatttagtaatctaatggaatctgctgattctgtaggatctttaagacggagaagctattcaagggtgtagtctcaattccttattcagagataaaaggaggatgagacattttacacaaaaactaagtctagcactctggaggcagaggcgagatcctggacagctaggtctattacacagaggaaatgttttttaattaatcaaaccaaacaatctttaacaaatttctaaaatcgtcaagaatgctttctgtggatagactctttctgtgtacttattcagcattataatttaaaagtaacttcactatttccaattatatagaacaatgtttagctatcacttagccttgaatatgtaactggcacctggcaaaaatgattttttaaaatatttttcctt

SEQ ID NO: 3555 - DNA, 1000 bp, mus musculus
tctctaccacccccactctggggcatctagtcccagcatgtctaggaccatcacctccaactggggtctaaatagtagggaagggactccaatgatagcagacagagaacaagacaccccttcccccctgctccacttgttagaggacctgtctaggtccaattcctgtgtaatccctcattgatggcccaggctctgtgagcccccaagttcccatgttagttgactctagggtattcttgtggtgtccttgacctccccacttctatcccccactcttctacaaggctccccagacattgcctgttgtttggctgtgggtctctgcttctgcctccatccatggctggatgaagcctctcgggagccagagtcctgcaaggttcctgtctgcaagcatattacagtgtcattaacagtgtcaggtgttgactctctcacataggatgtgctcaggttggggcaatcattggactgctatctcttcagcctctgctctaccattatccctgcaaattttgtaggcaagagaaattttgggatgaacgttttgtgggtggatggatgtcccccctccctcctctggaagtcctgcctgactacaggacaaggccaattgagtctctatattcctctaaggtaggaatctaagttagggtcacccctttagactcctcatatcctctccagacccaggcctccctctagtccccagtgatactcccacctgtcaccttccattcttactcctagatctctcttgccccacctctccccacacatgatcaccatctccgttgttctcctcctcacctcctctccgtcccagttccttttctcaatccacctccaataaccatttaatttctccatctgagtgagatttgttcactcccttggaaccttcaattacccagttccattgagtatgtggattgcaatatggttgtcctgcagtttatgattaatgtgagtacacacaccatatttgtctttctgg

SEQ ID NO: 3556 - DNA, 1400 bp, mus musculus
attttatttcatattaaacagaatctataaaaatattgttttagacagttaaaagaagtaaatattagatgttaacttcaaaaataataggttaagatagtacaatgtgataaaacccatgctatttaacataaacagaaaatatcctatagtctgatgacatgctgtacataggattagcttacatttcacaaaacacaagtgagagaattgaagagtcatcttagaaaacagggcttattttcatatccttttgaattcttgtttcaaatgatcattttattcagatatgtgtgctgataacattttacctattgtacatccatctccctactccatacaactcactgtataggtgataagtcccagcctttgacagtgacaggaaagattagcaagaattttgactttgataaatcagatatattaaaactttgctgcagggatgcactcctcaaaagctggtttagcactgtaaacacggtcctccttgttgtttgctttctataaacctgtaacacagtaggtattccaattaaatgaagtgcatgttcatgtacacttcagactattttacattatcctgctggattatgatgccttaaagaaaagactatccaaatgattgtggtagaaggaaatatgagtcttttttttttctttcttggaacagattttattatcaacacagtcctttcgcgatttcatagacctgttatgtattcccacccctctctgccacactctcctctactggtcctccccttccattctcctgtgctccataaaaatctattttccttcattacaagttttggatagtttagtcttccagacccacttatgatacttttcaagctataagctatcaaggtcataaaagtaaatttttaaaggtttaattttggttcaatccaaagctgtttgtcagtcagttgagtgaggtaactcagcactttgacaaacagggttattggtcttttacgatttttctgctacaccaatttactgattgtcaaggtcaaaagagacatgttttcaaaatatattattattgatattctttttgaaactctatgagcatattgggaaataaactgatgctctctttcgatctttagcggccaagacagctatctagaacttctcagtgtactaaggtgtttgacataagcattgtctgacaactgaaaaataataaaatctgtaattcaccctatattcatgttaactaaagggtaggataagacatttgaataagaaatggtggaatgcccaagaaaatttttcctagggtaatgagtgtccttaattacattcaaaagtcattctatgttattctacttcttatttgattgaaacacaattctttctaatccttgctacaaaacatcacatgt

SEQ ID NO: 3557 - DNA, 1400 bp, mus musculus
gctttgatgaatactgatgagtgacttaaagtaatgttgactcatcaagtcttcttctatgatgaaaaaaaatactctatgatttttatttatttcaaagatgactcagtacttataggtgtaaatccattccttaatttaagaaagtagtaagtgtaaataattatcatagtttaattcccctttaaataaagttaataaaacatggggacccaattccaatcgtgattcatacatagaaggagctagcaagtatgtttctcataggtgatcagtttgttccttttcctggtgttaagaagtgtagtaccaatcataaattctaagaatgtcattagaggatatgctggtttttaaaaaatatatatatctttaatctttttttttacagtccagtccttatccccttcccatcccattccttatcccattactcccccacccctgccccatctccaagaggatgtccccaccacccaccacgcacccttctaggcctctgactccttggggcttcaagactctcaaggcttaggcacatcttctctcactgagtccatacccggcactcctctgctctgtatgtgttggggctttgtaccaactggggttacgatgcctggttagtagctcagtgagagatcccagagtccgggttagttgagactgctggtcttcctatggggttgccctcctccttaacttcttccagcctttccctaattcaaccacagaggtcctagacttctgtccattggttggttgcaattatctgcatctgtctgggtcagacatgcaggtcatctgtctgtaagcacaagatagcatcagtaatagtgtcaggccttggagcctcccattgagatggatcccaatttgggcctgacactggatctcctttccctcagtctcttctccatttttgttcctgcagttcttttagacagaaataattctaggtcagtgttgattggcaacttgattgaaagactagtaaattgttccttagcttctatctgtgaaagtgtttccatagaaagtcaaaagggggaaaaaatcctcccagaatacaggtggcaacaccagaaagatgcccaatgcctagacacttttctttctctccttttagtaggggtgatgtgagatgctctgcctcatgtcacaccttccctgcccagattcaatgaaaccatgaacctgcgacaccctctacatttaagttaatttctcgtgtactggttttcagagtaataaaagacagaactaggagcaggagatggagacaaaagtggataagtttgatttccctacacctatggccgcaccttcaattgtttatttttctaaactcagacttaactttcaacttaacctatggcccagtgactgaagcacattaa

SEQ ID NO: 3558 - DNA, 1000 bp, mus musculus
gcctcactttctatctttaacattcacaggggaattttaatccagcaagatggctcttctggcatccaaagaccttctaagtctggttgatctagctgggttacatacatgccctttctacacgcctttaatctaaaacaatgaagataaacatagtttagaggaagaagcagctatgtttgaaagtgacatgtaattgaggtgacaaatcagagaacgatttggtagaattaatcagagatagatatcccaacactcaggggaccagcacagaaaaggctacttaagagtagcacagggagagagaacaagtaagacactggtgatggtgtgtctgaaagaaagatgaaatttcaagacctgtaagtcatgtaatgtactcagaaattgctggttgtttgtgagcctagaggctgcctggggctgagaaaaaggaaaaacaacccgggtatgccctgtagttaaaaaattactgggaacagcttaaccttaaagataaagaggaatgtgaggacataacagggctatctgaactgagtcaacaactcacagaactctgacactctgcacgtacatgtaatttttctgctgatgtttgaataagccaacagtgtgttgctatgctgaatttcacacccctaagccccttactccataaaaacccctagcttttgagcctcatggccgacatccgttatctcctatgtgggatgcatgtcggtccggagctctgtcattaaatgacctcatgtaattacatcaagatggtccttcgtgattctttggatgcccgccgagtcgggaactgagttggggtttccccactaggttctatcattgtctatatggcagttttgccagggcagttggacagagacagggtatagaaagaataagctagaaacagctgaagacagaacaagccagagaatgaggagaagccagaagattagaacatattgtcaatgccggtatgaggccagacagatcaaatcagtca

SEQ ID NO: 3559 - DNA, 1000 bp, mus musculus; identical to SEQ ID NO: 3558

SEQ ID NO: 3560 - DNA, 1000 bp, mus musculus
ctttaacttgatgtttattgactattcattagaaataatagataaccattcattatcctggccctctgagcttctctcccccaccccctctgatcttgatcctgtgtccctttcgtgcctctcctatcctgcccaggtctctccctccatctgccttccatgattactttgttccccttctatgtggggtagaagcaacctcctttgggccgttcttcttgttaaacttcttatggtctgtgggttgtatgtatcatgggtattctgtactttatgactaatattccatgagtacataccatgcatgtccttttgggtctgggttacctcacccaggatgatattttctagttccatccgtttgactgcaaaattcctgatgtccttgtttttaaagctgaatagttttttagtatataaatgatccacaatttctgtatctattcttaggttgaaggacatctctttctttccagcttttagtggggttgtgaccattacttggtttgagttattttatgtgtatgctgtcatctcaccgaaaattaatccatgtgtaattgattgtaagcactagttcatcatctcttcacagactgtgtgacattaaggaattcgaagggctggagaggcattcaggcactcagtagaatatacatacttttacagtgcttataagagatcactgatcctcctgtgacccatgtttcctcaaagcaaagctcaacatttctaaagtagatggtacaagagatgcataccaacaatgcaactatacattgctgtcatacttttacacatgagctgctaagcatataggaattctgagtcagtgtgtttagaatactgttatttatcaagatagaacagaaagtcagtaaatggatttgagggcttttgaccacttcattgcacatagaatgagcaaactgagtgaagctagtcattaaagtgaaggtcagtagtcaaacaccatcaagccatataagagtatgataat

SEQ ID NO: 3561 - DNA, 1000 bp, mus musculus; identical to SEQ ID NO: 3560

SEQ ID NO: 3562 - DNA, 1200 bp, mus musculus
tttctaatggtgttgctttgaagatttttaatttacttaatttagtattaagagtcttaatatttttgttttgcttactagctttttctaatatttgtcattatgacattggtgtccttttcttctctttatgtcgtacatactgtgtttcctttaatttgatttctttaactctatatagtatagatgtaataaaaaggaaggtgtctttggcttacagatcagcagatatgcttcatcatgtcaggaaaggcatgatagctgaactggttcagttagtctgttgatgaaagaaaattaaattcaaggcccatgactcatgtggcttgctagttaggagggctttttgggcctagggcaaagaacaaaggctgttgctgtaaagtcattccaggaactggctagccataaagataggagaggcatgcaaggaccccctactatctcaactgagttatgggccatttggcccagtgcctccctgtctcctacccttatgccatgagttaaatgttgacatagataagcacccgcccttcagaattgctgttaccttgatctgcgcatacaatttgctgatgttaaactgtccaattgtgtgtaacagtgccaattcttcccctgcccccaacttttttgtatataaacccctagcttctgagcctcgagctcgactcctctgtctcctgcatgagatacgtgtcagcccggagctcagtcattaaactacctcgtgtttgcaacaagccagtctcccgtgattccttgggtgcacacaccatctcaggacttgagtgggggtctcccactatggtctttcatttggagatcccaacgagatttgtgtgacacccaggaaccccgaagaccccttggaggtacgtctgtgtgagtcttatatgttgtctgagtgtctgagtgcacgagtcatggaccttgaatttaatttttttcatggaaacaactgttgtatcttgtctgttccataatcagagctcagtcaggactagatcactgtcttagctgttctttattgacatctgctgctttaagctcccaccagaacagtctatcaagctcagctaacagcattctaagactcttctaacacacatctccaaactcttccacatgatccagtattaactcattagatttttgcattttcataccattcagagttgatacacaattcttata

SEQ ID NO: 3563 - DNA, 1200 bp, mus musculus; identical to SEQ ID NO: 3562

SEQ ID NO: 3564 - DNA, 1200 bp, mus musculus; identical to SEQ ID NO: 3562

SEQ ID NO: 3565 - DNA, 1600 bp, mus musculus
tccagaactattctaacacatagttttctatgggccactacattctctaggtttctatgtcttctctgcattaattatgatggccaatgatcataccatgcaatagaagacagctacttttcagcagaggggcacctttgggatggtagtatcatggatttcttgatgtgtatgagggcttatttcagaacacaaggaatgagaaagtcatttggtcttctgtttttcttaaccaccaagttgtcacgtgttcagtcagcatgtcacaaacacattacaatgataggttggatgcatagctacatcacagaactctttctaaagcaagagaggcaatacaattaagaataaatgctgtgaccacataatgaggaaaaagtcatactcaggcatgatgtcatagccctgtaatcctagatgtttgagagtctgaagcaggagaatcccaagttctagtcatgtctttgaaacagagtgatttcaaggtaaatcttgtaaacttagtgatattctctctctctctctctctctctctctctctctctctctctcacgcacacacacacacacacacacacacacacacacacaccaggaaccatacgcattctgttggattacatgtaaacacacacgggaagactttcacagtgaagcaggaacttcgatatcattttacaggcacaccccatggacaggagatggcctcgttgctgaccctccgcctccaaatctttacagtgtagggtactgtacctgatgcaggtagacaagggcccacacagcagcaattcaatagggtaagagaaggaacagacatgggtgcaggccctcgggtttgctttcccttccctccaaacagtggcagtgcatcacaaatggctgtttatcaaagtgggaagtaaaaaaccaagactgagtcctaaaaggcccagacgaatgaatacactatttctgtccatgctcttcaatcaggtggcgtggacagtcctgggggagggacgcgccacatctggccatcttctaggtgatgacagtgggcacagtgtggccagtcctctcctggagctaggacactttcagagcaatggagatcaggggcaccagcatgacctgagaggagcacaaaaggaaagaacccttcccatctcttttctttcttttttcttttttcttttcctttcctttcctttcctttcctttcctttcctttcctttcctttcctttcctttcctttcctttcctttcctttcctttcctttcctttcctttcctttcctttcctttcctttcctttttcttcttcttcttcttcttcttcttcttcttcttcttcttcttcttcttcttcttcttcttcttcttcttcttcttcttcttcttcttcttcttcttcttcttcttttggaatggttaatgctctgtttaatgaagtgtcaagaacaaacttctaagcatcaaaagcaggtcctctgctcacacgtaaactattggcaagcaatgccctcctgctcattaacactctctgttagtttctgaggtgttttcaatttctccagcaaggatctattagtcccaaacttctcagtgttactgtgt

SEQ ID NO: 3566 - DNA, 1400 bp, mus musculus
aacaatatagatatccccttaactgaagagtggattaagaaaatgtggtacatttacacagtggagtactaatcagctattaaaaacaagaacatcatgaatattgcaggtaagtggatgaaactataaaatatcatcctgactgaggtaacccttacccaaaaggacatacatagtatgtactcacttaaaagtggacatcagcttaaataataggatagccatgctataatccatataccccaaaaagccaaataacaagaaggacccaagagaagatttttgaatctttattataaagggaaatagatatgggaggtggaggaaggtaggaaactaggtctgagaggggatgagggtgggagcagggtggtggagtggtgatcaggtgtagggagagtaggggagagagaactgaagaaggtaataagtgggcagagggaatctctaggatgtgccagaaacctgggattgagggaatgctgcaggggacctagggggtgactctagctgagacccctagcagtagaggatatggatcctgaagcagctacttcctgtagccaggcaagactcccagtggagggataagaacagcaacccacccacaaaaccttcaacacaaaatatatcccgcctacaagatgtgcagggacaaagatagaggagagacttgaggaaatagcctactaataactgcctcaatgtgagacccatcctgtgggcataagccaatccctgaaactattaatgatactgttatgcttgcagatgggagccaagcataagtgtcctctgagaggttccacccagcaaccagtggaaagatacgcagaaacccacagccaaactttagatggagctcagggagacttatggaagagttgggagaaagattagggaacccaaaaggacagtgactccatcggaagaccaaaagagtcaactagcttagacccttggaagcttccagagactgaaacaccaaccaaagaaagagcatgggctggacttagggtaccgtacacatatgtaacatatatgcagctagatcttcatgagggtcctttaacaactggagacatagctgtccctgaatctgatgtctacctgtggatctcattaccctaattgggctgcttttataacctcagtgggagaggatgtgcctagtactgaagtgacttgatacagtttgaggtgttccacttcccaaagaaggggaacaagaaataaggggaatatctgcatgaggaggtactgggagcaggagtgtagagatgatattgatatatgaagtggatgagtaaattaattaattgataaaaaatactgcccctccgttagagttaacaattactgaagatgttttacaaaaaccttgcccaagtccctccaat

SEQ ID NO: 3567 - DNA, 1400 bp, mus musculus
ccatttctgctcatcttcaatttgtggtaagaattgacattttgttactaatatatacccataacaatatctaaatggagatattattcaatgttgaaagaaatacaagattatgtagattatctgagaacaccctcccattacagagacaaagaaccctgttctttcgtttgtttgtttgttgtttggttttgctaattatttatctaggattttcaattccaacgtctctgatgtgtgatcatctatatcaataacctgaactttagtgtttcaggcttattttagctgttaaatagtcaagctagaagaaaagaacaaaaaagaaagagagagacagacaaacagaccattttggatttaatgaaaagaaagacatcaaacatcttggttctgggactccaccaagagtagtttgcacaggtgagagtgtggactacagaaactaacagcttctgggacaggcagaagccacagagcttcagaggcagcccccttttcaggccccagacatctgggcaccttccctgccagaggataagtgtctgcacggcccgggaagggcttttcctgagcattggcagcagacatattggttccgggactcctccaagagtagtatgcacaggtgagagtgtggactacagaagctaatagcttctgggacaggccaaagcaacacagcttctgggacaggtcctgttttgggtcttcatcttcggccaggagggaggtctgaatgccagatatctgtgcaccttccctgtaagaggagaacttgcctgccaagagtgctctgaccactgaaactcagaggagagagctagtctcccaggtctgctgatagaggctaacagactcacaagaggaacaatctctaaccagagacaactaaatcaactaactccagagattaccagatggcaaaaggtgaacgtaagaatcttactaacagaaaccaagaccactaaccaacatcagaacccagcactcccacctcgaacagtccagggcagtccaacacacccgaaaagctagacctggatttaaaagcatatcacatgatgatggtagaggacatcaagaaggactttcataactcactcaaagaaatacaggagaacactgctaaacaggtagaagaccttaaagaggaagcacaaaaaccccttaaagaattgtaggaaaacacgaccaaacaagtgatggaattgaataaaaccatccaagacctaaaaagggaagtagacacaataaagaaaacccaaagtgaggcaacactggagatagaaaccctaggaagaaatctggaaccatagatgcaagcatcagcaacagaatacaagagatggaagagagaatctcaggacattccatagagaacatcagcacaacaatca

SEQ ID NO: 3568 - DNA, 1000 bp, mus musculus
gaaaaggccatccagagactgccctacctggggatccatcccatatacaaccataaaacctagacactattgtggatgccaagaattgcttgatgagaggagcctgatataggcgtctcctaagaggctctgccaaagccttacaaatacagagccagatgctcacagccaaccattggactgagctcagggtccccaatagaggagttagagaaaggactgaaggagctgaaggggtttgcaaccccataggaagaacaacaatatgaaccaaccataactcccagggactaagttatcaaccaaggagtacacatggaggaacccaaagctccagctgcatatgtagcagaggatggccttattggacttcagtgagagaagaggaccttggttctgtgaaggatggatggatgcaccagtgttttggaatttgaggagggggagtcttgagtggatgggtggaggaacacccttatagatgcagggggaggggagatgggaaaaggcttttcaggggaaagggcgaaagcaggaaaggggataacacttgaaatgtaatacctctcctgggcatatacccagaagatgttacaactggtaataaggacacatgctccactgtgttcatagcagccttatttataatagccagaagctggacagaacccagatgtccctcgacagaggaatggatacagaaaatgtggtacatttacacaatggaggactactcagctattaaaaacaatgaatttatgaaattcttaggcaaatggatggatctgaaggatatcatcctgagtgaggtaacccaatcacaaaagaacagggaatgccagggccaggaagcagtagtgggtgggttggggagcagggcgggtggagggtataggggacttttgggatagcatttgaaatgtaaatgaagaaaataatctaataaaaaattgtttaaaaaaagaaatgtaaataaagaaaatatccaaaaagaatgtat

SEQ ID NO: 3569 - DNA, 1400 bp, mus musculus
ctgtgcaaactggggttctggtggtgggagtccgaagcggcacttgtggggagaagcacgtggttcgaaacgtgccgccatccttcgtaacctaggtggaaactgcctagtgcatccgtggagaccggctgctttccaaatcaagttgggggtttgaagggcggggttcaaccgggcaagtccgagaggaaagttgctttcagggcagagatgcgctcctggggaaaaattgggttacaatattcctacgagtgggcggtgaggctggaggacagccagccttccttcttgagggcttgtgaatcatttgcaacagcaacacagactatcaaggcagtgtattcacgtgacccggatttgattctctcccgcttgagacatcctatgaaatggactgtccgaaaaccgacctttaggtctactctcggcacgtggctgctggagaaagctcagtttggagcttctctgcgcctcctggaaacgaaatgggtgacagagaaggaggaggaaaggatggtggcacagagatcttaaggaacgaatggagagggactaggcatccttctgccttctacgtagttgatccgcttggctggtctcggtgagatagcgcagaaatagaatatagcacactgaaacgaaagcgctgcacttttaacttccagccgaggaaagaatcagaatcttagaggtgcacttgccggtgcaaagggagacccacccgcttttaaagtctccaagggtgggcgttcttttcccttcggccaagaaatgtcactgaatgtgctcattagcataactaagaagcaatcgagttcttgcttccttctttcccttttcaatctccaccctggtggagaaaggctagagtaagacggggcggggcctggaggccagcgtggtgacgttgtaagtgtttgggtgcttatgcaaataagactgcagccattgcctctggttcaccctcctagtctcctcagaccttaaaggtataccctttcctaggtctgagttcttccatgcagagctgagaagaatgagaggaatgaaggctttcctttgggtactgcatttgggccccttttcgtcttctctgtaaaaggtattttatgactgcctgtgctcagtagctttctgaaaaagccaggaccagagcagtcccaacaagcttcaaaccccgagtgtctcattttttaaatgcagacacaattacatcttttccagctggtactaccctggagttttgtttgtttgtttgtttgtttgtttgtttttgtttttgttttttttttaggcactttataaatacttgaagaaatgaagtttcttgtttgttcatttacagtatgtgtatttctctcccacacattccgatgattttatattaccctaccaagttt

SEQ ID NO: 3570 - DNA, 1000 bp, mus musculus
ctgggctctcctcagcaaactcttcattccattcccccatcacctctgcctcttggagggtgctccactcttgtctcaacactctagcatcccccttctctgtggcaacaagccttcagaggatgaagtgcctcccttcccattgatgccagttaaagcaatcctctgctacatatgtatctggagccatggacccactcatatatactctttggttggtagtttagtccctgggagctctaaggggtctgattatttgatattgttgttattcctatggggttgcaatcttcttcagctccttaagttcttcccctaacttttccattggggtctccaggactcagtctgatggttggctgggagtatctgcatctgtcttagtcaggtggtggcagagcctcccagaggacagccataccaggctcctctgcaaacacttcttggcatcagcaatagtgttggggtcaggtgtctgcggatgggatggatcccaacacagggctgttttgtttgtttgtttgtttgtgttttgttttggccctgtgtttcctttagacagaacaattcaggattaaaaattttgagatgggtgtgtagccccttccctaaactgggggccatgtctttctactggggatggtctcttcagattctatctcttctctgttgggtattttggctaatgacatcaccactgggtcctggaagcctcttgcatccctggcatctgggactttctagtggttttccccagttcctccctacaccccacccctacttctacatatttctatttagtctcctggccttgatttctctcctgtccctttttatatctgatcctgcacctcctttttcccttccccttccctttccaccaaggtccctccctccctctaccccctgatgattgttttgctcccccttttaagtgggattgaagcaccaatgctttggccttccttcttgtaaagcttcacatggtctgtgagttgta

SEQ ID NO: 3571 - DNA, 1600 bp, mus musculus
catctcattttattgaatcatagcctacagcttgttcatattttccttggattttatgttgtattattcttttgatatttttgatcattttatatattcatatttcatttttgtttttcccacattggtttaaaatataactaagtgtgatccatttttatcaatcatgaagttttctgaatgtcttgcatgcatggcttggggcttgtaaaaatttgaaaatgtttaaagcattattcacttaggttcttttgctcagctttaaaatatctttcaaatttgagccattaaaatcacaaataaatttgataaaattttatcttaaaagtagagcaggatagttcattttttattgtcttatctgtacttgttattaaaagttatggcatttttattagatattttctttatatacatcccaaatgttatcctgaatgttccctataccttccctctgtcctgcccggctcccctacctacccactcctgcttcttggccctggcattcccctgtattggggcatataaagttcgcaataccaaggggcctctcttcccagtgatggccaactaggctatcttctgctacatatgcagctagaggtacaagctctggaggtattggttagttcatattgttcttgtctctgagcttgctatttcatcccaaggagctctgagggacaccaagagcttcctgtttaccttggaggtcttcagggttaccaagaacaactaacttgaaacactgcctcatcaattcctttccagtcaggtcttcctgaagcacagccaggagaggtgaattgtttgaggttcactgacctccattgtttggctctgtgctcaaccttccatcctgaccagctttgagggactccaagagcattctgtttccctgtggatgactgtggaggccccaaggacaactagcatggaaaactaacacactaatctattgccagttgagtccaccaaaggcacagtcagaagagctttgccccttgatctccatgtcttgtctgcagttcaggagcatcccactaacaaaagggatatccaaatgtctaaaggacagcataagaacacactgaacaatagccagatcaagatggcaccatcaaagcccagaaatcctgatactggaagccctggatattctaacaaaactaaaacaaaggaagtttatcggaaatacaaccttatgaagataatagaggcctttaaagaggaaaatacaatggaacaggtaagagatatgataaaataactcaagaaatgaatatggaaatagaagcaataatagaaacacaaaatggagcaatcctggatatggaaaccctaggaataagaacagacacaagccatcattagcagaatagaggagatggaagaaagaatctcaggcatagaagataagatggaagaaattgatacatcacttgaacaaaatgcaaaatctaaaaagttcatgacagaaaacatccagaaaacttgggacattataaaaagagcaaaactaagaataataggaagagcagaaggagaagattccaacctcaatgcccagaacatatcttcaacgtaatcatttaagaaa

SEQ ID NO: 3572 - DNA, 1600 bp, mus musculus
gttaaggaagacattataaacaggtatgcatttttctgggaaatatatctacttctaagaagaaaatatcaatagagtacatcttttaagaagttatataggtaagaatggagagataggtcactggttaagaactgtactgctctttgagggaactggagtttgattttgtgaatcaacatttggcttgaaactccagctctgttggaagcctatgtgctcctctggcctcctctggcctcctctggcacctcacatatctgacatgaatacacacatataaatacacatacacatatacatataaaaataagatttaaaaacagattatatcattaataaaattactagctgtaataaatgcaatgtctgtggtcattgagattttgttttgtagtatactcaaattgaatgagtaaaaatactataaaacatatcaatttatgtactcaggttgtttaaaatgaataaattcctttgcatataaattttaactgtataggaacttattttcatggtagatgaacaataatctattataatctcattgtaatattgctgttgacttatttacattttatatttatcatcagaaattttgacctaacaacttgaaaataattacaacgaaaatgtaattcattaaaaaatattctttaatcctggaaattttgtggggggatcctggttggttgacattgtgtttcttcctatggggttgcaaatcccttcagctcctgcagtctttcccctacctcctccattgaggttcccacactcagtccaatgtttggctgcatgcatctgcatctgtatttgtcaggctctggcagagcctctcaggggacagttatatcagggttctgtcagcaagcacttcttggcatcagcagtggtatctagtttggtgtctacacataggatgaatccccaggtgtgcagtttctatataaaccaccaaccaaagagtacacatggaaggacccacggctccattgggcgtcactgggaggtgaaccccttgttcctgtggaggcttgatgacccgggataggggaatgctagggctagggcactgtgataggcatgggtgggcaggtaggagagcaccctcacagaggtaggagcaggaggatgggacagggaatttgtagagggaaaattgggaggggggataacatggaaatgtaaataaataaaataaccaataaaaatgaaagaaaatgttctttaagttgttggtttaaaaaagcagacattaagtgaagagtcaatagaaaagtgctctgttagagacttgccatatgcaaaatccttgaaagctccacagacaagaagaaagagacaccatggcaggcaaaagagatatgttctgagtggcctaatgcttttgctaagaccatcaccatcaccatcaccataagtggagaaaacagcttctctgacatcatgagcttcttttactctaacacttcacacacacacacacacacacacacacacacacacacacacacacacgtcatagagttttacaattgccatctcgatattaatctaccctcaactactttcgaggggctagtttcttggtttaaat

SEQ ID NO: 3573 - DNA, 1000 bp, mus musculus
ttggattagacacaaatcatcaaagcaccggggcgggggtggggaaaggagagccagatgaagtgtggaaggagataggggagatgtacagagggtcaggaaactgaacaaagacatgtagcaatgggagatggggaactggggtagccaacagaaagccctctatgccaagaaagcaagaggctcccaggacccaactgggatgaaattagttgaaatacccaacaaaggggacagagaacctgtagagaccatatctagagactaggcacagctgtaggttaagggatggggccacctacccttctcaaattttaacccagaattgttcctgtctcaaataaatacaggggcagatagtggaacagagactgaaggaaaggccatccagagactgccccacctggggatccatcacctgtgcagtcaccaaacccagacactactgcagatgccaagaacggcttgctgataggagcctgatatggatgtctcctgagatgtggatgcttgcagtcagttatttgattgagcagggggatcgagatggaggagtgagagaaaggagtgaagaaggtgaaggggtttgcaacccaataggaagaacaacaatatcaaccaatcagaccacccagagctcccagggacaaaaccaccaaccaaagagtacacatagagggagccatggctccagctgcatatatagcagaggatggccttgtctggcatcaaatgtaagcgaagcccttagttctatgaaggcttgatgcccagtgtaggggaatgctagggcaggggtgtaggagtcggtgggtgggggaccaggaggtaggagggagaggggtgacatgaggctttttcagagaggaaactgggaagggcgataacatttgaaaggaaagtaaacaaaataaccaataaaaaatgtaaaagtcttaattccatataaagttactgcatcctagaatttttccattaaaaataagtgcttgtcaaggga

SEQ ID NO: 3574 - DNA, 1000 bp, mus musculus
gagtacatcagatgatacagaatacgcaagatacagttcacaaagctcaaaacagtcaacaagctgaagggcccaaatgaggatgtctcaatcacacttgtaggattgcctcaatcacaagtagggagagagggagggacctggttgggaaaggatatggggtaggaggagaggggaacatgctctggtattgggtggggggaaggactgaaaccctgggggccagctaaaagagtggaaacatgcaacctctagagataggaagtggagggatactccagaatgcaccagaggcctgggagctgagaggctctcaggactcaaagagagggacctcagatgaaagaccctactgttggaagagggaacttgtagaggccacatccagcaggaagaaaactcatcaagtgagagatggggttgccctcccacagtcaaaactctgacccataattgttcctgtctgaaagaattacagggatggaaatggagaggagcctgaggaaaagaaggtcaatgaaggcccaaagtgggatccaggtcaaggagaggacccaaggcctgacactacaactgaggctatggagtgctccccaaagggacctatcatgactaccctccaaatgacccaacaagcacctgaaagagtcagatgcagatatttgtacccaaccaatagacagaagctgctaataattgtgactgaattatggaaaagctggaagaggctgaggaatgtggtaggaggaccagcagtcttaattaacctgaacctccaagatctctcagacactggaccaccaaccaggtaacatagcccagttgatatgaggcccccatcacatatgcagtagaggcctgcctggtctggtttcagtcagagaagatgctcctaaccctcaaaagactggaggttccagggatttttgaggtctagtggggtggaggttgggatggtggggacatcctcgtgaagacaggaaaatagcaaggaggtatg

SEQ ID NO: 3575 - DNA, 1000 bp, mus musculus
attataccatttgtgatcaatacagacattcttgttcactgtgctgagaataacttactgggagtactcaatcatgaatgtgacgtctatacactcccccaaggctcaagaaagatgggaaggagttatgtgaaaagtcttttaggtatgatatgccagttgagcatatgaacttccagtgtcagtgattatttagagaagactatatatgacctacgttaaggtccctcaacagaggaatggatacaaaaaatggtgtatatttacacaatggagtgcagtgcagctattaaaaacaatgacttcataaaattcttaggcaagtggatggaactagaaaatatcatcctgagtgataaaccaatcacacacacacacacacacacacacacacacacacacacacacaaataaaacccacacatggtatgtactcactgataagttgatattagctcaaaagcttggaatacctaaaatacaattcatagaccacatgaaaggaaagaaaaaggaagaccaaaatgttgatgtttcagtccatcttagaagggggaacaaaatactcacaggaggaaatatgaagacaaaatatggagcagagcctaaaggaaaggctatccagagactgccccacctggatatccatcccatatacagtcaccaaacccagacactattgcagatgccaagaagtgcttgctgacaggagcctgatatagttgtctcctgagaaactctgccagagcctgacaaatacagaggcagatgctatcagccaaccatgagacagagcacgggctcctcagttgaggagttagagaaagggctgatggagctgaaggggtttgcagccccataggaggaacaacaatatcaaccaaacaaacatcctagagctcccagggactaaatcaccaatcaaagagtacacatggaaagacccatggctccagccacatatgtagcagaggatggccttgttgggcatcaatggaag

SEQ ID NO: 3576 - DNA, 1000 bp, mus musculus
gtctaggttttcggatgtgttggggtgccctggactgggcgaagtgggggtgctgggttctgatgatggtgagtggtcttggttcctgttagtaagattcctatgtttacctttcgccatctggtaatctctggagttagttgttatagttgactctgtttagagattgttcttctggtgattctgttaccatctatcagcagacctgggagacagactctctcctctgagtttcagtgctcagagcactctctgctggcaagctctcctcttacaggaaggtgcgcagatatcttgtgtttggacctcctcctggccaaataagaaggcccaaaacaggaactttcccagaagctgtgttgctttggcaggtcccagaagctgtcagcttctgtggtgcacactctcacctgtgtagactaatttcctaagttcggaggagtcccggaaccaaggtggtgcccgttgctcctgaggctgagggcttccgagccaggtggacacctgtcctctggtcgggacggtggccagctatctgcggcccgacaagggtgctgcctcagtggctctgtggctccgcctgtcccagaagctgtctggttctgttgtgtaccctctcatctgttcagactcatatttttcacatcacataatattctattttctgagattacacagattgttcagcacttaattttggacctctcagtcactcccaagtttggataattttgaataaatttctataaatatgcatatgcctctctttgtatgcacatgacttataatttcaatacaaaattatttaagaaatatttgctatattttgtggttgggacatatttcttttcagagtccctaaacaatccaccaaaatatgactattttatactcctatacaaaatgaataatagttcttttttacctacaccagggccagtgctaaattttatcattgttcttaatctgaccttattaaataagatatgttgttgcattt

SEQ ID NO: 3577 - DNA, 1400 bp, mus musculus
caattcataaactagtgttgttcagtgtatgacaaagaatgataaagcaccattttatacaacatggaacaatttagggcagggacagcctgatctcagctaggatcttaacaacgtgttctcaattgagctggtgcctagatgctattcttctgcacaaagacttacaatgtcctccaaaattctatcttgcttacatttcagaaacagctgctccttcacctctccatgtcagttaactgtgctactgagactatgatccacaactgtctgcattgtcaaagctctttaggtacccatagccttctgttgtagatgtcctgaactaaaagttttctgtttggtatatagtttttgattttccattctgactttcattcttcacaggctattagagaagtaccctctagttcacaatcacaaccagcagattctctgtagttcttgaagatatattcttgtgtggcctagtttttcgaagttctgttttgtttagttttttggttttttggttgtgaggagtgggtgcggctgctgccccaagatggcgcccgggacagctgcaaggtcttatgacctgcgcctgacttcctcattatctcagacttagccacatcccagtcgcctgcactgcacagatgccatgcctcctcagcctgcctgaggtgtcatcatttgttgtgaaacaatggactgctgttacctgactatggtgattgggaggagtcagtagggtatttaaggcacaccctggggttgttcaggggatttcctgtttctgctttgcaatgctaagtgttcctgaataaacctgcttgaagaaggacaacgtggtgttgcgtctttcctgctggtctgggtggatgctacatttggtatttcaagacaaggtttctcggtgtagtcctagctattctgcaactcactctgtagaccaggctggccttgaactcagaaatccacctgcctctgcctcccaagtgctaggattaaaggcgtgtgccaccactaccctgtttcgaagtctgttcttataacataatctagtccttatttgaaaaactcaagatgttagaatcatcattacagatcccatgggttataactaagttacttatgaagaggaattaataatattcttggtgaaaggcttagtttatctttaaatatcctctaatggaatcagttttacaataatcaccatcaattttgagatataaattaggtctgaagggatttcttttcatattttcatgagtttgccatcaaaaaactttaaacatactgatttaaaaaaatctttaggttttatagcaaagaatttctctacatattaactggttaaaatttattatagcctaatccacaattctagttggatttggataagaccctacctt

SEQ ID NO: 3578 - DNA, 1400 bp, mus musculus
aagaccagccagtttttctttaaatctaaaccctatcctactaagcacatgtgtttatttataaagggctgtcactgtggatttagtataacatttagaaacaagacccagaaagaacactaaggaagggtaagctgatgaggagaatggatacagaaaatgtgattcatttacacaatggaataatattcagctattaagaacaaggacatcattggtattgcgggcaaatggacagaacaagaaaatattatcctgaagaaggtaactcagaccccaaagaacattcatgatatgcactcacttataagtggatattagtcagccaaaaggtacagaatacccaggatacattacacagaactcaagaaggttaacaagcctaagggctcaagtgaagaggcctcaattccacttgggaagaataataaacaatcacaggggtgaggggagagggatggaggaacttaggtgggaaaggggacagggatgagaagaggggaatatgattaggtaatgagtggagggggaacaggactgaagccctgagggacagcaggaagaatggaaacaggcaacctcaggaggtaggaggtggggagaccctctagaatgtaccagggacctgggatgtgagagactttcaggactcaaagggagggaccttatattaaatgccctgcggtggggagagggaacttgtagaacctacctccagtagaaagacagggcctcaagtggagggatgtggttgcaatcccaccgtcaaaaactctggcccagaattgtttctggctgaaagaacttcagggacaaggatggagaggagcctgagggaaatgggggtccagtaacaggcccaaattgggatccagctcatgaggaggctccaaagcctgatactattactgaggctatggtgtacaaacaggagtctatcacgactgccttctgaaagacccaacaagcagctgaaagagtcagatgtagatatttgcacccaaccaatggacagcagaagctgacccctgtggttgaataggggaaagccggaagaagctgaggagaagggtgaccctgtaggaggaccagcagtctcaactaacctggacccctgagatttgtcagacactgagccaccaaccaggcagcatacaccagctcatatggggtccccaacacatatacagcagaggactgccgggtctgagtttagttagagaagatgcacctaacccttgagatactggagggagtttagaggtcttgttggggggggggggtcaggggatgggacatcctcttggagacatgggtggggaaaggaagtatgagatatggaatagtcagaggacagaccaggagggggataatgactggactgtaaaaatagattattg

SEQ ID NO: 3579 - DNA, 1000 bp, mus musculus
aaaatgtggtatgtttactcaatggagtgctactcagctactaaaacaatgacttcatgaaactcttaggcaaatgcatggaactagaaaataacatcctgagtgaggtaactcagtcagaaaagaacacacatgttatgcactcagtgataagaggatattagcccaaaagctaggaatacccaatatacaattcacagaccactttaacctcaagaagaagaaaggccaaagtgtgggtccttcagtccttggaggcgagggggggggcgatattcacaggagaaaatatggagacaacgtgtggagcagagactgaaggaaatgccatctagagactgccccacctagggctccatcccatatacagtcatgaaacacagacattattgtggatgccaaaaagtgcatgctgacaagagcctgatatagctgtctcctgagaggctctgccagaacctgacaaatacagagacagatgctcacagtcaaccattggactgaatatggagttagagaaaggattgaaggagcttaaagggtttgcaaccccataggaagaacaaaaacattaaccaaataggacccccccccagagcttccagggaaccaccaaacaaagaatacacatggagggacccatggctgcagctacatatgtagcagaagatggccttttaggacatcagtgggagaagaggcccttggttctgtgaaggctcgatgtcccagtatatgggaatgccagggcttggaggcaggagtgggtgagtggttgggtgaacaccctcagagaagcattggggtgggggaatagtatagggggctcctactggggaacttgggaaaaggggtaacattctaaatgttatacagaaaatagccaatttaaaaaaaaaaaaggaaaagaaaaagaaaagcagagaaagatagttgtcagttttctctgcctgtaagacttgtcaaaaaaatgtaggcagaagttgtctgattgaacaaa

SEQ ID NO: 3580 - DNA, 1800 bp, mus musculus
tcttcctctctctctctctctctccctctctctctctctctctctctctctctctctctctctctctctctctctctctctctctctctctctctccctttccctctccctctccctctctctctcccttgctccctgcctttcataaagctctaaaaccatggaccatctctactcatcaagaccagacatattagaacaatggaatagcttcttctaaagagctggagtctaatctccagcaagaaggcctcccagtgtttccagccaccagatcggaccaaagattctcgccctcgttggaaccacctaggacaccccccccctttttttttcttcagccgggctgacagagcttcccctgggcctccacctgttctcagctcttccacagtgtcctttgatgtcctgcgatgcccaagggctagaacctgtcatccctggccttcctgaggccaagggacagcagactgctccctctacaccccacaccccgcggactgggattccgtggcttcccacaaccagatgattacctgggtggtgtggagagcacacccatgcatctgcccgcctagagccccagagctctggaagtacggtacccgggttctctcccacccccttttttccctggcactggtgctgcccagcaaccacactcaagattaggttatgaaagactgtaacttctcttctgcatcaataggtcatattaaagaagctggtggagctgcctcgccaaaaggcaacaagatcctccaaccaatggcactgagggcttagtactgaacatggaagtggatcctttctcaataagtccttgagacaaaagcatctcctgcaggaggatttaattgagaactgcctaagagaccaaggattgcgggtgtagtcagtgtcagccaattgggaactgctgtttagaagatatgctttctggggaccaatgggggtgtgggtggagggtattaagggaagtcacagcagcactcagaagagcttgttgcatgtctcacctgctcccagagtctgtgttggttgactctgcaccaccaaccggaaggtagggtgaggctgcgagtagttcagagcacaggcaacagggcagtgtctgagtgctttaaatccagatcccaggcaagacaaaaagtgagggactgggccctttgtgcgcttttgaagtctcaaatctcagctgcaatgacacagctcctccaacaaagcccatagagttcaacagatggggcttaagcaggcaagtatctgagtttgtgggagccattctttccccaactaccacaagaagattcattaagattctttctaatcattaaaaatcatcatttcatcaatgatctacatactttgcatctcaaggccttggagaaagaagaaaatatcgattttaagacttgttggcattcacacatatctgccattttatatgcgttcaacttcaaccagagtctcagataagcttttgctttaaaccctagaagagaaatctgcttctttatttcctcttaaaaaaccacatctgtgtgacagctttatcccacgtcattttcctttctgctcttgacagaaaccttttccttttctttaaggtcttccactcatccttgactctttactcttaagggatgaccttcttgtcttgattgaaatgaaatggactggctcaattccctcagactctactacaccaaagtgcatctttaccaattttgacttctattatttctgtctaaaaaaaaaaatgatttttctaccacactctctactccgactttgcat

SEQ ID NO: 3581 - DNA, 1000 bp, mus musculus
tgtgtgtgtgtgtgtgtgtgtgtgtgtgtgtgttcaattgatctagagataagaaaaaatataaggagatgtaagtgcagaaaaatattaaaaaatatataagtataggaaattcaaggtggagaaaagtgagcagcatttcctggaaaggactttgaggccttggtgtcatcaacccttaaggtcactgagtctagcagagaagatgtcaggagcatcctgtaaagccagagtattttgtgaagtcatgaaacactgatagaggtgacagaaggaaacacctgaaaaacataatgaaatgatgaatcttggagaaaagaaatcatacagccaaatgtggcctaatgttcctttttattacttttattaattattttatttattacatccgaaatgttgccccttccaagaccctgcttgcagagttatgccaccccaaccacctccccttcacctctgagagggtgacccaacccctggacatccccccctctctgaggcatcaggtccctacaggattaggtgcatattctcccactgaggtcagacttggcattcctctactacatatgtgcctggaacctgtgcccagcatgtgtatgttctttggttggtggctcagtctctaggagcttccagaagtacacgttagttgacactgttgttcttctctgggctcagtccaaagcttggctatgtctgcatctgtctcagtcagctgctggtagaacctctcagaggacagccgtgatacgctccagtctgcaagcacaacctagcataagaaatggtgtcatggtttggtttctgccatttgttcagtctctgcttgatgtttttatccctgcacttcttttagtcgggaacaatttagggttgaaaattttgaaggtggattagtgtctccatctcttcactgagggccctaactacaggagatggtctcttcatttttctattgttgggcgttttggctatggtcacccacattgaatctagg

SEQ ID NO: 3582 - DNA, 1200 bp, mus musculus
atcaggaagtagagagacataataaaagttggtttttcatcaagtacgttgttagattttcaaatgctacattttccgcatgctttgcttcaagctctagatctgtgtaggagacatagctctaagaaagcaatgaaactacgtcttaaaacccgcagagcatcagacaaagtatctagctcccactcccttttggcaagttttgtctgataagaagtaagtatcagaatgaatgcatccttgtgctgcctagctgacaagtggagagtctaataaggcagcggagaacacgcttgtgaggaaccctgtaacacgtcaaaggctgagtgcaagctccaggcaggcctctcccggacccagactgcagcagacttccttcctagtggcaggcgggagcaggtgggaaggctttgattacatccctggaagcaggtgggaaaggatgcacggttctgcccctggccagagctgtgccgagtatagccagggaagaaggacaatcaaaccatcctactgtccgggggcctgccctgtttctattcccccagtccttgccgatcagtgaaatggctgcataaacttaaagcgtctgccttccgcggctcggactcatctggcagctcattcagaacacgcatcatttctaaggatacacttgagtgccagggtagggcagatgcagaccattctgttaggctgagtaaacaaatacacaaaaccaaacgaacacgtggcacatatccctgtgctttggacagcttgaagaacaccaggcaggccagtgagagggctgagcggggaagcgcgattgctgctaaagtccggcaacctgagttcaagtctcagaacctatgggaaggcgggaaaccaggacggaattctcaaaggcacgctctgacgttcccacaccagccctagcatcttctctgcatcctctaaactaataaacaaaaattaagagcgacaaaaacaaactcaaaccacaacccagtcagaaacgctgcctaggagctgtgctcgcaggctgtaccgctaacaattgtgtctcaaacctactcctactgaatcaacataatttagaataaatgagactctcttagctctatggttacagaaaggcttaacttgcctgataactgatacctggaaaagattaaggtttctttatcaggaagagttgtgtgagtctgggttatttca

SEQ ID NO: 3583 - DNA, 1400 bp, mus musculus
agttaactagtcctaaagggaacatatgagagcatctctgttgtaaacttcgtattcaatttttaaatttatgcttgaacatttagtaaacttttgtagaacaaggacacttaggaaaaaattgtgatacattcctctagaaaaggtacaaagaaactaggaactctgctgtcctccttcctcttcctatccttgctttttccttctcttaatctggctctctcctcctctgacataataatgccatataattaatgccttttcatcctctgctgtactgggattacacacctttgccacctctctggacattttaaatgtagattctgaggatgaaccattgtcaaaagaactctactgaggatgctatgccacagtgccccgagctgatcctgtgccatagtgctccatacccaaatactgccagaagagagctggtctcacaggagtagggacaggcctgtgagcacaggtaagaccaccacttctgctcagagggacctgctcagaaccctcaggaaccaaggagcagcctgggtacaggatctttctagtttccatctgtgctcagagttgatcaccacttctgttcaaattcctggcccaagagggacccacccagaaccatcaggacacaggaactaaggaagagctggtgacaggaaccttctggtttctgtctacaccaggagctgatcctgtgccacagctctccatatgcaaattcatccaggagagaatgggtctcccaggaataccaacacacaggcttgcaggagggacaaaccacagtcagagacacaagaccagctaagaccagagataaccagatggcaaaaggcaaggaagggcaagaacacaagcaacagaaaaaccaaggctacttggcatcatcagaacccagttctcccaccacagtgagccctggatacctcaacacaccagtaaagcaagactctgatttaaaatcacatctcatgaagatgataggggacttaaagaaggacatgaataccaatactcttcaaactattccacaaaatagaaacagaaggaacactacccagttcattctatgaagccacagttaggctgcatattcacccttggagatggaatggcttttgtctaatcaggaaattgtcacaatctcctttcatagacgacttcataagagatttctttctacttctatcatgttttatgttccaaatagattataaaagctggttgagtgcttattacttttagcttcagaagatatcatgtatatttaagaggcatttaactactataaattattttgatgacttaaaaaaagaaactaagagagcatattgtctgataggttttttcccccttttactttcctttagaaataaagaggatattagggcagg

SEQ ID NO: 3584 - DNA, 1200 bp, mus musculus
agctttgatacctcgttgattttctaagtttcctagtttttatatgtagttgattttctacggtacaatatataatttaaaaagtagatactgccatctattcctcgtgaaaaaactttcaaagatcctgaaaactagatgcaacaaataatataaacattatagttttagagaattggaactttaagtttagaatgcaagacaattgaaatgagtttctagaactccctagaagtacagtaagactctgaaccataaaaaatttattcctacaccccatcaaacttaaactaaacacataaactaaactaaatatattgattcctctgcctgcccaattccctttgtgacagcctgcctctaataccaagagtaactctctacctgagaacccactgatcacaccagtctcatcatcagaccctgtagcagattgctttcaggatcctccccaccatctctgcctccagtcactggacactccacagatccttgtagcagatggagcttttacccaacctgtggagctctccgtcctcccttctagcccatcctcattccttccagacagctcccaatgctacccagaaaccgcatctgagatagacagactcaagagcactcctgatcaggcaacccacaaccaccacactttctgagagatacagagatgtcaacataaagcaagggatggaacacccaaacaatgaagacagtagcagatatcaacacctagagtcacaatcacccaatatccttagacatcggtgcaaaaacccatccattaacaccaaatgcctccacccgaacccagcagccttactacagtatgccctgagaaatgcaataaaactgaagcacaaggcagagactttgaaattatactaggagtatgttcaaggagtttaaactggttatgaaaaaaatccattatgaagtctatgaaaacagaaatgagcaagcaaacaaactaggtatatgccaccaagaaaagaggtcaagacctgaaaatggaaatagaatcaggaaagaaagccagtctggactaaaactggaattgaaaaatgtaggaagtcaaacagaaacctcagagagaagcctcaccagaagaacacaagatataggagagagcatctcaggcattgaagacacggtagaagaaatagaaaccctggtcaaagataatgataaatcaaaaac

SEQ ID NO: 3585 - DNA, 1200 bp, mus musculus
ctcttagaagctgtcttgagagttaacaattaccaggtattccttgtgactcttgtaactttacacttccttgtgactcttaactggtatctttggtatcttccaacaacgccctccccacttccttaagtttcggtttcttcctttaaatacccccttacccagctactcggggcgccatggtcctctacccctgcgtggtgtatgaccatgggcccgagagcgctcttgaataaaaatcctcttgcaatttgcagcaagacccgcttcttgtgggtgattttggggtgtcgcctctcctgagtcagaacgtgggggagccctcacattgtgggtctttcactcccccacgaactaccttctcccgccccacccctccagcatccccttatactggggcatcaagcctccacaggaccaagggcttctcctcccattgatgtcagacaaagtcattctctgctacctatgcctctggagccatgggttcctccctgtacactccttggttggtggtctacaccctgtgaccactgggtggtctgtcaagctgacgtcgttcttcctatggggttgaaattcccctctgctcctccagcccttctgccagctcccccactaggttccctgagctcagtctgatggttggctccaagcatccacagctgtactgatcagttgctggataaactttccaaggagcagttctatgccatggactgggcctagtcggcccccctcaatctgtgggaatcaggggttcagacagatgggcatagagtgagaatgaggggtgacaaacagacagaacacaagggagtgtgttggatctgaatgtaatttgtcaaatcgagcatcaaactttttatacattggaaaatagggaagttgggtgacacaccagcaagatacaatgaggttaccagattcttacataaaacaaaggaatgcgttgaatcaggatcaagttgaccatctaaacagtcccatatcacctaaagaaatagaagcagttattaatagtctcccaaccaaaaaaagcccaggaccagatgggtttagtgcagagttctatcagaccttcaaagaagatctaattccaattctgcacaaactatttcacaaaatagaagtagaaggtactctacccaactcattttatgaagccactattactctgatacctaaaccacagaaaga

SEQ ID NO: 3586 - DNA, 1000 bp, mus musculus
agcttgaaatgtttcttgtattgttttcaaatgtgtgtgtgtgtgtgtgtatcccagctgtgtgtgtgtgtgtgtgtgtgtgtgtgtgtgtttgtgtgtgtatcccagctgttactcattcctagattacttaggttgttaggattgattcctacattataaagattgatttgttattttctcctcattttatagcataattatgaaaatgccaatttaatctcatttccaataaatattagctcaattagcatatttatttgattttggttcataatcagccacagataatgaatgtatgtattcttcagcctgttgtttgaagaagagttgactacaccatacattaatgacagtaaggtattcctatgaactatcaaactatcagattcccataggtttatttttctctcccctcttctcttagagcaggcttccgatttgatatgtgaataagttagaagtcatcatgcactccctcacagggaggaaaacacagaaatgggagccgctattcatcttagaactgcaaaggaaatagcttacagggcaaatctctgcactgaaactgtagagaaaagccatagagtactgagagcagaaggtcagacttgaagggcacttgaatgctgaacacagatcctggactgcttgcataattaaaagtttctcaggggatgttacacttttatgtatatacttctacaaagttctcggggaaataccccctttttcttctttggggagagaagagcataattctgcaatgtactgagagctctctgtgctccttaccaaagacctcatatgaaagtgaaatcatttgataagagcctcatcaaattagactaatccatagcacactgatgggtggagcaatgggaagggcacagacatgcatcgtttaagccctgtttactcctatcccatgttcaaaagatgagaccacctgagaaacacaaataaaggttacactccatagagaggttcactagaggtg

SEQ ID NO: 3587 - DNA, 1000 bp, mus musculus
gatttcttgctttctaatgatataggagaacccagcccactgaaggcggtgccattcctggggtagtgggtgtttatgggatggatcccgagatggggcagtctctggatgacctttcagtctctgctccacagtacacttggagggacccatagctctaacagtcacatatgtggcagaggttggccttgctggacatcagtgggaaaagcaacccttggtcctgtgaacgcttgatgccccagtgtaggggaatgccagggcaggaatgctggagtaggtgcgtggatggggaagcaccctcatagagacaggagaagggggggggctgatgatagggggtttccaaaggggagacctggaaaggagaaaacatttgaaatgcaaataaagaaaatatccaattaaaaaaaagattaacaaaaataaaacagcaagcggaataagccaaggactgaaaatatgcaactttttttttaaacattaagagttttattgtaaatttaaaacaatgacaaaatcactctaacaaatatacatttctctcttttcaagaattctaacaggggatttggcaataggacaatattgcatgttgcatgagttcattctgactgaattatctaagaagctagactctcagctgcctttttcctctacttttataggaacttatgcactcactctggtgggaatttgggcaggttcacattgaatcagtaaagtttccactgcacaaacccatgtactacttcttcagcaatatatactccattaatctctgccatcccatggttgttaacccaaaaatgtttgggaaatttgtgatagaaaacaaccccatctcccaccctcaatacatgactcagctctatttcatcctcagttttgtgactgcaaaatgccacttgttagcagcaatttcatatgaacctcatgttgctatatataatcctttggtttacaatgtgaccatattctctcagatttacagttcctt

SEQ ID NO: 3588 - DNA, 1000 bp, mus musculus
ctgcatagaagggagaacaggatgatcatgggaggtggaggggggatctgggagagagggaggagggagatgaaaaaagaggggtaggatcaggtactagtgtgggcatgagaggtacagagggtcaggaaatcaaataaaaatctgtaacagtgtgagatgaggaactggggataaccactagaaggttccagaagccatgcaagcaagaggcttctaggacccattaagaccaaccaaaattctttagagctttagcagaaatgctcagagaaggaggagatagaacctatagagactacctgccctagacaggcaatgcccccagtcgagggatgggaccacttacccatctcaaagtttttaacccagaaatgttcctgtccaaagtcaagacaggggcaaaatatggagcagagacttaagaaaaggccacccagggactgccccacctgaggatccatcctgtctgcagacaacaaacccatacactgttgctgtttccaagaagcacttactgacaggaacctggtgtggctgttccctgggagtttctgccagcacctgaccattccaaccatcaggctgatctcaggatccacagtgtgggagctggtggaaggactagaggggtggaggggggttgcaaccccataggaagaacaatgttggcaggccaggccacccagtgctcccagtgactagaccatcaaccaaggagtgcacacggagggatcaatggttccagacacatatgtagcaaaggatggtcttatctgacatcaatgggaggggaggtgcttggtcctgtggaggtctgatgctccatcgcaggagaaaattggagccgtggggcaggagtgggtgtatggatgtagaatcactctcatagagggtaaggggagggggagagagggcatatgtgggatgggggagttatggaggataaccatgaagggggatatcatttgagatgtaaatgaatggaatgattaataaa

SEQ ID NO: 3589 - DNA, 1200 bp, mus musculus
gaagcctgtttctgagtattttaagttctgagaaagaaaaaaacgttttctctcagtcttatatagctgatatccttgcttccaagttcctgagaatgtatacaaacttctaccaccacaactgctaatggtggctgttgagctccaagcccatctttatcatctatttcccaagggagtcttagctcctcccgaaagctagtctcttgtgtcgcagattcccccctcctctgctcagtgatcatactctacaccttcggttctttgcatgctctagcatcattttcccccttagaggtttccccttccatgtgaatgtgttgttccttcctctcttttcattgttagcaaatccttcacttaccggtttctttttgagaactcgtgctgcagagtgattttatgtgcccaggaaaatagtgcaggaaataaagcccttgttctggaaatgtgcagaactgtgtttggatccctagaacccacgtttattctgagcaggcaaagtagcgtcctgcatcccagtgctcgaggagcgtacagggatcccccagagcaagctgaattgctaatggagccaaactgacaagttctgtgcttagtgctttacgctgcctcactacatactgcgtagtgattgaaacggacgtgtgctaccaaacctttcttctcagcacgcacacacatggtcacatgcaactgcacacaaacacatgtgctcacattattcaggcccatcacgtgctcataattaccaaaattagtggcttataaatactgcttctagttctcccaattcacatttatatttgaaccaataaggttcagcttttctgtgttgttccaccaaaataacttctgtattttaatagcctattgctaattttcagtcctcctcatatttgttctcacaggactctttgaaattcatttgactgccaccgtctacttgattgacaggactttaagtacacatccatcttattcttctttttgttttgtttttgtttgtttgtttgtttgttgagccagggttaatctgtgtagccctggctgtcctggaactcactctgtagaccaggctggcctcgaacttagaaatctgcctgcctctgccacccaagtgctgggattaaaggcgtgcgtcactttcttgtgctccctgtgtcatcaattgcttctttacttttcattgctcaatgt

SEQ ID NO: 3590 - DNA, 1000 bp, mus musculus
atgtgtgtgccaccatgcctggatctgggattgtttcgtctcagatgaccttgaactcagggatctccctgtcttaatcttttgggatttgtagtcactgtgtctcaatatctcgatgtcaagatctaggtcagaaacttgtatcacccagcctctagattaggatcacaggtgagccttttaattttagattgtagtcattccagatatagtaaagttgagcaccaggaatagccactacatttgcttatgcttttgttggcttcagatgtaataattaaaaccttgaaaataatggacttttgatagaacagtggttctgaacctgtggtcatgatccttttggggaaggctgaatggcccttgtataggggtcacatatcagatatcctgaatatcaaatacttacattactgttcattgtatgagcaaaattacctttatgtagatgcaacaaaaataattttatggttggcaggtgggtgagtcaccataacagaagaaactatgttaaacgtttgcagcattaagacagttggaaaatgaactagagaaatggcagagtggctaaagagcttgccatgcaagaacaaggtgaattatcttagttccctttctgttgctgtgatagaattttcgcacaaaagcagtgtaagggagaacaggattattttagttcacacttgcaggttaatgtccatccctgtggaagagtcaaggcagcaacagtataagaacctagccaccttaagacataatcatacagacagcaaccaataaatgtctgcatgctaccggtcaggtcattttctctccatctacatagtgcagatccttgtcaaagggatcgtttcctgaccacaggaagccaccctggacagtcagcatacagttatgacatcactttggtccctgagtttctgatggcagtgactctgagatcagaaatgacaaggcaaagggtagagatccagattggtggggacatatcttgacacat

SEQ ID NO: 3591 - DNA, 1000 bp, mus musculus
ttacagctgtttcctccaaattgacatattccctatggtagagagatgaggttcatagagtgtgggaacttaatgaaatatacaaagcttggaaagacccggatgttaaatgatttgcaacacaccatcgctgaggtggtagaagaactctaatgaattgctagagaagtgaaaagtctctgacagaattcctaggaagtagatggggagcttccatggatacagcttttgtctcatgctgagatgatcagtgtggtgatgcagcgacctctgcgtcaccacgctccccctaaggacacctcacctatgttcctgtaagccacagcactaaaatctcaagactgactgggataatttctttgatgtgtcacaatgccccatctgtagtaaagagttatttattcacctctatccaggaaaaaaaaatcacacaacagcataccacatgtcatcttttacaaaatccacccactctctggtttgaaagccagacctccgcatggatgatccacaaggacttgtactcaggtcccagtgtagctcaatggatcaggctcatttccagttactgactgtactggtattaatagccccaaaatacaccacacacaatatgctcagcacctgccttcattcccacatcaagaccatcttcttttctttcacatgtatttaatgtcctggtttcttttcagtctcattactaactttgaaccaagtctgattcataccaactactggtgttgttctaagtaaaattctaagccatgtagcctgaagaaaaaaaaaaaaaaagaaagaaagaaaacaatctccttgtgtctgttgtgtatctcctccaccaactgattactgtctgtattacattagtcatatctatgtacaccctcacaggtcagaataactatgaattactcatattttatctagttttctccaacattgaaataaattttcttcaggataatccattaattgtgaatagatacgatacagaaga

SEQ ID NO: 3592 - DNA, 1000 bp, mus musculus; identical to SEQ ID NO: 3591

SEQ ID NO: 3593 - DNA, 1000 bp, mus musculus
gggcttctgttctgtgtgtactgagaaaagaattaccccgtgtctagttggtgggcagagtcctgctccctgctgatccacttctgtgtccctgattttacttggatcagtgtagtgccagttctctgactctttttagccttgcttcacctgtctgttatgatacactacctcttaccaagagcctctcaagtgacctgctaccctggtttgccacctgttgctcattactgtaatctctggacctggtgtcagcctctacgcatgtgcacactggcagctcattccagacctgtctctacatctcctgcacctgtctagcaagcagggatatcttgtttggagataatttgacactgcctcatcctggttttgagtcaagttagttttgacaagacctttttgaaaagaagatgcgaaatccctgcttatttctgtctctttaagatttaaagataatgggattaaaagagaaaatgcctttaggccacagaggaataatctatctatcttatccagctgttaatggtaatgaaatttgagtattttataacactttagattttagctgttgggactatagaggtagctaagcagttaaaaagcactgggtgctgttgcaaagggccctggtttcactctcagttgcacatggcaactgacaaccatattgaagttcagtcctaggggatccaaactctttgggcctctgcagctactatccacatgtggtgctcagcgatgcatggaagcaaaatacacataaataaatgcatagctaaaatattttcaagaatatagttcttggttttgatgcatctacaattttgtcaaacagaaagtcactttttggacataaaaccaacatcaaaacaactcagatcactatggtactataaatcgcccaatccttttcgtcaacttcttttaatgaaggttttggagagtttcaagttcctgtttcttttttcttttctttctttttttctctgtttttaaa

SEQ ID NO: 3594 - DNA, 1000 bp, mus musculus
ttgttaatttctttaagttatactgagtgttcttctgtatactcagccctcgggtacgaagtcaggctattcagtggtgtcatctacagggaagttcctgttggcgccacagaagcatggcgttcatcagcttacacacgtgcaacacaatgtatggctttattgccgtttttatacattgctatccagaaactcttcaaaactattagtgttgaatgtacatcaagctgacaaatactctgattcacttgtctatgtttttcgagaccatagtgggtgcaacctgtgcctgtaccagtgtaggcagctgagaaagatgctctataacttcataggtgaggatgtactttgaaattttcttttcactttttgcaaactgaagatcacagtacaatttaaatagccttgcgttgtctccgagagctactgagcatggaataaaggctgagcactctctgcagtgtcacgaggttactgctcagctgttcgggatcagtagatgatatcttgacactcataaaacagaggattcaaaagccaggggcatgcgtggaagtgcagatcattatgacagtcttggaagtcgtccataagaaacatcagcaccaccccggaggccaaaataacactaccaaatgaacatctacagcttttctttaaaatgaaatccaatacaaagggaaagtgtattctgaaacaggtatgctagaataataataataattttatatttggcttacttcaaaaagaattaaggacctcaaaaaacttgcatgatgtattttcttagacattttaaaatacataatatttaattctatataaaacaaataactatcttataggactgttttcctacaaccatctgtccataaaccgatcaacccagttagtgaggcaccatctaggaagcatgaagatttcctttgcccagttcatttcagaagcaagagggatgattttggctcctgggatctgaaaattctgtcttctatttgta

SEQ ID NO: 3595 - DNA, 1000 bp, mus musculus
tcactgctcttttgtccattttctctcttctttattcccatgtgcctgttatttttttccccatggtgcttagttaatagcacttgctagattttagtagggaacagacagggatgtggcatgcaatgggctgtgttttggagggctgacgtcatagactgacttgggcccttagcaaacagttacaagctgtggctgcttacgctgatgttgtatgtatgtccacccttcaggccttcgagcattgcaatgacggacgtgtctgtcttctggataatgctgaggttatgaatctggacggcagtaggatcgtcttctcggtaaaccaatgcttgatacacttggatattgccgttgggctgagaaggcgggaggaatgataactgaaacttggttacttcatccggtatcttctgaaatgtcatattattaggtggatccttgggcactgaaataaaattgttggcaattataatcttaaatgtaacattttttctcaatataaaaacgtttttccttcaaacttgtgttttaaaagactaatgacacaagctatataaatcatgtattatggacattagaaaaatggtcaggcattgactgtatttcccagaaattgccgtgataccgcagtttgtctatgtgccttgtgtatgtgctctgtgcttagcaccgggcattggactgagcccctcccattgcatcgcagcatcttccactgaattacacagaatgctcttcctcggcttctccatcattttattaaaaaataacacagattcagaggaagtcatcccaagagaatcagagccccacaaaaccttcatggagttcccaatggtgacacagcttatggcgttattcagtgtcaagccagagagcaggcatcgagctgatactgtttgcaagataacaggccgtattctgatttcatcaccttttcatggctttgtgtgtgatttacttttatgtaatcataagacatgtatagaatcccgta

SEQ ID NO: 3596 - DNA, 1000 bp, mus musculus
tattagcccaaagtagtcatcatttttctcaaaaaaaaaaaaaaagaaagaaaagaaaaaagaaaaagaagaaaggaaggaaataatgaaagaagaaaataaaacgtcaaagaatgaatgtgtaagttcacggaagagacaaaaataattctcaacagtcaccactgtcatgagttttgagggaaagtctacaaagtgattgtctacatatatgcagatgcacagatcatccagatgtgagtgtccatgcttcacacatgtgcaacaacaggacagttcagtgaccctgtaccatgtgacaaggtggcagagaccctctcaggcagtcacagataggatgacaaccaatgttctttgccctgttatccagggtgccggtctgtgatctgtatgtgccttgtgtgttaggttcctttttaacctgtgttgctgccttggtttcttagagagagagagagagagagagagaaaatataaacatttaagaaaaatggtgagggataaaaatgtaatgcactccggggcagccatacaacccaagttaaacaagcaacatggcgactggaattgatgttaattattgttctgacatttttctactttgtttcattgaaatgctattcaaaaaccacatatttcattccatgacccacaaatagatcaaccacttctgtttgaccagtaatggtttaacatgcctcaatagaagctcaggtcattagtaagaagaagtcaaagtttgggaaaatcctatctgcttctatggcttgtattgagaacatggtttgagcatattttaagtttcctgttcaaaatgtataatatgtaggagacttcaatcactttgccagggagacatgggtggaactagaccttacacataggcacaaccacacctaacactccaatcctgcccagcactactgggtaatatcactttttgtgtttctccaagacataaaaaccaaccatctgtttcatttgtttctctataactgca

SEQ ID NO: 3597 - DNA, 1000 bp, mus musculus
acaagaactaaagaaggaaatacaacatgtgtacctgttctctgcacatgaatctaatgccacagttccacgtagtcctagctgtcctggaaactgctctgcagacaggctgaccttgaactcagagatttacctgcctctgcctcctgagtgctgggattaagacatgcaaccactaccaccaccaccaccaccaccaccaccaccaccaccaccaccaccaccaccaccaccaccaccatctggcacatgccacatttctagtcaaacctgctttctttccaacttcaccataaccctatgatcatatctctcttgggacctttagagttcacttcattgagagcaggacatgagatcttccaattgctgtgtttccacaacgataactccctggactctaatctaaacttaatttctgcaccgtgtcattctctagctaatctgtttttccttttcacagactaatccagctgatgttaccatgtctacttaagtaataataatatttgtcttctcatgaatataagttccaggagaatagtataaatatatagttggcttacaaatccagtcttagtaacagagagagaaatacaaccaaatttaaacatttgttaaataaaaaattatataaacatattttcagtgatttatctccatgaacataggtatctttctaggaaactatggaatcacagctgtcttaactccagccgtcttaatcatctgcaagcatgtatctactagcaactttcataactgcctacttgattaatatgtgtttggccttgcttttgacactgaaaataatgctattttaaactgatattaagggactgctttctcatataattcttagcttgtgtttcaaacattatcttacatttaaaaaattaggaggtacattcaattttagaaccaagacaatgaatcctcttcaaagggtccttatactggaaaaatcatctatcttgcctataaagtaacccattgataa

SEQ ID NO: 3598 - DNA, 1200 bp, mus musculus
aattctttccacgtgccccaaagtccctctgactctttgattattataatagattataaattataacatataatacataataaaatatacagcatacaagataacctttgatatatcacatagtcatatattatatataattatatatatgtgtgtatatgtatatatatgtatgcatatatatatatatatatatatatatatatatatatatatatatatatatatatgtagtatacaatttttaaatacaacctgctgagtcccttcagtgttgctcatatgtgaatgtattatcaggggcttgagaagagggatctctgtctctttctctctctctctctctctctctctctctctctctctctctctctctctgcagacagtaattgcagatagtacttcatgtaggggtggggcctccatccacagctgacactggtgttatttttcaggtcttgtttaaacaaccatgttgttgagattcatgggtaccgcttacccgccatgtatatgtctaacaggagacacccagtcactcttcctgcctgctccaccttggctatggtttagggagacatcttcccaagctcagagtgctgcgaaggtggtgattatctgtcttagcatcattttctctgtgtcttaacagcagtgaggagggcttgggaggcgcgttttctatggagtttactgagaaaaaagtagaattctctttattgcatgcagtcatgactatcttttaatgtataaggtacactgattctgcttttttttttaatcttttcttttcttttaaattaaagcaaggatggacttctagatcatggacaaaccaaaattcctgcctacctatgtaagctatatttcttaacatatttattgctgaataggcaatcacttatgataacttgattagttaaaaaactttctatatatgcatattcacgtatatatgtatgtatacagttttgattgtgaagtgcagaaaaaactgcatagagagatcctgaatattattgcagcagaattaaaagtcttctgataggatagtaagaatatgaataatattttgctgttcttgttttatttaatgccactctcccatttttctttccttcaaaaattcactttgtctttttaaaatttaaatttctattaaaataatacataacatcacaaaactgtatctactttgct

SEQ ID NO: 3599 - DNA, 1200 bp, mus musculus
ttaaggtaaggataatttgtgactggttccttctgagtctaatacaattctaaggagaactgtattcaattttcctctgttagcagagcctatgaagaaaattaaagttttgtattaaggttgccagtttttcctcttcaaaagcagtataccgaaaacagggattaatgagtatgaaaaatatttttatttagattaattataagatgggtggtggtgcgtggtgcgtgtgtgtatgtgtgtgcgtgtgtgtgtgtgtgtgcgcacacgcatgctcatactcatgtatgatcatctggagatgggcctataaatacgtgtgtttgggattatgttgatatgtcaattgaggtggtaacacctgtacactgtaagcggcacaattctcctaggcagaggatcttggagtgtatgcgtagagaggaaaatctgagaactaatatgcatacgttccttcatctttctgaccctggatataatatgaccagatgtcaaagttcctgctgctgtgaacttcttgtcatgatggactatataacctgggcctttgagataaaagaagccctttcctccttattgctatgaaaaaaaacctctaaatatttcataagccacttgaactaattaatgtcccaaatgttgaagaatggaaaaatcattgaatgcttgaaacatcttaatgggccattttgatggggacttagaggaaaaaaatgctgagaaaaatgaatactgtgaagccaggctcccacaatttcagaggggagcaaagactggactaggagccattcatgtggcatctggctcaagaatctgccttcattccatctgtgtctccagtgaagacctgcccactatgggtgtgtcatttccttgacagggcattctggattttatacaagtggagaaaaagagctgagcactagcatgcatgcattcgttgctctttcttactgtgaatgggtgtgatgtggccagctaattcaggcaaggtgacttgcccaccatgatgaaaccgtaccttgaactgtgaacgaaaacatgcccacccccttaagtttcttttatcagagtatcttatcacagcaacagaaaagaaacaagacaatctgaactaatttacatttgtgggaactatctatggtgtttctagtatctttgatatgcaaaataagaccactgatgaccctaaatcctgta

SEQ ID NO: 3600 - DNA, 3200 bp, mus musculus
tccgcgcgattggattggggcaggcactgtgttccactcatcagaggtcttaggatcccgtggggaatcccgtgtgggcccttgcgggtgttgggcaagactctgttggcaaggtccttaaatttctaatttcttaaatttcttctccaaatgctgagttcgccatggcaactagccagcaccttcactaacaggctctcctggggtgtacttaggaagactctctcttctacatagagccaagcatcagctgctttctatgatcccttagaaactgcagtcccttgttctctaatggactctcctggaaacttatacattaccatgtttgggtagcggcacacaggacagcactggataactctagagcacagatctgtgttctggccccagggaaatagtcccaggcttatgatcctccatgatgcttcttaatcactacttcttcagtcctaggtaagtagcataagttggccaattacaacaagaatttcacttcaatgatcctgttctctttttttttaactttaaatggcagataaatggccctgaaaagtctttacttctctctgaaacgttacaagccttgcctccgttgtctgcaactcttctcagcactattttccaaactcccacaatagttcactaagctctgaactatagcagattttccaacccaaagttcctaagaccttccacaaacctctgcaagacatggtcaggtctgtctcagcaatatctcatgaacctggtatcaatatctgtctttgggtttctatggttatattaacaaagcatggtcagaagcaatttagggaggaaagggtgtattctgtcttatagcttgtagttcatcatccagggaagtcaaggcaagaagtgaaagaaggaactagaggcagggaacgtgtgagtaggttgagaaggagtgaggcttacagcttgcttcacatggtttgtttgttgtactttctcaagacatccaaccaccagaatggggataccacagctcacagtggcctaggccctcccacagatgttgcaaccaagaaaatgtcccacaggcttgggcttgctcaaaggctagtcccgtgggaacagtatctcagttgaggtttccacttaacaaataactctagcatgtctcaagttaacctaaaagtagctagcacaaggagccttcacagtaattaccaaatgttaagtgtttttcttacagtagtttatcaactagtcacaaataatgtaagaattttccttgacataatattaacatacatatatacatacacaaatacacataacatatatattgaagaggattcaaggttaagattgggccacaatcccatataacacatacacacatacagacacacatagaaatagacataatttctgtgtgtgtgtgggtggggggaggtacctttgcatgattcaccaacaaagtttttttttttctattggaatgtactgtactttccatcccacactgattaccagacttttaaaaaaggatagtaatgcattcttataacatgaacttaactatataatttagctaccattctatggaattatatgtttaaagttatgcttatttgagaactgaacaagtaaagggattgaacaataaaacatgattgtaaagagggaggcaaaattaggtgcagaagaaatggttctattggttgatctctagctggagtgcaactgtatgatgaaaatttgatggtcttttgtagcagatttccatgtgcagtgaagagatatcagaagaactaaactcaaaatagaacctaatcaaaatagggggcccacaaacagatgtgaaagatgaagatgacatcattgatatgtcccatgagaaatatgctgagaaaatcacaaatattcagtgatccacattatatctgcagaagcagcacagatcctcagaaacagagaagactattcaaggtcaagattagtttataatcccacattacacatacatacatacaaacacacacaagtagacatagacatacacacatgcacatgtacataaacatgtgcatacacatagacacacacattcacacataaaagcacaagtgtaagcacatacacataaacatacatacacatacatagacatatacataggcatagacatacacatacatatacataggcatagacatacacataacgtacacatacacatatacatatgttgttagtcatatgtacacatctgtgcaaatactttccattttcacaagaatccaggtctgtctcatttccatttgaaactggaaaaactaaggtggagatggttttcatacatcgaaactttatacttacaaaacccgattaaacaccaccactgaagaagtaggaattcaggatacaggtaagagaagatttcattggaagaccagccacatggttttttaattgaaataggagaaagagtgaggctaatagccaggttatagatgcccggctaaggaaggaagcagttgtgacttctcagctgcattgaccctttagacattttaaggaacacggacagtccacacccaatgagcgagcaggatctgctgtaaaacacacttagatttgattatttggttttgaattgatgaaaaagataaacactgaagaagaaaactaatctatggagtactggttccctcaacaaatccatctctatctcttatcatataaaatatctaattttatccatttattatagcctatcactcaatccaacatcgtttaatcccgtataccaaatacatcttagattttaaaaattatcccaattcaaatttcttttttcttactaatccatgaactctcgttgaacacttaaatatctcccactgatcaatagaacagagaggggagaaagagcagtaaattcccatctgattttttcccttttttcctttcctttcctctgagttcttaagctgtattttcttctgcagccttcctctggtgagttatgttggcagtagattcaggggaagattaaacgaggcaagccaagaccgttaattactaggggcttccatgcatccttcattcccagggctgcactgagggccatgtttccatgcctgtaacaatgcaactgcagactggagggagacattcattagcacaactctcataaactctctgacctgtgtgcccagcaactttac

SEQ ID NO: 3601 - DNA, 1000 bp, mus musculus
gaaggaaggtccaagtaaggaagcttgagtctcacttagaaggggaataagtcataagaggcagatgaagggagcgatttgggagggaggggtttggggaggggaatgtgaggttcaggataaggtgtccccaggacaagagagatggctagatggccatgaaaatgaatggaaatctgcaactgatggaagtgaggagatgaagggcatttccatgacaaagcagagacctgtggtaagaaggtgcccatgaatcaatagggttggttttagctgtgattcacaactttggggatatggagctgaagtggttgcctcctgtagccaggcagcaatcccagtggagtgatagagacacaaatctactcatgaaactttaaacctgacatgtattctgtctacaagaaatgcaggcatggggcatgaagcaaccaataagcagcccaaattgagacccattccatgggaccacctctaacactattaatgatagtactatgttatgcttgcatgttgtcctctgagagtttccacacagcagctgactcaaacagatccagaaaccaaagacaaacagtggatggagcttggggaatcttatggaggaaaaagagaaagaattgtgggccccaaagggaataggaactccatggaaagaccaacagaatcaattaacctggaccccctggaatctcagagtctgaaccaccaaccaaagaacatacccaggctggacctaggcctccccacacatatgtagcagaggtacaacttgatcttcatgagggtcctgaacaaatggagcaggggccatcccaaaagatgttgcctgaatgtgggatgtttttctagctgaactgccttgtctggcctcagtggacgaggaagcgaagcacctagcctcacagagacttgaagtgccagggtgggggcattcccaggtgtctcccacccctcaaaggagaagatgacagggcacggggaaggattgtgagagggg

SEQ ID NO: 3602 - DNA, 1000 bp, mus musculus
aatatttctacaagacaaaaacttgcaaggaaagctttgaaaacaagtaggaaatacctcctgaaattacctgtgataatgtggaagactgtgaatcagcaagtccacagcatttcatacgcatgaatgtaaatacagtcacagtgcaatttcgcacagcaagcaacaaaggagggtaaataattttcaactgtcacatcactgatcagcaagttgaagagaatctcgaatgtcttgctatcatccttagaaatacctgatactactggactgggaaggttacacaaaagtttcaacgaacatgataatgagcagaacaattataattatcatttttaataagcagaactctaggcatgttagtaggggattatctagctgggagaatctactcgatatgtgggtggcacctttctgtgggcccagaccctggacaataaaaagaaaaaaaggagctgagaatctttctcttcttcctgatggcaaatgtagtgtgagcagctccctcctgcttggctatcctggccacgatttccctgtcatggtgcattgcatgccctagaattgtgaaacaaaataaacctttcctgccttaaattactttagtcagaaattttattccaacactgagccaactaactaaagattcattccaaaattttataaatttcatatttgtttttgctaaaggctgggtgttagcatgctcaataaataaacaaagatattctaatgaaatacatttgaaatcttttgagtttaatatagatgaaataaacctcaggatttattcaatataagtcagaaaaatcatttttttaaatggaaaacttgtcatagaaaatttgaatgacattaaacattgcattaatgaaatcatcatccaagaagggatatatgttatctttcttctcaaaatgtcattaattgaaattaaaagtctgggataggtgtatgtcattaccatgatcaaagtcagagttcctcatgatttcaataa

SEQ ID NO: 3603 - DNA, 1400 bp, mus musculus
gcaactagaaaggtcttttgttatctgcattgtacaaactactacaccaagaactaatgaaagaagggtaataataaatgcctggcagtcaggatgactttattagtcagtttattatcagcaaaggcctcattaaacttggtagaagtagataccataccttttaaatttgtttagtgaacaaacaaggttaacaaataatgaaattgttgttaagataaaggaaagtcaagggtcactagtattctgagcttcaggaaaggggagagtcagaagagggagggaagcccttagagtattgggagtttatattatctttcatgaaacagttatttttccctaaacctcaattcttgtctgttgatttcttcaaaagatagtgggttttataatgattttggcattttgcttttagttttgttgttaatgacatgtagatgagtgatttttttttcaagacagggtttttttcatgtagccctggctgtcctggaactccaggctggccttgaactcagaaaatcacctgcctctgcttcccaagtgatgggattaaaagcctgtgccaccgctgccaggcagatgagtgattattgacatacacttgcttgcatacattatgtttgtgaaatcttcaactaagacattgttcagttctgttactaagactcaactaacacatagcttagttttgtcaataagactcagttataaatacaacagtaataaaggaagtgccagagaactgggatgggggaggatcccaggagttaatgctttgaccttagctgagaagcatagtagctgttgcttttctgtggaatccactccagaactgggatgcattgtctggcctcagtgggagtggatgcatctgaacctgcagagacttgatgcaccagggtattataggataccatggatggattggttgggggagggggttgcaccctctcagaggagagggggatggagagggactctttgatggggtgactggaagggggaaaacattaggatgtaaaattaataaataaacaaattaattgagaaacaaacaaaaaaatacttgattaccaagaaaaggctagactcaatttctaaggaacattttacttttttccatagcatttttgatgagaataaaactgcttaaggagccatcaaacatcatcccttcaccagagcattttatactccaaaatctgatattatatatgtaaggcaaaggggtagagctaggttaaagatgtgagtcttctgatttcaataaggtagaaaactactcaaacagccttttaagcccagttatggtacctgtgtttgtaagggcaaatgctgtagtattttaatgaagtatatggacatccacacaaaacttctgttgtattagtaagaaa

SEQ ID NO: 3604 - DNA, 3000 bp, mus musculus
cccctacactggggaatcaaatatttaatggaccaagggtctcttctattgatgcccaacaaagccatcctctgctgcatatgcagtcgaagccatgggtccctccatgtgttctcctaggttggtggcttagtccctgggagctcttaagggtctggttggttcatattgtttttcttcctatggggttgcaaatgtcttcagctccttcagtcctttctttaactcctccattggacactccatgattagtttaatggttagctgtggctctggcagggcctctcaggagacagctatatctggctcctgtcagcatgcacttcttggcacccacaataatgtctgcatttggtaactgtatatagaatgggttcccaggtggggcagtctctggatggcctttctttcagtttctgctccacactttgtctctgtatttgctcccatgaatattttgttctgtcttctaagaattactgaaacattcacactttgttcttccttcttctgctgtttcatgtgatctgtgaattgaatcttgagatatgtccttgaatttgattacattttgcccaccctgcccttccctttcttgagggtgtggtctgtcgagggtgtggcagaagcctttgagagagctctgcagggggtcgtggggaggagcttccagggctctatttaaagctcctcagctctatcagatccatttgctggtgagttccatcctaagaactaggcagaagcctggccctgggagcagacatgagtgaaacacaagtcgagaagcctggacatgtgaatttagagatgcccatcttggctccttccaagaccctgccccagagctccctgagactggaccaccaatcaaagaacacacatagagcaacccatggctcaggccgcatatctggcagaggatggccttgtctggcatcagtaggaggagcagcccttgggcctgagggtgtttgatgccccaatatagggaaatgccagagtggggaggcatgagtgggtgggtgggggagcactctcatagaggcggggggaagggggggcggggcagggatggaatagggggtttctggaggggagacctggaaaggggataacatttgaaatgtaaataaagaaaatatctaataaaagaaaaaaagtttttaaagatttatgattttggaaaatgtgggtaaaaattagggttcggcttcttttagaaaagagaaaaattcagatatggaaagataatggagatttagttcatgagatattgaaaaaacaaaatagtgtgtttcctagattcaatgatcaaacaaacacacatcagccattattgcatagatatattaatgttaatatatcacattaacattttccaaaataaaaaatataattttagtatttgaacaagtgtgtctagagaaatattttcatattgtcattccaaatgaaggagataatattaaaaatcaggttttaatatgaatttttttctatgtaaatgaatggtgttgatgcacagggacataaaatgatataaatatttatcaataatatagatacaaaagtaaatgtaatactatattgatgaaaaatattgcatatttagtatgaggttgaaatataaacttttatttagatattagtaattgctactactagtggagaaataaattgtaatttcttaatatcctttgttgtatctccaagtgctttccttaagtttctaaatcacattttttttttgtttttctaaggagaaatattatactaatctgttagaaactatagaaacgttagattgaaagataaaaatttacttcagtattgaaatttagatattattgtattacattagtttgtgttatacacaaacacacacatacacacacacacacacacatatatatatatatatatatatatatatatatatatattatatatacaatatatcttaaatttattttgttgaaaataagaaaattgatatcaaaaatatctacttcagagtgaattttaaatcccaattcatatgttctcttctcctatttcattagtagagttttgaaattatgagtgcctcacaaatttcaaaataaaactaatatacgtatgttgggctctgggtgtggggaaataatgggatgggagagatgacccacttcccgccagagctccggggctctgggctgacagacatgggagactgccacgggaccccactgaatcgcaaggggtggggtgttaggctgtgttcggccaccagaacctgctctggggttggggaaggcacagtctgggctcagattctcaggcaccacagacctgctgggtaccataggagagtcagctctggggtctctggcctcatggaggagggaagaggaagggggaaggggagggaaatggagaggggagtaaagaagcagaggtgtttgtgtctgggggtgtagcttactgttcagtcccttgtagaatttttctaccgggtctccagagtaaacctcgctcgaccagaacacagactgcctttcatagtcccatatatacacatacacatacacatatacacatacacatacacatacacatacacatacacatacacatacacatacacatacacatacacatacacatacacatacacatacacatacacacacacatacacacacatacacacacacacacacacacacacacacacacacacacacacacacataaagttaataacatgtgtgaaatttggacatatgaagctccatgattggttctaaatgttttactgaatagtcaagggattttaaacaaatagactaagtatcgttttcatgaacagcaaacaaattattagacaagtcgttctctactcatttcacagggattttatgtgaaagaggcaacatgatgtattccggttacttgacagtttgtgttatgcaaaccttttgacaatgaaataaatgatcacagggacgcaaagaa

SEQ ID NO: 3605 - DNA, 1000 bp, mus musculus
aagggggatataaacaagggagatataaacaggggagatataaacaagagagatataaacaagaagaaacaggactgaataaacgtgtgcagaaggatcctgttgcagcatcattcttcctgactagttgagcgcacgcaagagtcttcttacccgcgttctcgactggccaggaaagatgcagcaaaccggaatcttctgcggcaaagctttattgcttacatcttcaggagcaagagagcaagagccagagcaagagagagaaaaagaacaagaacaagaaagcaagagagagaaagcaagagagagaaaaagcaagaacaagagagagaaaaagaaagcaagagagagaaaaagaacaagaacaagaaagagaaaaagaatggcaaaaccccgtcccttttaaggagaattatcctccgcctaggacgtattactccctgattggctgcagcccatcggctcagttgtcatcacaagaaaggcagaacacatggcgggaaaactgcccctgcatgtgtgcagattatgtttaccacttagaacacagctgtcagcgccatcttgtaatggcaaatgtgagggtggcttcccacaaatgtaagccagattaaatactttaaaagtaatgtataacattactagcaaatcgattttagaatatatatgtatatatatatatgtatatatatatatatgtatatatatgtatatatgtatatatatatatatatatttgtgtgtgtgtgtaacaaatacacaattgttaatgtgataatgactagattaaaataacaaagcaagtatagtacactggaggggtacataaataaaaatgtagtagagagagagattcaagtcatcaattcacaggctgagattcaggagatgaaatgaaaataaaaagcaaagggcaaatagaaagaggcagagggaagcactccacagaataaatacatacacacacatgcactcacacacacacacacacacacacaca

SEQ ID NO: 3606 - DNA, 1400 bp, mus musculus
ttatgtagttttctcatgtgtacattaaaaaggtcagtaacctagggtttttactcctgtcaactgataaaatttttctcagtcagaagtgataattaataaacttttacctcattcattcaggactcttcaaacagttttgtatgactgtaatatatgggaaatttatcattttgaaaatatgcattttcaaatatgtattttcagtcatctaaaaaatagaacaaagccacctaaactttggcaatccgtaccttgttatctcatgagtatcctgtcagtaaataataggagagtagttgaatactatactagtctcttagctcttaaagctgtaaaagtgcagttctgtacttaaacacactcccttttactgcatgcaaaaggtagcctttcttcaagagacataagaccctacctgccacgatctagttccttttgtgctaaatgaaacctttccaccaacccatatcatccacatccttcttcaggttcgagcctccctgtttctccctgatattccccatctaaactctctcacttgctaggtctagctcagggccagcatccagtgttccagtcctagtttggtcacctctgcctgagctactctcaacatctaggcctctgttagaagtttctctacctacatcccattgcacagggttgtctgatgctaaattcagtctttctacatagccagatgtacttcacacagtggattggaccctaaaacacatcctgtaacctactcagtatcatctgtctacagaacttcactgcaaacaagccattttttggctgctaggccccacctgtccacacacatcctctcttctgctccaacattcttctttctatattagatttagaactcacaaaggaagttcatatacccagatcttatcataaaaacacaatctagaagatcaaggtatgatcttctccctaagttatagcagtccagtagaaaatgtttgccaatgagaatcagctacactgtgccaggacacagaatttacaagaatcaaaggtttaccaaggatttcaaggagtttgaaaaagacataaaaatagttcaatgaaaccaaagacaaataacttaaggactttgaaggtaattttcaaggttttttgtttgtttggtctttttttgggggggggggttaggaagtaatatggaccagatcatttggtctctttaaaccatattttattaatatgtttttcccaatttgttaatcaagaaataacagctcttgcctcataagggaatcatgtagaataaatgcatgaattctcagaaaaatgttagccactggtaacatcattatcttagtttatagaaagaggaagcaggtgtcctatactaactaaatgctgagaattccttgcaagct

SEQ ID NO: 3607 - DNA, 1400 bp, mus musculus
aatatatatgaataaattccaaaaatcttaacatcttttatcatcattcaagaacaaagacatgttttcatgaaattgtgtattgctttttatttagagcttttgttccttttttttttgctaattcttatagaatttcaacagcttacttctgttgtattcattatattttcttattgtattctgtctgcctttctgtgtgtctgtctctgtgtttgtctctgtctctctgtttctgtctctgtctctgtgtctgtctctttaaaacttctcccagatacaccttccattatttacacattcaattttatatcaccatttttattattttgtgatgcttaaatgttcttgagtgaatgagaatccactgtatcatgatcaacatactagggtttgagcacataacttatgcaaactcaagccagaaaaaaaataccatcattcgagagaaaatggtcgaccagactcctgtactgtacagataagcttcccttcccctacccatcttccctactatctgaggcatcagtgccaagccaaggttcctcagtagcctgatatcccaggggaacctccattctccctctgtctcttccccaccaccatcagactcctgaactatacaggtaagctgcccttccctcacatatcttccaggccaagccgagtggctatgagcagactgccatcccaaggggacattcattatcctgccacctctctgtccaccttcttcagacctgaggctcctgaaccatgcagaattgcaggcctgaaaccatatcactcaaggatactcaccaaccataccagtaccatcaaggtttgcctccatcccaatacctgttacaagaaaatccaaggaccaaaaccatctagatggatgaaagctcttaaaagagcacaaccaacaagaagatcaagaagactggcaaacccttcgccaatctaagcaagagacagagatacagtaaacaaaatcagtaatgaaaaggaagacatagaaactgacataggaaattcaaaaaatcatcatttcttcctttaaaaacttgtactatataaaattggaaaattgcaatgaaatcaatgattttctacacaggtagcatttaccaaagttaaatcaagaatagttaaactatttaaccatccccataaatgctaaagaaatagaagcagtcattaaaagtctacaaaagaacagaaaggaaggaaggaaggaaggaaggaaggaaggaaggaaggaaggaaggaaggaaggaaggaaggaaaaaaggaaggaaaaaggaaaggaaggaaggaaagcaggagggagggagggagagagagagagagagagagagagagagagagagagagagagagagagagaggaaggaagcaaggaagcaaggaaa

SEQ ID NO: 3608 - DNA, 1000 bp, mus musculus
gccaaatcttgattattcacaggtggattcctagcaaagcagtctcccatcacagcagatttcctcactcagttgcttcacaccacctcaggcaagctcagctctacagcttgcatttctgctgctcagtcagtctgccttgctatttgcaaattatgcaagatcatccacagcctcatccttgggcctcagctttgtgaggaccaatccacttctcctcacctaccactccctttatattctcagctggatcttccaggtctgcagctgaatatattcctcccaaaacaatacttctactttttcttacagtagtagcattggatattccctaatgagccttttgtacaaaccttaatatctttcttttttatttaatatgtcaataaagttttatttatgacttattctacctaaagcccataaatgcaggcccttgaccgggcgtatcttctgatctttaataataataataaaccccacaaatataacagacaaaatattattgaatagttgacaggtatttaattacacagggtaacagaagaataattatcagagttgcatttattatattatttttttatatttttattaggtattttcctcacttacatttccaatgctatcccaaaagtcccccatacccccccactcccttacccatccactcccactttttggccctggcgttcccctatactggggcatataaagtttgcatgtctaatggtcctccctttccagtgatggccaactgggctatcttttgatacatatgcagctagaaataagagctccggggtactggttagttcatattgttgttccacctatagggttgcagatccctttagctccttgggtactttctctaactcctccagcggttatcatgtagaagaacacgaattgatccattcctatctccttgtactaaggtcaaatctaagcagatcaaggagctccacataaaaccagaggcactgaaacttataga

SEQ ID NO: 3609 - DNA, 1000 bp, mus musculus
gatggcgttctcctttttgggacaaggattttcatatataccttgttttttgcagcctttgggattaacgctgcaatgacttaagcacacaactatgtctttggaatacactttctattgctggatctattgttgtagctatttttcattttatgagtaacttatatactattttccacaatagatatactaatttatattcccatcaacaaagacccagagtactttcttaaactcctcacatattatctatctttttcttttaaataacagattgcaggtctggaccttagctagggctttacagctttttatttgaacttcaaggatctgttcccaccataaagaaaactttatcaatggatcagttcaacatgcttcttgctttagaagtacaagcaagggacatttcgttcttctacactattgtcttcattcccctaagcaagttcttcacctttgaaagtttagtttagctcagttaacagtcttctaaacaatgaatgagtcttctttctgcaagcactattgtctcgtacaagaaaacagaggatttcttaaaaaatggctcctcaggcctggtacggctgtcctctcagatgctcttccagcacctgactaagacagttgcagatactcagagccaacagttgtcttgggcctgggaacaccaatggaagagttaggagaagggctaaaggagctgaaggggattgcaaccccattggaagaacaacagtatcagctaaccggagctctcagagctccctgggattaaaccacaaatcaaagtgtatacatggcctggttcaaggctcctgctgtatatgaagcagaggactgccttatctggcatcaatgagaggggaggcacttgatcctgtgaaggcttgatgctccagagaaggacactagagaggtgcagcaggagtgtgtgggtagtgggggagcaccctcttcaaggcaaagggggggtaggctgggaagtttgtggagggga

SEQ ID NO: 3610 - DNA, 1400 bp, mus musculus
gaggcattatgtcttggatcttgattcttttgtttgtatgctggactctaaagatctaggttcagggtattaaatatcttggtgtgaatttgtgagactgtcttagtaggatgggtgtgctgttctttggtttttgtttcttctatggtcttctggtatgtgtgtcctaggcttttcttagtctgtatggtctctggtataactgggaatctctgccccaattggcatttgaggaaatgcaactaaggaggcttaaaactgttgaggcagtgagagagaaggggagtttggcaggaggacaagcctacctggacttctctaaatatgtgaggtctttggtagagtaggaagtctccacccaagttgaagactagaacaaacaactatgagggtgctggactgtgggatatggtgggaggagggaggacaccgaaatagtgacatagtgcggggatttttagcaagctggcaagcctaccttgatttctcccagtctgcaaggtctctactaaagagaaaagtctatcaccctattggaggctgggacaccagaaggaggaggtttgggaactggaaatcaggttgtggaaaacagatgtagggagagagtgggaagtttgagtggcaggcagcctgcatgaccttctttcagtttgtgaggtctctagtatagctgggagttgaagccccaggttttggtctctggtatagcatgcaatctctgctcaggtgaaggctgaaatggtctctgagaggaaaggggatgtgagatgtgatgggcagtggctgacagtagaattatcccatctgcacattctctagtagagcagaaatctctgcccaagcctggtctcttgtatagcaggaagtctccactcagttgggggctagggtgtggcaactgagagtgtagaggactggaaacagagtgtgcagaggccaagtgttggggattttggcaggtgggcaagcctatctagatgtctcccagtctgcaaagcctctagtggaatggggtatctccactcagcaagtaagacattttaaagaatctattatggatgctagtgatataaatctgtgtgtaaatgtgcttgccatgcaaggctgacaacatgagttctgagacccaagaatccacctgaagtctcaacacagtagcatagaaaaccaacatatctatggtgaaattggagacaaacaggaaactctttagatgctaacaggacaagcagtctggcttacttaacagtgactctttcagacaagttatataggtgagtattgacacttgaagataatccatgttatgtatatgtacatagaacacattctcagtctacacacataaatatacatacacacacacacacacacacacacagagagagagagagaga

SEQ ID NO: 3611 - DNA, 1000 bp, mus musculus
tggcgggggccaggaaaggttcagcccaaaatattccaaccagcaggtggcactatttgggaggttatgttatccttgcattgtggggtctcagagagtgcactacaggtgggctctcaaatgtccgacatgcatctcattgcagtctaagtttgctgtcttctgtgctgagctgtggaaataggcagtcacaagtttctaccccatcagttgagatgctgacgctgatgctcctactgctgccaccgccatgtcttctttatcatgatgaacagaggacctctgaaactgtgagtcaaaggccattttccctctaagttgcttattgcaggtattttttttcatagaaacaagagcaaaaagtacagacactctatttatcattgaaggtgtggtagagacataaggattcatgaaagaagaggttgtataactcaaggttcctttacattggctaaaaacgtgacctttcacgtgcaatcattaacagtaggaaataaattaatctcctcccctttcatacttataagctttgtgagctgataatatttatattgaagtaactcttaaactgaaggttcatcaaattggaaaactggctggaagacaatattttgggtcagcagaagttaaatagagattatagaaaagcccataaaaagtgtccatcaaaattatctggacatattgatatgctcctcaatgtttttcttcaatagtttttatctacaagtgctttattggcttactaggaaaatagatagatacacatctgtaattaatattgaaagagttgagcctgttatgcaggtagtccacacctggcctttgcaatcatctttcgcttgcctcatggccaaagtacactggccgggccacagaagagagcctgaggtctagtgcatgcctggtagtactgtcctgtagagcagtgcagacagagtgaaatccatcctcattaaattcttgtctacctcttcagcagccttctgctatgtct

SEQ ID NO: 3612 - DNA, 1000 bp, mus musculus
gattcaacttaattttttcaactttatagagctaccaaagcaatgcacattggacagaaattgcaggtaaaagaccacataggctgaaattagcaatgatagcattaactgtggacagtaagagggacgaattatgtggtgccaatcaatcaatcacgtggtggagtaggtctgggaggagtggagaagggagaatgtgactgaaacactttgcacaaaattctcaaaaaataaaacacacatggggggaagatgatctgctctcctatcctatgggcattgggccgctatgcatccttgtcctttgatgtagcccatgtgcccaatttcaacagaatgtaaacactgcagtttgagattatatacagccaactctttcactcttacttatatttcctttctttctctccttccacacctttcagggagcaccatctccccttccataagaacgtactcaaaacatgaacggtcttcccatactctgctcatcgccacgacagataattaaagcatcacttgctgagacagaggaaggaggaagagttccctgcctaccacccttcctcatccattcagccatctcctcagtcccgttcatcttgaacactcttggcctccatttttctggactaaacgtttaaactgctcttgaactgaaggtactaaggagcctccagcagttgttctcttcttggtctcaagatttaaattccctcacttgaagcaagaaaaggagggaagtcaggaggtgagcatctcactttgaaaatgtttctgtcttctggactgtcttcctctacatggagtagaggagtaggaacagtctgccatacttgcctcaggggtgtgcgacattgttaaaggccaagaagcttcaggagatgtaaactcagatgaccttcactacaatgagaccagccacctttccccagcaatgacaggtgacagagaaagagctcaacagccaaagattatcttacatcctaagcaacaatcc

SEQ ID NO: 3613 - DNA, 1000 bp, mus musculus
cctctcttcctgttctgcttggggacagctggcaaggaagcctggttctgttttcatcccaagcacaccccaaccctatgccctgtattctagtcatcaactccacatgtcacctcagtaaagtaagaccgccccccttccttgtcttttcatttctgatttccttgagagtcctgtcctgtgctccccagttacctcgatgctgtaggcaacagttacattagtctggtactggtgctcagtactagtacccacatccaactttagacagacactcacctgcctctttacatagcgatcctctagattttaaaaaccactacaactaaaaccacatgtctgccactcatcctgtgacaaaaggaaaaaaaaaaatctcgggcaaactgaacttacttttgtccccacaacagatgatgttttaaaactagaaaataagtcgagtgatggagaagaaaattcttgtcttccccgctgtggctggcactggaagagctgcaccatctcgtccagattagctgatgctctgtcacatttgtggtccttctccatgccaccactcagcccagaacagtgctcaggcatgcaaggacagacatcagaattcctggaggatgctttcaaaatcacagatgtgcagcgcctagtccctgacgtggagtgagaatttgctaggaaggttcagggaagagggaagttacgttaaaagttccaaggcagagctgggcgcggtggctcacgcctttaatcccagcacttgggaggcagaggcaggcagatttctgagttcgaggtcagcctggtctacagagtgagttccaggacagccagagctacacagagaaaccctgtctcgaaaaaccaaagaagaaaaaaaaaagatagaatatatccctgtgctttatgatccttatttataaagtgggataaggtagaagcattgaaaagaatggttactaatatgtagaaatatcagaatatcgtatatcagaatcacttt

SEQ ID NO: 3614 - DNA, 1000 bp, mus musculus
tcatatcggcgggcttttttgttggtttgcgaaaccgtttctttctgacgttcttaagtggtggagtaatgccatgcttccagatatattttccctctgcttcctttttgtttcccactacagtagcaccagcagaggtagctggctcttctggggacgtgtggggatcaccatcatcggcgctgcacaatagcatctgggacacatcggctgttttataaaaggttttcccatcgtgcgttttcaggcttccaataacacaaggcaaatcgacaagtttggcagacagtgagacgccatctacctgaacgacggcacggcgtgaatcgggagacaagtcgatttttagtttctctctcatggcggcatttccagaacggatgatcttcctgaccgccgaagcctgttctgggggcagccgcagtatgaactggttctcgagttcgtgaggcggttcatctcggcttttgctcatcttgtctcttgggcttatccgcgccagagctgaggtgaggccgtgtggcctggggtcgaccttcctttcctgtgtccttgggggggacaaaggctgggccccgcggggctctgagggctgcggtgaggccgaggcgcttagagttcaagtctgccctgcccagggaggctcagtcagcgcgctggcccctggcacctcgttcctgtgtcccgggccaccaggtaggcagctggcctctaatggcttccccacacctcggcaggcttcggtggcctccgctggtaaccgcagggcctctgcacgtcacctcgggcctcgcagcctcctcgagcctctgtttgcctctacacctcctcgggcctccctagtcctccacagtcctccgcgggcctcgcggccaccctgcacctcaggacaccacctcaggcctcgcggcagtcctgggcctcaggacgccacctcaggcctcgcggtctccacgtacctctatgtactcctccacagttctctatgcgcctccctggt

SEQ ID NO: 3615 - DNA, 1000 bp, mus musculus; identical to SEQ ID NO: 3614

SEQ ID NO: 3616 - DNA, 1000 bp, mus musculus
tcattttccagttttgctaatcgctatgaaacaaaccaccatgaatttcaatgctagtaaactattgaaacagccagcacctggggcgtcccctgggatagcacaggctgcggctgtagacctgggctcagcagagtctctagaaatagtagcagtccgctagctccaggtgactaaacgaggcttcagctcgcaggctttctgattagcccagctagcaatggtaagggagtaacaagaagaacacagatggaagtcggatgcatcgcaacactcggtcagtttccacaccggtaagagagcccatggggatggggagagggtggtctgggtcacactgtgctgttgggagcatccacgctgggatttctgtcagcggctggtggggtgagtcagcacaaacgctctttgattcacagagaaacatatttagcctcaaagtctgaagtgtaaacatcctatcggttattcagcgtgtctttaccgtaagggctcaccatcccaaagactggatcccaaacgcatccatacaaacagaacccaaaagtttcataaaagacagttaggaaagcacatgttttctctgttttgtccagtgtagttaccacactaccatggggataggaggcagggggtgaccttatttatgataatgaaagaaggggtcacagggaggtgagctgagaaatctagatatgtttacaacaagggcatctggaacccccaccttcacatgcaggcttcactaaaaaatgccaggatctttttggtgcgtcctatgaagagattgctgaaggaaaggtgtccctacgagatgcccctggcctagttcctacctgggaatggcaggtctgctgctttccctccgtgaaccaagaaccttggattctaatcgtagtagctctcacacgaatcttggaccctggttagaaattatttatgacttcattagttgatctgcatagaaagtaatgctctctgataaggagaatctcaaaaa

SEQ ID NO: 3617 - DNA, 1200 bp, mus musculus
gaaacccacagccgtggaacgttaaaccattcctgcagcctctcgggggttgtgattgttcacttctcgcttagatccatttgtacgtctgtgctgttgatgtgcacatacctggctccccatagctaacggaaggttttcatttccctctctgctcttagcccttagtcacataccagctgcctcacctgaaatgtgaggaccagggagaggctgctctaatccaaagcacaaaagcccggagccagagaattctcggaagagaaaagtttttaatccaggtgaaaacagagagctgcccagtgggggcaggagggtcagccgctaaccactgccctacctccaggccaggggagcccagttctgtttgtcctggccaacagaaacccttagtagccttgacttcagtcaggcagcttatgctggtcctaaaaccagtctctgggtggggctggaaatgcacctggagagagcacagccaagtgccagggatttaaccactccacccctattcccctccccagccccaccaagcagcctctgctagatctgcagaaccttggctctgcttccactctcccagcctttccccagggacaaatgggaagagaagatagagtggtgtttgcctaagtcaacattgtcagttggatgctgctggggtgggggtgggggtggaactgcctgcaatcctgtcgacagagaactgtgcagtgtggaccagtctctgcattcctgacgacaggtcagaaacccaagggtctggatccagttacaaccagccttctttcccagctcatccccaactagtcattgctgggccctgctgtgacagtgccatggttgttccttaatgaatgttcaagtcacttaagcatttcaagcctccgtggctccttattaaaacgaaggagactaagatggatctctatgagttagagtccagcctggtctacacagtgagttaggacgatgtagaaagaccctctctcaacccatccacctccccccacaaaacctaaggagactagactgtggttcgttaagagtgattgtactggctagttttgtgtcaacttgacacagttggagttaacacagagaaaggagtttcagttgaggaaatgcctccatgagatccaactgtaaggcattttctcaattagtgaccaagggggaaaggccccttgtgggtgggac

SEQ ID NO: 3618 - DNA, 1000 bp, mus musculus
taagatttgcttttctttatgtgtgtgagtattcgccctgcatgaattatgtgcagaatgtgtgtgcctggtgctggtggaggtcaggtcccctggaactagagttacagatttttgtgagctgccccgtggttctgggaactgaaccagggtcctctactaggagcagggagtgctctccattgctgagccatcatttctgctcctcctttatatactgagaaatatctgaatttcccaaaaggcctttgcttatttgggctgtatctacttacacggtagaaacatttatgaaataattattaacttattttaaaacaacagcgaattcattggatgtaacacagacaacatactgttgatgaaaaattaagacaagaaaaatctgtgccttgttttattttatatttctgcctctgaattttgttaatgagtggctgaggtggtatccagtttcttgtgtttcctctttccctccctcttcttctcctagcctgttgggagccgcgcccacattcgccgttacaagatggcgctgacagctgtgttctaagtggtaaacaaataatctgcgcatatgccgagggtggttctctactccatgtgctctgccttccccgtgacgtcaactcggccgatgggctgcagccaatcagggagtgacacgtcctaggcgaaggagaattctccttaatagggacggggtttcgttttcgctctctcttgcttcttgcactctggctcctgaagatgtaagcaataaagctttgccgcagaagattctggtctgtggtgttcttcctggccgggcgtgagaacgcgtctaataacaattggtgccgaattccgggacgagaaaaaactcgggactggcgcaaggaagatccctcattccagaaccagaactgcgggtcgcggtaataaaggttcccgtaaagcagactgttaagaaggattcaactgtatgaattcagaacttttcagctggggaacgagagta

SEQ ID NO: 3619 - DNA, 1000 bp, mus musculus
tacctatcagtagcaccatcacagccagagatggggagagagggatgacaatcaattacctatcaccagcaccacagcctcgcaagagcgtggctggtcctcgagcagtgctaagatgtcttggttactgagttcacgattactaaggatacaagaaatttaattgtattgacaagttggtatctatttagaaggaagaataataaggttcagtatctcattgattcccattaatactcatgtatggcattaacctgtcattaagtgtgtctctgtattcctcccctagggttctctaaatgccatgtggtatgcagaggttggttgcttttgagttcttaaaaactataataatgcatagaatacttgtgtaatttcagttggagtaaaaaagtatttgtcaaaattgttcttagctactacaaatgtctccttgcctagtagtttggaataaattagctgcattatgcttttgcttaattgttttaatatctgctgaaacgcatagtctgatgagtgtatgtggctgttattttgcctgcctttctcattggactgtggctgtatcctgctttggctttcttatgtacttgtcggtgtttataaaagatccttggcaataaaggaaggcacctgaactctctgcgtaggttaaggagctccgagaaaaggccgaatcttacaggaagcgagttcaggggacacatttttctcgggaccatctgaaccagattatgtcggacagcaactgctgttgggacgtctcctcagtcacaagctcggaaggcaccgtcagtagcaacatccgagcactggatcttgctgggtgagatgttctttgtggaaagtgagaaggctgtgttatagcttgtgtgcatcataggatgatgtaggaaaatgacccagctaactcacaatctgctgtttagccagatgggtctcttatttcattatttaaaacttattctctgtggtaaatgtagctatattatacttgctt

SEQ ID NO: 3620 - DNA, 1000 bp, mus musculus
aaatatgcatttggtttgtttcaaacgctaaacactggaaatggatgcgcttcattctgaagaacgagagcagcaactttgtcacctggatgaggaagatggcttctgctttgtcatccgtaccttcctccacaggacagatgtgtggtaacttaaagctctgttctgaagttgggtagtcaggtcacctctgggaagagcagccctggccagatccctcgggaaaactcctgtccctcctggagtttgcctcagcgatgcatctcactcaccaccttgatcttactttgccagttggtcaaatggaagttgccagaattatttgaagggttattgtaagggttatttgtgaagattaggagtgattgaaatagggtcaggataccaaatcccctatgcattgggtagcagccaagattcagggcaagtggcttcccgagggagtatccctcagcaaaacctgatcagagaggagggggaattgctgctcagacagatggtatcaggtaaagtagagtcttggcctgattggtgagggactaaggtgccaatgtggctaacatggtacagacacactgtcattgaggtagactggctttgtgtgttccctgggagtcagccattatatctcagttagtgtctctaatgctgcaacaaaacaccatgcccaaaacagaaattgggattttgggggggggagggatttattcagtttacacttccacagcactgtttatcactgaaggaagtcagggcaggaactcaagcagagtgggaacctggaggcaggagctgatgcagaggccatggagggatgctgcttactggcttgctcatcatggtttattcatcatggcttgcccagcctgctttcttacagaaaacccaggatcacactagtctagggatggcaccacccacaatgggctgggttctccctgattgatcactaattaagaaatgtcttacgcagggcagtagaggcgcaagcctttaatcc

SEQ ID NO: 3621 - DNA, 1400 bp, mus musculus
cagggggagatgtgggaagccacatgtgccgttgctgagtggcactgactactgctggccaccatgcataagattggacaaacaaccaatgtgtacatatgcagtaaagttttttgcaaaaacactgcctggcccaggcatgataatgaggttctgtaaggtactaagagagtaaccaatcggatgtgagacatgcaaatgaggtatgataatgaggctctgtgaggtactgagagagagtagccaatcagatgaggaacatgcaaatgaggcttagtgcataaccaatcagggtatgagacacgcctctcctaggcctataaaagcagcaccagctctgggcaaaatggtcttttcgcctctgcaatcaagctctcccaataaacgtgtgcagaaggatcctgttgcagcgtcgttcttgctggtcgagtcgagcgcgcgcaagagcatgtcatcagtttatacgggcactgttgctgttaccgtaattacttttatcttcaccgagtggtacagagatggaccgcgtaagaacagccttccctctaagaagattcacgggtaaaacaggagagataaataaatcagcacctgcacaggttgtaacacagaaacaggaaaagacaaagcaacagaaagtcctccaaagacttcaactcctcaattaccaaatccaagggcactgaggactctgaagtgctgaatgggaaggtctccctgtaaacacaattaacaacgtcaccgagaaaaggaggtgctcatggggcccttctccttactgctcaactatggctggtgatagactctgggagatggggctcctttgtcttcagttgaatacctactggtgagcccaccaggctccagggaatagtttgaatcctaggaccacacagagagccctagaaaacccagagggacacaaatcaaacaggaaatcaatgcgggaaagagcctagtaacatgggagtgaagtgggcagcgagccagcgtgagagcgtcctagtgcattacacacgagtgagattaccaaagaccaaatttacctaataaaaaatgattgatggtttcaagaaggaagccggtcaaggaatgaagttaggaaatacgttgaggatatcactggggcagtgggcaatgtagaagaggcagaagacaaattcagaaaagacgaagtcagatttggggggcaaagaagggccaaagtgttggagatgaagaaattatactcaaacggataagcaagcaaaaataatgaaatccttgccagcagattagaccaaacttaagaaagaatatcaggcagggacatctgaggaatattaattactaaagaaaaaagaactgcagtaaccacagcatctcagaactctgagacacaactgagagaaaaaaaaaac

SEQ ID NO: 3622 - DNA, 1000 bp, mus musculus
catgtttccagtagcaacagtctcaccacgtcccttacgtggggcagatgttcgactgaacagtagaattttcatgattcaattaagtgaggtgattgctgtacttcagtgtagacctgcgcatgtgcaaggccccaggttaaaaacaaaactcgtaaataccatctaggtggaaatgcctaggaggaaaggctaggagagctttctctaggaaggtgcgtgggctctgagtaagtgcctgcttgtgtatgactcatggatccggggatcaaaggatagaaggacccatcgtctgaggagtttgcatcttagagaagggtcattcctcgccgcttgtacacaggacttgttttatcatattaggtagaattatgactttattagggaccaggatggctcatagcaatggctgcagacgccaaggtgacagggacagaatgatgactccgaatccaactcctcccgcttctcctctgctgcagtcaggattcactaaggcagttaggccagcctcagactcactcagtagcccagacgagctttgcgttatgagccccagcttcagccttctaagtagctggggacacaggtccatcggttttagccatttggctgatattagcacttacagtggagaacagagggacagattgctgtctgtaatgaatgtggcaggtctcctccaagagctgagagcctgactagaacaaacacgtcctcctctgtggagcaggagtctccaggaggctgcatctgcaagctgtctacgccatcagtccttgggcgctacccctcaccgttccgctggaggtgaattgtctgcctacctaggtatctgtgctctcgttccttagactggagcttggcatttctgaatccctggcatcatattggccacactaaaaccaaactgctatttaaatcaatcaatcaatctctctctctctctctctctctctctctctctctctctctctctctctctctccttcttcccttc

SEQ ID NO: 3623 - DNA, 1000 bp, mus musculus
ccttcttctgtttttttttttttttttggtaaggatcagctgtggttcctatgatttatacatttgtctgctgacagcatcttaagaatgtggccctcagctctagctgcacttatacaggagacaaatgggttcaggtcttggagatgttggtgttttacctgggttaccttagccaagacccagacctcactgggtgtcttcttatagtttcaggacctaaccactcgactgttctcaagaatgtggcagttcctggtgctttttatgaacattttgattacttgaaaaaaataaatagtagagagataaaaataaatggtggatggtattttcttcgctccattcactgggtaacaaaataaaaattaaccagtttcctcatgctggtggcacaagaagaggtatttgggaacagttgtggaggtcttggagttgtttagacaacctgcctggtcactccagtattcctgtcagtgtttgtagctggatagtttaggatggtgagttcattctctgtgttgtgtgaacctggggacgagaggctgcctgcctgaggctgagatctcagcagtgcctcgtctctgaatccatacatcacagatagtcacaatattgctttaattacttgaaaaatgaaggatataatttttggaacgttatgggaggaataaatgggtgaaataacaaagtacgtttccaatgacatagccacttgtgattttgtcttctattttgttttcttactccctccccaccccttttcttcctcatcttctttttggatgttcttggtggttattattgtttccaaaagctgaaggtttctctgacacattttcccttctcgccattctaaaggagttgtgaccatgaatatctttgaattttcagctgttatgagtttctggcacctaaaaggcactcacgaaattcttattaaatgaataaattaagaagaatatgcgaggttgctatctttcccctctattttgcttcc

SEQ ID NO: 3624 - DNA, 1000 bp, mus musculus
tatattacatcccaagtacaatttcagctccctgtattactcccagtctctcccctcacttctcctctctcccagatccacccctcctctccttctcttcagaaaagagccagcctcccaaggacattaacaaaacatggcatatcaagttgcaggaagactaggtacccttctcattaaggctgtatgaggcaacccagtagtaggaaaagggtccccaaagcagtgaaaaatattagagatagtcctgtccctatggttagtagtcccacaagaacatacaggcacatatgcataaggtttatgtagagagcccaggtcagacctgggcagctccctgattgaaagttcagtctttgtgatctcctatggatggaggttggttgattccctggaccattttcttgtggtggccttgatccctctgactcctacaatccttccttccctcttccacaggcttcccagagccctggctaatgtttggctgtggctctgcgcatgtgcaccagtgagttgctgcatgatgcttctatgatgatggttagagaactgctaggttttggatgggggatggtagtcagaagaacactagtatggattactaaggagagtgataaaacattcgtcaatgccagggacagacaaagagacaatagtatggtagaaatggctccaaggagcagttccgccacaattccagagacagacagcatggctatctgaagatagagttaaatgtgcaggtggcagaagtggaaggccattctaagcgctttgtgaggatgagggaggttttacagaaattgtctgcaaccaggctcattgattccaggcaagaagcagcaaagatgagggagtgctagtagatgttaactcacttcctagatgaactactgtggtgctaagatcttctgttagcttgggacttaagactgtctcagcagggtgcctgtgaaagggggaagagctctgcaggcacacaggtatattctgattt

SEQ ID NO: 3625 - DNA, 1000 bp, mus musculus
gttaaaaaggacaagtagaatgaatggaaatgtgcaacatgaagagggagggaggaggtggggggaccctctagaatgtaccagagatctgggagggaaaagactttcaggactcaaagggagggaccttagatgaaatgcccaacagtggggaaagggaacttgtagtgtccaccttcagtggaaagatagggcatcaagtggaggaatgggactgccatcccacagtcaaaaactctcacagaattgttcctgtctaaaagaactgcaaggacaaaaatggagaaaagattgaggggaaaggagactgagtgactggcccaaatcaggatccagctcaagaggggactccaaggcctaacactattactgatgctatggtgtgcttacagacaggagcctggcatggctgccctccaagaggcccaacaagcagctgaaagagtcagatgtacttacacccaaccaattgactaaagtcagggacccttttggttgaattagggaaaggctaggagaagttgaggaggaaggcaaccccataggaaaaccagcagtttccacaaacctggacccctgagatctctcagacactgagccaccaaccatgcagcacacactagctggtctgaggtcccagacacatatacagaggactgcctggtctggcctcagtgagagaagaggcacctaaccctaaccattaagagactcgaggcctcaggaagttgcgagatcttgcagtgtgtcaggggtgggtgtggggacctcatcttggagatgggggaggaggaatgggatgaggaactgtcagagcgcagaatgggagggggatgatgactgtaaaaaaaattaaagatgagagagagagagacagagagacagagagagacagacagagagagacagagagagacagagagaggagatcttaacaaggaatttgttacttagatcaccttgtgacatacatgttacagttagtcaatcgctcacaagt

SEQ ID NO: 3626 - DNA, 1000 bp, mus musculus
gctaggaggagagtctcaatgactaaccccacagtgacacacttactaaaagggcacacctcttttttttatttaatttaatttttttttttgcaattcagatttcattcccttccaggtccacccgctgtcggttccccatcctatacctcctccccaccatcctctttccacaaggatgtccccattccacaaccaaccccaccagatctcaaaactccctggtgctgaacccagacttggcagttctctgctgtatatgtgctggggacctcatatcagctgctgtacgctgcctggttggtggtccagtgtctgagaaatcccgggggtccaggttaattgggactgatggtcctcctacagggccgtcctcctccttagcttcttccagcttttccctcattcaatcacaggggtcgcagcttctgtcttttggttgggtgcaggtatctgcatctaactctttcagctgcttgctgggtctttcagagggcagtcatgataagtccacatttgtgagtggctgcatagcctcagtcagagtgtcaggccttggggctaccccctgtgctggatcccactttggcctgttactgaacttccttttcctcaggctcttctccattttgtgtccctgcagttttttcagacaggaacaatcatgggtcagagttttgactgtgggatggcaaccccatccctcacctgataccctgtctttctgctggaggtgggctctactagttctctctcctcactgtagggcagctctctggtacattctggagcatgtccccaaccttctgcctcctaaggttacctgtttccattctttctgctggccctcagggcttcagtcttttttcccaataccagatcaggctctgctcttctcgtcttccctgtcccctttaccatccatgtcctttcttcccttaccccctccagcgattgctttcttctccctctcaagtgggattaaggcatcctcacttgg

SEQ ID NO: 3627 - DNA, 1200 bp, mus musculus
atagatatagatgaaaaccacatcatgataaaatatacaatattatgaggctaagagtattttgatctcagaaatctcacatcaaatgaattatggctattaacaagttgaagaatcaaagaaaaataatatacaaggagtaaattgaatggtccataaattatatgtagaaatagactgtatctaatgactcatatggcaattgtggcagaacatactacagaatcttcacttactgaacaagggtacacatgcagattgtatcatctaagctctcttataaacttgggtagataaatccctgctcaaaaattttgtcccaaagcaacagatatggttgtacctagcatctcatatatatcacaaaactaaaatctggaagtaacccttcccgcaggattcagttattcgtgggtgtgagggggaccgcaaacctggaaggaaatggaaggaagggaaggagaggcaggagaccaagcaaatttgtcaaggtctcgtttattaggctgtggtgccttgttttaaagcatacatcgtggggaatagaggaggggtcgagggggaattttacaaagaacaaagaagcgggcatctgctgacatgggggccaaagtcaggcaccaggtagcaggcactctgcatcttatctccagaacatagatccttcttgacagcctttggtgtcaggctgggcttaggcgtaactcatgtccttggatggcatgggagttcaggaagagatagggaagaggggactataattcatcttttacagcttcaggtgccaggaagggaatagggaggagggagtgataaccagctcctagcatgaggccatttggcctgtcaaggagattgtgaagggcatgctttctcatgggatggtctctgacatggaagcaaggagtcttcagacaagaaaatccctctatgtggaaggatacactaacttcacttgtttgattcatgagtctcacagccctcaactcaactgggtttttggatagataaagtaaaagacaatacaaagtcccagaacccatattttctcaagtaaaagggaaagaacgacaaggataagaagaaggaaaaaggaagtagtggcagagaggaggaggaagatgatgaagtagcataatatcttctgtgtcactgtattgattatttgaattattattgtaatcttcattttaaaatttt

SEQ ID NO: 3628 - DNA, 1200 bp, mus musculus
gtacaactacacagcaaaatactatttagctagtaaaaacaaagacatcatgatttttgcaggcacattgatggaatttgactttcatcctgaatgaggtaacccagtcccaaaaggatagtagccataaaacatattctttgatgtatgccacagacccatagaagccaaaaaaaaagaaagacccaagcaacaatgcttgaatctcccttagaagagagaatgaaataatcatacgacacagatggaggaaaggaaatgagtgcaagaggggatgaggagggaaatgtgggcaggggttcaagatcatgtgttgggaaggacaggagagatggccagatgtccatgaaaatgaatagaaatccaaagctgatgggggtgaggaggtatggggcatctccaagaaaacacagcgtccccggtaagggtacagcccaagaaccaatgggggtgaccttagctgtgactcacaacattgggtatatggaagctgaagaggccatcacctgtagccaggcaggaactccagtggagcaatagacaccaacccatccacaaacctttcaacacaaactttatcctgactaaaagaaatccaggcacagggaagggagcagagactgagaaatggccaaccaataacctgctcaacttgagacacgtaccatgggcaaacaatccctgacactattaataatactctattatgcttgcagactgttattagacgcgttctcacgaccggccaggaaagacgcaacagaccagaatcttctgcggcaaaactttattgcttacatcttcaggagcaggagtgcaagaagcaagagagagagaaaacgaaaccccgtccctattaaggagaattctccttcgcctaggacgtgtcactccctgattggctgcagcccatcggccgagttgacgtcacggggaaggcagagcacatggagtgaagaaccaccctcggcacatgcgcagattatttgtttaccacttagaacacagctgtcagcgccatcttgtaacggcgaatgtgggcgcggctcccaacatctccccctttccttttaataagagcaaataggccacccatattaatgagagtggagatagaggtcaaatccccagtgtgtaggtaaaggagccatgtacaggattagctcttaggctcacaggcttttacccagagcaaccctg

SEQ ID NO: 3629 - DNA, 1000 bp, mus musculus
aggaggttccaagggaggggatgtgaacctcactctgaagagaaaacaaaatagtcatcagaggtggaaggacagagggaactgggtaggaaagagggtgaggaggggaacagggatagggatcgggtatggggaaaagaaggtggtgggacagggctaagagagacagcagaaatcaatggcaggcatatctgagactagttggacatttgggatggtgaaagctcccaggaatctaaggagatcaccctagctgagactcctagcagtgggggacatggagactgaagtgatcacctcttgtagccaggtagaacttccagtggagggaggcggaccaccacccacccatccaaaatttgtcctgcctgcaagatgtacagggatagagatggagcagaaattgagagaatggccaacccctgacattattaatgatagtctgctatgcttacagacaggagtttagcataactgtcatctgagaggcgtcatctcacaggggatggaaacagatgcagagacccacagccagacatcaagtgtagcttggggagtgtcttgtgaaagagttcaggataagactgaatgagccaggagagcatgggggtctgcccggcctgagaggtttgtgtcacaggcgccggcgggagccttcttggctccgggactccgcggagggcaggctgcacgggtgaccgtgtggaatacagaggccagctgtttctggtacgggcgagagtcgcagagcttctggggcggcgccatcttcggctccagacaaccggccaccttcctggcgagagccacagagcttctgaggcggcgccatcttcggccccagacggccggccaccttcctggccaaagcaacacagcttctgggaaagatcctgttttgggccttcaccttcagccaggaggaggtccaaacaccagataactgtacaccttccctgaaagaggagagcttgcctgcagagactgctctgaccactga

SEQ ID NO: 3630 - DNA, 1800 bp, mus musculus
agaataatgttggcctcctcacaaagaggttctttgcaatttatttttaaacccatggccctaaagaggcaaaactgttactacccaatagcaatattacataaggagaaaaacccatttttttattttctacttggaaagtggagagaaaggtttggagggttgggtttcattacgtaaacatggaggtgatgtacggtgacgtgcaaataccacagtgccatccctctcacgtgtcaataaataccagaggctaaattttcttgtggcacgcatcaggaagtataaaacttgggttgccaaggagactaaccagctctcctttgccgaataccttcttgaggatactctccatctgagtcactaaacagactcagattaaaatctgcacactggatggaccaccctcgatcatcgagcattgccccaggatagcctctccactccagatgctccatttggctcctccctatattgcccatccacaccttgtagtgaagagaaagagtgagatcaaataatgtgtatctggctttcatgtcatctcggggccaatcaggaataaaaaaaaaaaaatcaacccaccacatataaacacctgtggcttaaacttgggccctagtgattggatatgctaggttgcatcctgcaactcaaaagaaaaaaaaaaaagatttcttaacacacataataacttgtctgtccatgttttctgccctttatttgtggcagagaccacgggaaagttcactgaaggcagctctatcagatcttgttatttgtatcgatgtttcttccggcttcctagtcaggttcccagcatgctcaacatcagcacccagaactttgacttgtgaccaggttgggtcctcttacctggttccccatccccctgactcaacagcctactgtgtaggactcattctctgccgttggcgtgtgggccagatgcacttctatgctgtccccctgactcaacagcctactgtgtaggactcattctctgcccttggcgtgtgggccagatgcacttctatgctgttcctctggaagacagtgacgggatgctgatgactttgaaccccgtagcgtcatccatttggatttttctaccacgccccccctccacttccgccctagtattctatctgactcctcaaagtagctggagcttaaggtagacttcccactgaggccgccttactgtttgcattacatttagatagataaagctagatgttaaatgccgatcagcgctaacagatcagcactaacagccgaatgtatatgctctcccagctcctaccctcatctgggagtgacatgtccctctgccttatttattctctcctcctctcctactcaaagctcctctgattaatctgccagaatcttaacatagttagcaggacattaccacggctctttctgtttgtttgtttgtttgtttgtttgtttgtttttaaacaccttttaagtaatatcaattttgaaatattatccaataatcaataggttgaacatatattttgttgcttgtgaccctgaccaagacccttgggggcaggtgtaagaaggtgcagggtcaataacacagaggcggggagtcaggcaagggtcaaaagcagactcgtttattgcaggaactgggcaagccttcatacccacccccaccccgcaactggggccccattggcccatgaccaatcacttgatgtagttggcaccatatgattggttgttctagtcacatgatctgtcatcatttgtctccaagtatcaggctggttgtaggggtta

SEQ ID NO: 3631 - DNA, 1000 bp, mus musculus
gctggggagggagttagtgtcagagaccacaggttttgcagcatgctgagagaagaggcctcagtccctcttagaaactggggaagaaagagaaagagggtgtgaggagccagcccggcctggcctctgtgtaggaacagacaacatagaacaccacgaagccagccccaccccccactgccagccagtccaatccatgtttctccaccccaagtcttgccagcatcctctcccccttaacacatctctttctctcctgcttttctgcctgagccactgtccggggaaagcctgggagggacgcggcctcgtgcatctcagcaagactggacattttctcttgattcagcaaaggagctataaagtgtaccataacataggtctctctgaccatctggggtctaaaacaaacatggaatatgcccggtgacaccaggtcctggtgtgatcggggacttggtgtgattggggaggtgttgaagctggagggttagtggatggggaggcagctggtttccatttttactgaccgtactgttgtttctagctagagacaccgagagtctttggcagcatatgtcaatccaggagtagtgcagacatcacctttacacgaggtggcttagacatctctgtgtatctaaggctattttaaggctattttagggtaaaggcacaaggtagtagaccgatggacagcagcccttgcctttaacaaaaattttaatgtatgacagtgacccctagtggtagaaatgagtactgtgattaccaccagcacctaagggaaggcttggggccatgggaggtcagggttggctatgaatgagatttgggctttttagcaaatgtttctgtttggttttgatacagggtctcatgaatccaggactcctttgaactcatgatctccctgcctctgcctcgtgcagccatacagggccaagcaggagttggaagattttggctcagtcactaagtgcttactgaacagacatga

SEQ ID NO: 3632 - DNA, 1000 bp, mus musculus; identical to SEQ ID NO: 3631

SEQ ID NO: 3633 - DNA, 1200 bp, mus musculus
ggaagaatgggactctccagtggggaagcacagggcacaaggggacaccgtcagtgtcagagaagagggctgtcagcaccaccaggtcatggtgtttcttacccaacatttctattctctgcactcactggcttctggcatgaacagcaataagtatatacagatagcaccacactcacaagccggagtgcagagttagggagggcttctgagaatagccgtagagccccacacctacgacagagacgtttaggtctctactaaccacaccccaaaggcagcactgtaaaaacaagtgccaccaacattaatgagacctactgtgccaattcggtggcctgctggcaaggtacaaatgaagcttgtggcaaggatgcggcaggctgcaggtgggagctgcagctgggtctggatggtagagctgactgtgggcatgtatggctgcagcatgacagacagcaaggcagccatgttcactgccatgcctgtcactgtgcctgcccgctgcctgagaaagagagacatgtcaaggtcacaaagatgtagcatgtcatttaattcctatagccagccctagctcctgcacacacctgtccatctcaccacctttaatccgtttccagggctcattcacttgaatgtattggttgccatggcgagatatggtgaggatactgcgcaaggcatcccggatcctgggaagggaggaggcagagtgtatagggctgcaagccataccaacatatcactgactagaccgagctggaagtcacttaccgaaccttttccaacagctggtgatagtgctggagttcccaagagacatgggccaccaggcgtctgtcatcaggggttagcgccatctcaggcacacaaccgccaaaaaacttagaaacaaacatgccagctctgagggaagagaaaagagaagacagagttactgccaggtttttagagaaacttcatcccacttccataagtcttcatgcttgggccgccagatggctcagatgccaccaagctcgccgactgagttccatgcctggctggcatctccgtggtggagggaagaactgagtcaggttatatgctgatgttcatggcacactatcaatcgcaccccacaacaaacaggaaataactgttaaaaaacaaaacaaaacaaccaaccatacaggaagacttaactcccatggcatt

SEQ ID NO: 3634 - DNA, 1600 bp, mus musculus
tacagaaaaagttggaaacactgtgatttaaaagttctgtggttgaagagatagctcaaggtttaagaacatgtaatactcctgcaaatgagcagatcacctcccactatacatatcaggtggttccatagaatttaacatattcgtctggcctccatatataaatgctgcatacaaactgatgtagatacacacatacatacatgaaataaaaaaaaaaagaaaggaagaaagaaggaaaggaagaagggaaggaaagggaatggaagggagggagaagggaaggaaagaaaggaaaaagaaagcagaaaaagaaaaataacagaaaaaagaaaagaaaaaaagaacagagagaaagaggaatcgaaagttattatgtcaccatgaaaaatgtccatctataagtttggatatgctgtgtcatcattttcattgaattccaggaagtctttaatttatttctttatttcttctctgacaaagttatattgagtagagagttattccatagagtctacctcctgtagaaagacagggcatcaagtagagggatggggttgccataccacagtcaaaaactctgacccagaattgttcctgtctaaaagaactgcagggacagaaatggagaaaagtgagagaaagaaggtccagtgacaggtccaaattgggatccagatcaagggaaggccccaaggcctggcactgttactaatactatggtgtgcttacaaacaggagcctagcatactgccctactaaaggcccaataagcagctgagtcagatgcagatatttatacccagtcaagtgacaaacgctgctgacccctgtggttgaattagggaaaacctggaagaagctaaggagaagggataccctataggaagaccaggagtctcaactaacctagaccccagagattgctctgatactgagccaccaactgggcagcatacaccagctgatatgaggccctcaacacatatacagcagaggactgctgggtcttgactcagcgagagaagatgcacctaaccctagagatacttgaggccccaggatgtggggaggtctggtggagtgggtctggaaatttgggggtttgaggacattcttttggagacgggtggggtgggggtgggggggaagtatggaatatggaacagtcagagggcagaccaagagggggataaagactggactgtaaaaacagattaaagaataataaaaaaaagaattcatttaccttcccattccccatccccttctcctattattcggtttaataaaaataataacatactggaaaaaaaaaaggccatggagagaaaacttctcaacctgtgggtcgcgaccccattgggagtcacgtaatagatatttacattacaattcttacaatagcaagattacagttacgaagtcgcagttgaaataattttattgtcagagatcaataaaacacgaggttgcaacatcaggaaggttaggaaccactgatcctggaacaggcggaagcacagaggcgctgaggcagcaccctctgtgggccggggacagccagccaccgtccggaccagaggacaggtgcccgccc

SEQ ID NO: 3635 - DNA, 1000 bp, mus musculus
tcacttaacaccccaatatcagtctccctctcttcccagtatccccttacacagatccttgcctcattcctctctccccttctcctttgaaaaggggaaaccctacctctaggtgtcatatccttacccccacaagcccccatttatattaagtcactgcaggactgagggcatcctctcttactgaagccacacaagatggcccagttaggagaataagccggcaggcaacagcttcaggaacatcccctgttccttttgttggggaacccacatgaagaccaagcttttcatctgttacatatgtgcaggggggtcttgagccagccaatgctcactatttggttggtggtttagtctctgggacccctaggtccaggttagttaactttgttggtcttcctatagagttgcagtcatctttgggtccttcaatccttccaccaactcttgttgggagacttttaacacctgtttctatttcctttaaggttatatggctatttaaattgtttatgtgatcttgatttaattctggtaagatgaatctatcaagaaaatagtacctttaaataaattttccaattttatggagtacaaacttttgaagtaaggctaaatgattctttggattttctcaatgtctgctgttttgttcacttttcatttatgattttttttttggttattctctctctaccttgtttgtttggtgtggtggtttgaatatggttggctcagggagtggtactattaggaactctggccttgttagaggaagtgtgtcattgtggagatgggctttgggaccatcctactagctgcctgagagattcagtcttcccctggatgcagttggatcaagatgtagaactctcaactcctccagtgccatgcctgcctgaacactgacatgcttcctgccatgatgattatggactgaacctcagaatcagtaggccagccacaattacatcctgtcctttataagagtggcctt

SEQ ID NO: 3636 - DNA, 1200 bp, mus musculus
atctttaaagcattggaaaaacaatttaagtgatatcaaaatttttaatatttatgtctctaatgtatcttccagtcaacaggttgagcaacagatgttatttgtcatttgaatggaaaaataaagaaaggcaggtttttatttcataagactactcatctttacaaatgtcttctaaatgccatgccctgtctcttcaatatttttctatgtattttgtgctatggagggttaaactttgtgtatttaaagagaagaagattcataatggaaaaccgcacagtacccacagaattcattttattgggactgtcagatgaccctgggcttcagattgtgatctttctctttttaattctcatgtacatactaagcatcactggaaacttgaccatcatcaccctcaccttggtagaccctcatctacaaacccccatgtatttcttcctcaggaacttctctgttttagaaataacctttacaactgtctgtatccctagattcctaagcacaattgttaccagggacaaaactatttcctacaatagttgcacagctcaattgtttttcttcatcttcttgggcatcactgaattttaccttctaacggctatgtcttatgatcgctatgtggccatctgcaaaccactgcactacacaaccatcatgaacagaagagtctgcatattgctggtcttttctgcctggctggcagggttcctaaacatcttcccacctgtcattctctttcttcagttagattactgcggctccaatgtcatcgatcacttcgcctgtgactacttccccctcctgcagttatcctgctcagacacatggctcctggaaattattgggttttattctgcaatagtgatactgctcttcactttagcactgatcattctttcctacatgttcattgtcaagacaatcttgaaacttccatctgtcagtcagaggaaaaaggctttctctacatgctcctcccacatgattgtcatttctatctcatatggtagctgtatattcatgtatgctaacccttctgccaaagaaaaagcatcactgaccaaaggagtagctattctcaatacttctgtggctcctatgatgaatccatttatctacactctgaggaatcaacaagtgaagcaagcctttaaggacgccatccaaaaagtagtgcttttctctggc

SEQ ID NO: 3637 - DNA, 1200 bp, mus musculus
tagtcaattttcaggtaagcatactgggtacagcacacatagatgctgtctaacccagagccctcctaaatgcagccttacttgtaggtacaaccctttataaaacattgtgtagaggtcacggactcctatggatgattagggacaaggattgcaggcattgaagaggatagatactccacaggaagaccaacaaagtcaactatcctggactcttgagaatcgcagagactgaaccaccaatcaaataacatacacatatatgcagcagctgtacagcttggtcttcatgtacgtttggaaaaacttgtgtgggggctatccccaaagctgttgcctatctgtgggatatgttcttctatctgccctgccttgtctggtctcagaggaagagttaatttgagttattttggtatccaaccacttttctgaaggtgattgttgtggattgctgtttgtattttctactccctcaagaggggtgccctgcggaggagtagatcacatactcaggtgatgtcagatgaaatcttaattagtcaaataaattctagagcctatgattgggtaatggcaggaaaaggtggagctgaaaaaattgtctgcaagcagctagggatttcatagctgggcagtagtgtagtgtagggtatattttcccaatctaggtgtgcagttaactgaattgtgcattctttgcaaggacattttggggttggatatttaccgttataaatctggctgttataagtttctagtgttttcatttcaccgggttaaagggggctgggtgatctgtagctggcattctgcaagtcagccacagtgggtagatggcctgagaaatgctagcggtagctccaggcatttccagttaaaaactggtttggttagcttaggaagctagactgcagcatagacctagctatggggtgggcaataccaccaatgctggcacatagtaggatttagtgtgggtttttaaaaacaacatgctacatgtgattaacagctgtaggacttctctggtagaattttttgagtcacctataaatacaatcatatcatctgaaaatagtgatactttgacttcttctttctagtttgtgttcccttgatctcctgtaattatcttatttgtctggctagaacttcaactactatattgcatagttagtaaaggagtgggcatcttcaact

SEQ ID NO: 3638 - DNA, 1000 bp, mus musculus
gaggccttccatggatatcaggccaccttggcatataaggttgcaataggattaggctcatctcctattgtggctagacatgacagcccagttagaagaaagggatccaaatttgggcaacagtcagatacgggtcctgctgttagtcgttccatatgaagatgcagcttcacaactgataaacatgtgccaagggtctatatttgtcccatgcatgctctctggttggtggttcagtctttgtgggcccttatcagggtaggttagttgattctatatgatttatagcagtgtccttgacctcttcgactccttcaatccttcatcctcctcttccacaagattccctgaggtctgcctaatgtttagctgtgggtctctgaatttgttttcatcagtttctgagtggagcgtctcaggtgacagctatgatatgtacctttctggaagtatagcagaatatctttaatagtgtcaggggtaggtgttctctcatggcatgggtctcaagacagcccagtcattgattagccatccctccagcttttgctccatctttactcttgaatagcttgttggcaagataaattgtctaaggctttgtggctgggttggtttacccattgctctctggaagtcttttctggttctaggagatggccgtttcagactccacattccccattgctaggaattgtagctagagtgaccctcatagattcctggtagtttccatttcctagcttatcccagagatgcacctccaccaactcatgtttttgttcatgtattctctccttcctagacttgatccttcctcctcccctctcacatgatccctcactaccctccctctcttttccctttttagtgatatctaagcatcacccattgggatctccttgtttatttagcttctattgatctatggatggtagcatagttattctgtagtttatggctaatatcacttataagtgtgtaaataccatgtatgcac

SEQ ID NO: 3639 - DNA, 3200 bp, mus musculus
catcaaatatgagctattatgtgatacaaagatatgttcagacatcagcttcttcactaacctacagtaatacaggaatgacactcaagttagcttgtcttgagattggcacctgactcaactctgagattttataaaacctttcttatttttcaaccagattggacaagagacaataaccaagaatgaaaaaccgaacagtaacaactttcattttgctgggtctgacagatgacattaggctgcaaactctactttttatctttctgcttttttcttacatgttgagtttatctggtaacctaaccatcatcaccctcactctgattgacccccatcttaaaacacctatgtatattttcctcaaaaatttctccttcttagaaatttcacttacaactgcttgtattcccagatttctatacagcctatcatctggggataagtccattgcctatgctgcttgtatcagtcaactgttgtttatagacatctttgcagttacagaattttttctcttggctatcatgtcctatgatcgctatgtggccatctgtaaacctctgcattacatgaccatcatgaatagcagagtctgcaagaacttcatcttcttctgttgggtagcagcactgatcatcgttctcccaccaattagcctaggtttgggcctggaattctgtgactcagatattgttgaccatttttgttgtgatgcagctcctctcctgaaaatctcttgttcagacacatggttgatagaacagatggtgatagctggtgcggtgttgacattcatcatcacctttgtgtgtgttgtcctttcttatggttatatcatcaagaccattctgagatttccctctgccaagcaaaggaaaaaggccttttccacctgttcttcccacatgattgttgtttccattacttatggtagctgcatcttcatttatgtcaaaccttcatccaaggataatgtagctatcaataaagggatttcacttattattgtatcaatttcaccaatgttgaatccctttatttatgcactgagaaacaagcaagtaaagcaagctttcaattactcaattaaaaaagttgcatttctctcaaagatgtaaaaaacaaatgaagaattctaaacaaagtagggtgaatgattggaaaatctgaagctttgttatagtattattcaatatctttgttttttaatcttcttatgcttacactttctcctttaacttgtatactatgagcatgactttgtctatctctattaaaaccaaactttttgaatatgtttagtcttgcagtcaacctgaaattgttgtctgactgttattcctgagaataaagtagattgtggttttataccatgtttcccacactttcatgtgtgtctttttattttacattgtaactaatcaaatgagcacagaagttatatgtacatataaaaatattcattatccatttgccaccaagaaaacagatggcaaggtaaaactggaagggaaaaaattagaaactcaagcaagatactcagaagcaaatctgacctcagaatacaggagatggaaaagagaatcttaggaatagacagaatgatcggataccttggttggagaaaatgtgaaatcatgtaaaacgaaaaatccaggcctaaacttccaagaaatctgggaatctctgaagagaccaaatctcacaataataggaatagaagaagtagaaaaaaaacaatcaaagacacagaaaatattttcaacaaaataatagaataaacttactgacctctcagggtacaaggaacatacagaataccaaataccccggacaagaaaagtaattcctcacagcaccaaataatgaaaacctaaagcatcaagaacaacaagagaatattaaaagctgcaagggataaaaaagaccaaataacatgaaagcagacctattagaataaatctgaatattaatggatactctaaaagccagaagggctaaatagatattctagaaaccctaaaatataacagataccagccaagattactacaccagacaaaactttcaatcacaatagatgaagagagaaatgcattgtatttgataaagccaaactcaagcagtatgtgtccagtcctagagaaggcacttcaacttcaagaggttaaccattctcatgtaaacacaagggacaaaaattccaaaccagagacatgggcactatcccatctccttcaaatctgcacctccacctgtggttgatcaccacacctgcatccctcccacactccacagcacctgtctcccaggaggtctgccataaccagggacatagttgagacaccagccccaatacctaggacagatggaacccccacagagactagcatatgtgaattctattctactctgtctgagtcccactatccttctagtctgcaccttcctctgcaactggggcagatattgcccctggagccaaagcctgactgtctccaggagtttttccctaaccaagaacacaaatggtctgctgtaaccagggacaaacaaaacaaaacaaaacaaaacaaaaacaaaaacaaaaacaaaaaacccaaaacaacaacaacaaaaacaggctctaaccaggcacacaagagactcctccaaaatgagacagcactgcctacctcccaggaggcctgctctaaccaaggtcacagagccccccctgcatccaaggaggctagttccagttggagacacccaggccagttaacaccagagataactagatggtaagaggcaagctcaagaacataacaacagaagccaatacaattcagcaccaaccgaacccagttctcctaccacagccagccttggataccttaacatgcctgaaaagcaagattctgacctaaaattcaatttcatgaagatgatagaggtctttaaggaagatataagtagcccccttaaagaaatacaaggaaacaggcaaacatgtagaatcccttaaagaggaaacaaatgaatcccttagagaaatacaggaaaatataatcaagcaggtgaaggaattgaataaacagttcaagacctaaaaatggaaatagaaacaatgaaatcataaatggaggcaaccctggagatggacaacctagtaaagagatcatgagctacagatgcaagtatcaaaaacaaaacaa

SEQ ID NO: 3640 - DNA, 1000 bp, mus musculus
ggaagaggaacataagggtatgggcactatgaaggtgggcagaactggagacttgagggtagtgatgagcaccttgatgtgagtatccagttatgccacctgggaccatggtggggtcctggcctgtgctgccacatctgggtccctggccctgaagcaatagggatctgttaccaccaaatgccaggcagatgtccctgacctgggctgccatctagggacatgttgatgtctgtgggctatgtgtaactggccacaaccctcacctgggcagcatgggagagctggtcctgcccctagccagctgcggtactcaggagagcccctgggagcacactgcaggagttgcagatgagccaacccctgaagatatgagtgtgggagagctggtcctaccactcatctgggcagtgatgtagatgagggagagatacctcctgcctctcttgcccattgccacctatgggttatctgagtgggagagctaaccctgcccctcacctgctgcaacacttggggaaaggtcccctgcacctcacctgggaagcacagtgcatttggtccttgatgtgggggttgtgggtgagccagcctgtgtgcatgagaatgagagagctggccctgcctcttgtctgctatgtggtggcatcagtgagtgagagattcccctcccctccctttttgtcatcaccaccaaagtctggcgaagagttggcttaaatgagtcatgagagtaggagagcattccctgaacttatctaggcaacacaatagaactgatcctgatggctgcattttgtgtaagctggccagagagtgtgagtgtgtgagagccggtcctgccttttgtatgctggatagtggcattcctctgccccatcctttgccatttatagcaggcaggagagctggtcccaggagcataaaaatgggagaacgggccatgtccctcactgtctgtaatgcttgggaaagtgggcactgccccttgtttgggcag

SEQ ID NO: 3641 - DNA, 1400 bp, mus musculus
tgaaatgtgaaatacccaaacacaaagaaccagtgccaagaggcacttagtaaaattaatattgaccactatggtgatttatactacttctcaacttactatgatctagaatcatcttggatacaaatctttgagcattgtttgagattgtccagattaggttaactgagttgagatgatacattttaaatatgggtggcaccatttaaggagctggagtcacagactgtataaagaggagaaactagtgaaaaccacattcattgctctttgtttatttttaaaatattattatttttttattaggtattttgttcatttacatttccaatgctataccaaaagtctcccataccctcccccctcccctccccacccactcccacttcttggccctgtgttcccctgtactgaggcatataaagttagcaagaccagtggacctctctttccactgatggccgactaggccatcgtctgatacatatgcagctgaagacatgagctccagggggtactggttagttcatattgttgttccacctataggcttgcagatccctttaggtcctggggatccatcccataatcagcctccaaatgctgacaccattgcatacactagcaagattttgctgaaaggaccctgatatagctgtcatttgtgaggctatgcaggggcctagaaaacacagaagtggaggctcacagtcagctatgggatggatcacagggcccccaatggaggagctagagaaagtacccaaggagctctttgttttctgataaaatatgcaaggtgagcactggcctcagcttccccactttatgctttccttgttgctgtgaactaaatcctataagctgaaataaactctttacttgagttgctttttaaaatattttaatttaattaatttattttacttattcacttacatccagctcactgtccccttcctggtaaccccctcctacaatccttcctccctcccctctcacctctctccttctcctcatagagagttgtgagtcatctgacataggtgttgggaacagaaatctggtccttgctacaaatccatgataaataaagagattgtaagagcatgacacatctagtctggggaagatcacctcttgaaatgaaacacagcagcaaacttgccagcactaattcagtgactttatattttgacatagaacttcattgtcaaataaataaaatgtgagattaggaagatgtagctcagaaagtaactgagaactaatacaacgtttatcacacttcatttaatgtgaaatcgagtataaaagactatagctggctggtgctaaacaaataggtcaaacaactatcaagtttttaaatcaccactgaaaacagtatacactatttt

SEQ ID NO: 3642 - DNA, 1000 bp, mus musculus
aaaaccaaccaggtagcatacaccagctgatatgaggccccgaacacatatacagcagaggactaccgggtctgggttcagtcagagaagatgcacctaaccctcaagagactggaggccccatgcagtttagaggtttggtggggtagggggtgggtggtggagacatccttgtggagacaggggggcagggagtaggtatggaatgtggaacagtcagagggtggattgggaggtgaataaaatctggagtgtaaaaaaatatacaaatgaataagtaaataaataaataaaagattaagttaaaagtaaataaataaacttctaaagaggaaatagtggctttcatgtcttagcagtaaccaacagttctgtaattggacttaaagcctactcaacaggaagcaagtctactcaatgcctggtactataaacctagtcaattacccaggaatggtgaagtcattgatcttagaggagaatctactacagccactttactagacttgcctgattaccaactgcatgcaaatgttatcctatacacactgataagggtagctttcatccatcatcagagaaacatcttttattttttaagatttttatttattttatatatatgagtacactgtcgctgtcttcagacacaccggaagagggcatcagatctcattacagttggttgagagccaccatgtggttgctgggaaatgaactcaggacctctggaagagcagtcagtgttcttaacctctgatccatctcttcagtccctcaaagaaacaaacttctatgtgtcatggattaagaccatcacagaaaactaccagtggtcacaatagagtacaactgatcatgcagtatcctgccactgatggatacatagacaagacaacccttaaaggtaaggctcaggggatttcccagaatagggacaaacacatttctgcaagatccagagagcaggaagcttacttgtgtcttagagaaattacag

SEQ ID NO: 3643 - DNA, 1400 bp, mus musculus
taggagctgatttccaaaggactttttgtaaactgtatgttttgtaaatgtctaaaactttcatgtatttaagacatccacaaatctgatatcctacaaaactgataactgacacttaaaagtaaaacatcctcacagtagatttaatctatagttttattaaataattagtataagtcttatcaacattatatatattatatcaaaggaaaagatcaaatcctgtgttgttagctcacatattttcatactagaaagacaaactgtgggtttactgactgatatatctagtcatggtttcagcaaaattgtgtctcattttaatatcttgattaaagtttcattattactttataaaattactaaattatttccaagtaaatttaaggataaccaaaatttgggaaattcaaaatattctacattgacttttcatgtcttagcagtaaccaacagttctgtaattggacttaaagtctactcagcagcaagggagtctacttaatgcttggtactgaaaacctagtcaattacccaggaatggtgaggtcatggatcttagaggagaatctactacagccacttgactagacttgcctgattaccaacggcattaaatgttatccttattcccacaggtaagtgtagatttcacccatcatcacagaaaatatttgcagtggattgaggccaccactggtcaaaatagagtacaactgtgcttgcagtgtatagcccccaatagatacctagacaagacaaaccttacaggtaaggctctagggatttagtagaatagagacaaaaacattttaagatccagagaccaggaagcttatttgtgtcttgtagaaattacagggaagctacatcaaaaatagagtattgaagaaagatttaattcatcacctcattctttgatcttgtcttcatttgacacttatctttttactaatatatccatcttctttctcagcaaaacaatttagcatttctgtaatcaaatgtgggtatcccgttattttcaaacataggaaaaagatatttgtttttcaacaactgaatttggcaattggaaattatcaataagttatgcttgttcaaaatacattgatcataatcaacatttccagaggacttttttttctgttttaatcatatactaaaacatgtatattggatgctcttgtaaaaagtgacttctaacttttcgtgtttgaatgacttttaacatgactaggttttcacacattagccaacagggggactataattttctccacaattttccagtgtggtttcaagttcaaaacctagaaattaaaatataagtacctgaatcagacttcataacttctattttatgaatacaacattggtgagaaattataactgtttta

SEQ ID NO: 3644 - DNA, 1000 bp, mus musculus
aaagcactttttacctctgtattccttaagctataaatcagaggattcagcattgggatgataagtgtgtagaacacagctacaatcttgcttttctctggggaggagatggacccaggctgagcatacatgaagaacactgttccatagaataaactcaccactgctatatgagagccacatgtagagaaggttttactcctaccatgggtggaggggatcttcaggacagtggaaaggatgtaggcataggaaaccagaatgatagtgatggtggagatgatgatgagagcagagagaataaacaacacaatctcattcacaaaagtgtcaacacatgagatcttgatcagagctgggacatcacagaaaaagtggtccagcctgttttctccacagaaacgcaagctgaaggtgaatcctgtttgtatcatggagttgatgcatccacagatataggagccagccaccaaacgaatacaagctggctgagacatatggactgtgtacaggaaaggcgagcaaatggctgagaagcggtcataagccatcacagccaaaagaaaaccttctgttccaacgaaaagagcaaagaaaaagaactgtgttgcacattcattatatgaaattttcttttccttggagaaaatagtagctagagttttgggtgcaatgactgtggaatagcagagatctaaaaaggataaattttggagaaagaaatacattggtgtatgaagtctggagtctattttaatgacagttagcatgctgaggtttcccaataaaatgaccagatagataaacaagaacagtaagaataagggaacctgtgcttctggagacgtccagaatcccagcaggataaagtctgtcagctcagtatagttcctgctctgctccagtttcataactgagacctatctgaaaaaaatagatcacagagcagtgttgtcaacttgtggctcctattcagggaagacatctaatgtaaattaac

SEQ ID NO: 3645 - DNA, 1000 bp, mus musculus
ctatccacctagccacccccactctcctcatgtcctgcctcccacccccaccatgagggcacaccttttcctactgaggccaggcaaagtggcccagttaggggaacaagattcaaaggcatgtaacagatttggggacagcccccattccaggtgttagggaatctgcatgaagaccaaactgcacatctgctccataatggagaggagggctacgtccagcctgtgcatgctttttggttggtggatcagtctctgggagctgccaagggtccaggttagctgacttagttggtcttcctgtgaagtcctgtcctctttgggtccctcaatccttctcccaactcttccataagactcctaaaggtccatctaatgtttggctgtggatctctgcatctctttccattggctggtgggtggagcctctcagaggacagttatgctaggctcctatatggaagcataacagagtatcattaatagtgtcagggattagtgcttacccatgagatgggtcttaatttgggccagccatctgttggatcatttcctctgtctctgctctgtctttgttcctgtacattttgtaagcaggacacattttgagtcaaagtgttattagctataaagtacaggatagccatactataatacacagacccaaagaagccaagtaacaaggagggaacaaaggaggatgcttgaacctttctcagaagggaaaataaaatagctatcagagatggatggaaggagggaaatgagtgggagatggagtggagggggttcaggtgtagagagaacaggggagagagaaaacaaattgggagggcatctctaggatatttcagagacatgggtcaaaaggagacccaagactgtctatgggggtgactctaactaatactcttggcagtgggggatgtggatcctgaagtggccacttcctatagccagaaaggactcccaataaagaggcactgcattttataaactg

SEQ ID NO: 3646 - DNA, 1000 bp, mus musculus
attttctttatttacatttcaaatgttatcctctttcccagtcccccccccaaaaaaaaatcccctatcccatccctcttcccctgcttctgtgaggaatgttcccccacccactcacccactcccacctccccatcctggcattcccttacactggggcatcgaacctttacaggaccaagggcctctccttccattgatgcctgacaaggctatcctctgctacatattcggcaggagccatggatccctccatgtgtacttttttgttggtggtttagttcctgggtgctctgggaggtctggttggttgatattgctgttcttcatgtggggttgcaaaccttttcagcttcttcagtcctttctctaactcctccattgaggatgtcatgctcagttcaatggttggctgcaatcatctgtctctgtacttgctctctctcaaaggatgccattctttgtcgctaccatctccgaccagcagaaaagaagcgatgaaaccgatgtccttctcaaggcagtttattcaggaacttcataaatgtgtaggaaaaagcaaatgccccgacctctccagtccactccccctcaccccagtccacgtaggcacagttcattggctcaggactacattcggcacatcatccgatcttacatcatggtgcatctgcgcaatgcagctcaaggtacgtggctatcttgagggatatgaggaagtcaggtgccagtcataagacttggcagcagtcccaggtgccatcttggggccgcggccacacctgctcctcacaattcttcatagttaaccctaaaggaataaagtgagttaaactctatgtacggtctgccttcttgaggacatactattcacatggcttactcagattcttctctataggatatttgactatttgttaccatttatttatttaaaggtgtggttaatcatttatttatataagtacaatcacagatttggattctacaatgtaaatca

SEQ ID NO: 3647 - DNA, 1400 bp, mus musculus
tgctttttcaatacaaagaaataaaaagtattttaggttaatatgtcagttccacagatctaatcattttgcattgcataagtgcattgaactaagacattgcaactattaaaaatacataaaattattatgtgtcagtaaaagtatttaaagtgtaatccaaaaacatgtaggtcctaaagtcagactcccattgtgaaatttcagtactgaaagacatcagtcatgtggcccaatagaggaatgttgtgcctcgtgcctcagatttccacatgaaacatgaaaacctgttattgcagatataatacttcagtaaggattatattgtgttatatacgcaaacaagtttttttgtttttttttttgtttgtttgtttgttttttgttttttttttttagttttttgagacagggtttctctgtgtatccctggctgtcctggaattcactctgtagaccaggctggcctcgaactcagaaattgcctgcctctgcctcccaagtgctgggattcaaagcatacaccaccatgcccagcaagatcatttttaaaatgacaaccattcaattagtactagcttttaggataattatttatccaagtagcaatctaagggcataggcaaatgttccagattccatctagccttttctacatttatatcatccagtgtcctacagagagcatcatttcacattcataacatcctcttattaccaccttatgcatctccctctttgctcaatttccttatgctatgcaatggaatctcccatcctgagagcctatgcctgcctccctcccatttcctttcctgatgccctctttcccagggaatccaggctcctagggacagctgcagctgctccatctgcctgcagctgctgctcagaagcaggaaaacatgtcagcagtgctccctcccagggctgattttctttctcatttatccttgaaaatcttgttggactgtgccaactgcaggcacaatttcatctgccctctgtctgtccctgatgcttctgctcagggaccttttgtattcaggctccagctgagtcacacactctagactgtaacccagtgattccttctgatggctttcgtgagtattcaaaaccatggatgcccctatgggtcacctttactctttggtctgattctacattagtctgtttcaccattccagtgtagaagatatctcgctcttctaggtgaaactgtagatggtgatgaaggcaatgatgactacaaattattaaaggagagagtgccaggccttatactacataacatgtcaactatgcttattattataaaaaaaatcactaaatcttattgtaattatttttcagatgaagactttgatgtttagaaaattttgaaatttgtccaatgt

SEQ ID NO: 3648 - DNA, 1000 bp, mus musculus
gacaactcccctgcatcttacatcttccacccagaaaatgcagtgcctgtgcagtcctggtttgatgacatggcagatacagagttgctgaacctgattccagtcttcgaggagctaagtggaactgatgatgtctacaccagccttgggcagctgcgggccccttagccttcctgctccaagaaacggccatcccaacaggggactctgctacactgtgcctttgtggtcagcctcactgacagggtctgcaagtagccagggcgtgtgggacaaaagcaggtcacacgcagagcaggaaatcagaccaagacccagagctctctgcaccccgtgctcagttcccaggtggttgtgtgggtgtgtgtgcgtgcatgtgcccgtccggtaaactatggtcctgggtgcccagttgtgcagtagggggagaagctgaaagataaggactcaacccaagtcatttgtcttctttcctgctatgctgtgagctactgagctttacagccatgaaaactattgtaggctccctcgccaaaccatggctttccctcagcatcaagacctgtgccaaggagaagggagaggccggaggctgctttggatgcccagacacacatctttcagaaaacacagaaacctagccagcagctgcagacatgtttgggaatatgagagcatgttcgcagacccaccaggttctgtgtcctatgggctacacctggctccagcaagaatgcctgccatgggcacttctctgtacccgggctccagtgccaggccagcctctcactcccaagccatagtcctactcccatgggaaaggaggtcttctctctgccctggaggaggacatatagctgatttctgttcttttaactcttaaaaatctctttctaaacttggagtggtttatattcgcccgagctccagtcctgggcctgaggtttgtgtgggaagcgctggggtacaaagaaaatgcaaatgttcaaaaaaaaaaaaa

SEQ ID NO: 3649 - DNA, 1200 bp, mus musculus
tgttttgttttttcgagactgggtttctctgtgtacaccaggctggcctcaaactcagatgtccgcctgcctctgcctcccaagtgctgggctgaaaggcgtgggtcaccaccgcccagctgtgtttttttttttttttttctgattggcgagcacagctgagtgggcggggccggtgattgacaggcagattgaggtcgtggctacataaccatgtcatccccctgcctcagctccttccttactcaagggaatccccctgccttagggtgaccaaagctgagtgatagggctggcccaagtacaagggcttctgctctggcaacaccctggcaggtgacctgaacaggaggtctaaacagctgtttggtgcctgtctatttgcaatagctgtggtcctctaacctgtgcctgtgagccaccaagagtgaacggaaactagaagcattgccaccaacaactggagcagtgaccacactgaagtttctctgtcgagggggaaggggagtaaggagaaaaaaaaaaaaaaaaggcaagtaagcaagcaagccagcaagcacaggagcacactctcgtggaggcccacaccctccctgtgcctacccaagatgtgtcagtcagagaagcatccaggaccggagctccaagcagcagcaaaatggtgagatgctgcccatgagacctaaccctcaatgtaccccggcatagtttcaggagggtcagacaccaagtccagtggcctcaggggcagggggagtgactaaaggggcttggagagggagtcctctgtgccctgagtaggagactcacttcaggtacccatggctctggctgggggaatggggtaaggcaggggaagcagtgggcttctatcctgtgtcttggtctttggcaagggcaccgaggccccctttttcctccctagacccctgcttcctctaccagatcctcccccaagctcttctggactggcgtctgcgcttctgcagtgacttgggcagggcagcccacaggagaatgctgatttgtctttgcttggtccctgccacctcctcttgttttttagagacatagtggggtcctgtggaagacaaaggaggagagcaggacagttggtgtgctgtggtcttagcctgtgctgctcaccagttctctgttgcaatccccttttgttctttgctttgctcagtttctaggaga

SEQ ID NO: 3650 - DNA, 1200 bp, mus musculus; identical to SEQ ID NO: 3649

SEQ ID NO: 3651 - DNA, 1000 bp, mus musculus
tgttatagcattaagaaatagactaggagggcatgcacggcgcggacatgctgccccagccctacctagatgccagctgtcccatgctacccactgcgctggtgagtttcaaccgctcccccagcgcacatccaggaactggagccttgccacccgcggcgaccacgggccggggagcagcgtccagcctgcgcaaaaggaaggcatccccggagcctccagactcagctgaaagcgcactgaagctcggtgaggagcagcagaggcagcagtggatggcaaaccagagctaggcgctgaagctcacgatgtctgtggcggggctttgtggcgcccggacacgcagcaggggtgaccgcctccgccccctccacccctgggacctcattccaatcggaccaccccgccggagtcagcccctcagaacggtccgtcccccatggctgccctcatgtcggtagcagacagtttgggcacagctcattcgcccaaggtcggcagtttagtgcactcgaccactacatctgctaggcgaaacagcagcagtccggtgtctcccgcctccgtgccggggcagtgtcgcctggcatctcgcaatggggacctgaatttacaggtggcgcccccgccacctagcgcctacccgggcatagaccaagtacacccccaaaccattccggattccccaatggccaacagcggatccctctgctgtgccatttgccacgaacgtttggaggacacgcatttcgttcagtgtctgtccgttcctagccacaaattttgtttcccttgttctagagagagtatcaaggcccagggggccacaggtgaggtgtaatgccccagcggagagaaatgcccgagagagacccttgaaccgcagggcagcgacctcctttgccctagaccacctcttcttcaatctagagggcccttcccccacctgcctccacctaccctatccaccaagatgtagaattgtgaaaataactgcaaa

SEQ ID NO: 3652 - DNA, 1000 bp, mus musculus
tcaaccaccacggagactgcttattcctacactttagggaggtcatcaagggattctggtctagcgtagttatcacaattgcacttcaagcactgtgctctaataagggcaccatgtaaattggaagcagatgcatcagtctccagtgattttaatactgtggataaagtgaaggctaagataatgccaagggtaatactggactgggagtcagaaggactcacttctaccactgtgtcacctaggaattgctaagtacttaaacaacttctgtcctctcatttcaaaaagtggtgttgactatgttggtcatcggcatacatgtatatgaaagtgctttgaacctgtaaagtgctataaaaagaggagattaccatgtaggttctatcttgatatatcaagaggccttttcaggaatctggttgaagccttgtgagatggttaggtaaagggattcctcagtagaatttcttaaattggtgtgaaaagttttggttcctgagtaacccgaagatgatactatgaggaattcaaaatgccttggttttgatcccaatgggtcagaatatctgctttgtcatttagtagacagctacagattttgaagtaggaaaagaacaagagtccagtggccttgacaggatcctaggcagtttatgaaacttcaatcatttgagattgtggagtagggtccaatgctgttctcagagatgcctttcttcagacagtgttgacaatataaacaaaacaaaatcccctggtccaaatttactatgtgtctctgaagaataaactgcagaaatgaactgtacatttatggaataaacctggcctttgttgtgataaaatagcttcagttatttggcttgaagactcttgactgcactataaagggctgtgctgaatctgggcagagtaggacaggagtggaggtaaaggccacatcatgatggctgaatgcttcttgggtcacagtggtccactggaatggtgtcttctt

SEQ ID NO: 3653 - DNA, 1000 bp, mus musculus; identical to SEQ ID NO: 3652

SEQ ID NO: 3654 - DNA, 1000 bp, mus musculus
tataaaccaggctggcctcaaactcacagagattacctccccatccctcccaagtcctgggtctgaaggcatgcaccaccatacccagctcatcctgcttttctgagcaagttatcttctccttgaaggcctctgagcccatgcctgtggttcatgttcctggcctggcacaattctgggggttcactaatcattcaggttgctgttgctcaggtatgtaggttggtagaaatgtggcttgtttggtagttggttaactcattgcttggctgacagtttgtctgagtagctaagtaactggggatgggttgaaggattgactcggatggctgactggcttttagcttggttggttgtctggctagcatcttgatgactggcatgttggctggctggctggtttgttctgcagctggatttgcatggccagctggttatttggagattgactctgtctgaatggtttgtagctggatagagaactggatcagctacttggttggtggctgattaattttctgtctggccaacttgttaagtttggtgaatcagtaaattgtttgttagcaggctacctagtttgttggcacttggctggatgttggtagactggttagcttattgattgtctgatgaggaggctgatgacgggctcacttgtgcagtgggtaggtgactgatagatggctagttagttggctttcttgggtgtgggtctgagctgaccaggttcattatgacttctgtatcactggctctgtccattgtggaaatgtggcccagtggcttgatctctccctgtatctttcagccacgaaactgttcccggtgggctacaatctcatgaagccattcctgagtgaggacacacgaaggaagatcgtggtgttgggaagtagtaagtccttccagagccctgcccccaggcttcacaccgaggctgtagagtaaggctggtccatccccatgcttcacacctaagttgtagagtaaggctggt

SEQ ID NO: 3655 - DNA, 1600 bp, mus musculus
agcaacagacacagaagccctgaaattggcaagatagacgtcagtgttagcagaactagcttcactgatttaaaaaaatagaggtgcacaatgctttggccactccttgaacctgtgtgtctgccaatgttctgaccaggtgtgtgcccattgctgcaccttcattagactctttccttgtacccctcccatacccatttcttgaaaatagacattgtttagatctaataagtcccacctcagtttcaggttccccgaataactgggaaataccccaagccttgtttgaactaaccaaccagctcgcttctcgcttctgtaaccgcgctttttgctccccagccctataaaaagggtaaacaccccacactcggcgcgccagtcctccgatagactgagtcgcccgggtacccgtattcccaataaagcctcttgctgtttgcatccgaatcgtggactcgctgatccttgggagggtctcctcagattgattgactgcccacctcgggggtctttcacagtgagcccactgcactgtagatacagtcaatgccatagaactctgtgtctacacaggaatatgtcacgtatttctttatcataattttgaaaggcagtatgtccttcactttctctttctgtctttgcctctatttctctgttttgtctctgcatattatgtttggaagtgtctcctaaaggcccacctgtcaaaggctctatcccagcgcctggcactatggcgagatggattatttaaggggtgagacctggtgaaagggagttgggtcagtggagacccccatcctctcgtcctctgcccccccccccagctgcatgtgtgaggtgaacaagtctcctccaaaacttgctcctaccaaaggcccaagcaaccaggccaggaaatcatggactttgtccatgcgggtatgcatgttcacacatgtgggtgtacatgtatgtgtgtgggtgcatgtggaggtcagaggttgacactgggtgtcttcctcaattactctcagccttactcatgagttctcacttgaacccagaatgcactgcttcagccaaccagcttgctctggcatggcctgcccctcctcctgagcactgggctcgtaggctgacaccgtgcctgcttgtcatgcctgcctttacatgggtgctggggatctgagcctcagtctcctgtgagagacatgcactttgcccactgagccacctctgcagtccctggactgacacctctgtagcagtgagctaagacatatttctccttacttgattaactcacagcaatggacactaacactctctgtgtctctgtctctgtcgtctctctgtctctctctctctctctgtgtgtgtgtgtgtgtgtgtgtgtgtgtgtgtgtgtgtatgtgatcactggcttcggaggaccctattgccatttacaacgatgcttacatggctctggggaaaaacttaaggagtggaactgagatcatagaaggagccatcttggaaatgaatcccaagtcaagccctggatagacacagcccagactgtagtcaccattgccctaggcaaggtcaggatgccctaggcaaggtcagg

SEQ ID NO: 3656 - DNA, 1000 bp, mus musculus
tcctgtagagacctcagggaagggtcactgttctgggagcatttaggcatggctccgccctcataccccgccccaccgcgcaaggcagaggcagagggccagcgacagacgtctattctctgctcctattggctccgggcacacgcgccacacacgctggttggccgcctggccgttgccctggagacgcgtgctactgtgtttccgcgtctctctaagagtttggagtcggtcttggagccagccctcttggtacgaagttcagctacagggggtgtaaatcccagatccggagagcagggagtcttacagtgacctagatgcctgccaaaccctgcggcccgtgatgacctatagcacacttaatatgcttctgttgtctaccctgcgtgcacgtgcccttgctgtttaccccgcttaacgtgcccggtgctgtctacccgcttgccggatcccctatggtgtactcactgaatgtgctctggctgtatattctgtcgcatgtgcccctgctgggtatccagcgtggacacggtgctgtcctgtgaccgcagtggacctgccagctcctgggcgtgaggcgtctgcaggtgtgtcagctggaagcgggtggaaccacaagcgcagtgactttgcccctgcagcctctgctcccatcaggcggattggcagcgcccagataaccagagaacccgggcttagcagcacatttctcttcccgacgcggacttgctcatagcaccaagccatgaggaacaccagcaaggaagtgcagagcacctcttaccgctatgctccctgcggtgagtgaggatgggtgagagtggtggggtggtaaaagttggaagggtaggtgcctctgcttttgatgtgtccgtgctgggcttgaagccagggcctttgcatgcaaggctacagaaggtaggagcccattgaaattcgttttgtagcaagttaagtctcctaactcccacatcttgcttggcagtggctgtagcct

SEQ ID NO: 3657 - DNA, 1000 bp, mus musculus; identical to SEQ ID NO: 3656

SEQ ID NO: 3658 - DNA, 1600 bp, mus musculus
tttggagctgagacgaaaggatggaccatgtagagactgccatatccagggatccaccccataatcagcttccaaacgctgacaccattgcatacactagcaagattttatcgaaaggacccagatgtagctgtctcttgtgagagtatgccggggcctagcaaaaacagaagtggatgctcacagtcagctaatggatggatcacagggctcccaatggaggagctagagaaagtacccaaggagctaaagggatctgcaaccctataggtataacaacattatgaactaaccagtaccccggagctcttgactctagctgcatatgtatcaaaagatggcctagtcggccatcattggaaagagaggcccattggacttgcaaactttatatgccccagtacaggggaacgccaggccaaaaaggggagtgggtgggtaggggagtgggggggagtgggtatgggggacttttggtatagcattggaaatgtaaatgagctaaatacctaataaaaaatggaaaaaaaagagagagattgaagaaattatccaagttcagtagcatgccctgtgggtgcagtgctgggaaagcagagacaagtgtctcttacatccatttagccattcctaattgggaagcctcaagacttcatctcaaaaatcaagttgggccttatttataatagccagaagctggaaagaaccagatgttcctcaacagaggaatggatacagaaaatgtgatacatttacaaaatggagtcttacatgtgtttgcgcgaccggccaggaagaacacaacaaaccggaatcttctgcggcaaggctttattgcttatatcttcaggagccagagagcaagagcaagaaagcaagagagcaagagagcaagagagcaagagagcaagagagagcaagagagagcaagagagagaatggtgaaaccccgtcccttttaaggagaattatcctccgcctaggacgtgtcactccctgattggctgcagcccattggccgagttgtcgtcacggggaaggcagagcacatggggtggagaactacccttggcacatgtgcagattatttgtttaccacttagaacacaggatgtcagcgccatcttgtaacggcgaatgtgagggcggcttcccacatatcccccttttcttttaataagagcaataggccacccatattaatgagagtggagatagaggtcaaatccccagtgtgcaggtaaaggagccgtacacataacctccttccaggctcatcacccagaggggtcctggtctggtcccgtgtcgtttttcctggggagaaggacacttggacactcaaccttcttgaaagatgacatgtctccctagaataggctcatatatgccgcagagcccttctactgcagtgcttagccgtgcaactctctcgggctgctgaagcacactcactctatcccgtgcaatgagactagcctcgtggggtgcaagagctgaatggccagcgacctattgcttaagcatagatatatcaggggaagcaccatgttctagagctgcaagtgcctgggcaataaccaccttgtctctcctagtt

SEQ ID NO: 3659 - DNA, 1400 bp, mus musculus
tacctattatccttaggtttggtcttctcattgtgtcctggatttcctggatgttttagattagggtcttttggccttttgcattttctttgattgttatgtcaatgttttctatggtatcttctgcacctgatattctctcttctatctcttgtattctgttggtgatgctttcatctatggctcctgacttcttttctagggtttctatttctagaattgtctccctttgagatttctttactgtttctacttccatttttaaatcctggatggttttgttcaattttttcacctgtttggatgtggatgtgttttcctagaattctgctctcctgaattcctttaatggatttatttatgtccttcttataatcctccatcatcatcacaagaagtgactttggatccatatcttgcttttatggtgtgatggtgtatccaggacttgctatggtgggaaagctgggttctgatgatgccaagtaaccttggtttctgttccttctgttcttatgcttgtttcctgccatctgattatctcacgtgctccctgccctcgatatatttgattggagcctgcccttcctgtaattcccggttgagtcagaactcctcagagtctagctgttttctgtgatcctgtgattctgagatcctgtgatcctgagattctgggtgtgtcagagttcttgtcagtcaagattcctctgagacctggagatcccgatgtgaccaagctccttgtgatcctgggatcctggaatcctaagatcctaggcatgttagagagccttgaagtagtacctcttctgggaaacatagggctgtctgctgagtttgaaaccaaggtagaccagtgctaaccagtaggagccaaagccactggtcaggcagggttcctttgtcactgctcctgttggccccaggctgtctaggttgtgttggaacagatgttgtgtttcactcaccagtgatcctaagatcttgagcatgctaatttgactggggattggagaattctctggggaccttgggacagtctacagagttcatgcccaaggtcagaactaacgtatgttatgactcaaatgaacctaacaaatatatacagaccatatcactcagacataaaggaatataaattcttttcagcaccttgcagaactttcttcaaaatccataccgttagttacaaagcaagtctcaaaggatacaagaaagctgaaataaccctctgtatcataaaagacaaccatagataaaagctatacttcaacaacaacagaaccacagaaagcctacaaaatcatggacaataaataactctgtactcaatgatgatttggtcaagaaaaatttaaagaaaaatattaaagaatttctagaattcaatggca

SEQ ID NO: 3660 - DNA, 1200 bp, mus musculus
gtgtttcctctttaagggcttctagctgtttacttttgttctcctctacttctttaagggagttatttatttccttcttaaagtcctccatcatcatcttgacaagtgactttagatccatatcttgcttttctggtgtgatggtgtatccagaacttgctatggtgggaaagtttggttctgatgatgccaagtaaccttggtttctgttgcttctgttcttatgcttgcctcctgccatctgattatctcaagtgcttgctgttgtcaatatttctgattggagcctgtccttcctacaatcccagtttattcaggactcctcagagtccagctttctctgtgatcctttgattgtggactcctgtgaacctgagattctgggtgtgtcagagttcttggcagtcaagattcctctgagaccctgagatcctggtgtgaccaagctcctgttatcctgggatcctggaatcctaagatcctgggcatgttacagtgcctggaagtggtgtctcctctggggaccatggggctgtctaatgtgttcgaaaccaaggtataccagcaccaatcataaggaacccgagccactggtcaggcagggctccggtgtccttgctcctgctgtcacaggcccgtcacaattggtttggaacagattttgtgttccactcagtagtgaccctgagatcacgtgaagagtcctctggggactgtgggactgtccaccgaattcgcacccaaggtgacctggggctggtgctgaccggaagggacttgagcccctgcccaccttctttaagaagtgttcaaacatctttgcaccttgccatgacttgtggttgacatcttctctaatctatcagttacatgtatctcacttttccatatcctgtatcattttcagatcatagcagttcacaggatcacccctttctgattttattcttgtatcaacctagtgtctcttgacctttggaaagtgagtataagtctctcctgctctggctctgataggacttaatgccattactgtgacttgcctgtagtcctcccactatttttgtgattttaattccagcaactgcaattgagttcaagagtttctcagcactatcaataaaccagaacaaatagtattcaatgacatcaacaatcaaaatgcacattttcaaattgaacagctgttagcctctactg

SEQ ID NO: 3661 - DNA, 1200 bp, mus musculus
atataaaggaacactttattataaatgttcaaattccttacttctttttagggctaggaactcaactcagggctctttacatgctaggcacagttctctacaacttttgctccattgtgttctaaatttgccttttattttacatctgcatttgtgagtgggcacattagcaattctcttcccttggattgaaggaaactggagcagataagaggacatgagatctctggcttctctggtctaagatatagtaattaaactccattttactctctcatgtgcattcaggaacatctccaaagaaaagagaaattgatttgataggataaaagtggtcattgattgaccaataggtttacagtgatgaaatgttacccacttgctttatcggtgaatgctgggccacaattgtagcttgccggtatcgggctatcagcctgtacattgaaatatattcagtccattgctctgtaagccagagattcctgggtggagcctcccagaacaacgagcacaggagaacctagcatgcctggatctgacattcccaggacatataatacaacatgtccagcagcctgcctgcttgggtttcaagtcagtgtggtgatagccccttccaaatagggaagaggataggctggctgtgtgctgtgaaggcaagcattaggtttcagtccaggaggaagagcgtatgggatccctggtgtcaggttggccctggcatggttccctccggaaacttcagatactcaggttggtgctgaaataccctgtttcattagccagtgtttccctagtggaacacccttatgtctgagatacaagggcagaacatatacaaagctttattttagtttttgtgtgtatgtgtgtgtttgtctctggattgctatccttcctgactatattaaccaaagcagagtgctataggaactcttggtcttagagtatttgtaaagagactaatataacagatttcaagttagaatctccatggatagacacacagcttgtaattttctgggctggaaagctagggcatattacttgaaacttctgaagtaattttttaaatctataaaataaggataatactattagtgataattaaaagcttatataattgtgatgaattgagaaaatccatgctcttgcttcagccataattgctgggctatgtttgctgtttgatggcct

SEQ ID NO: 3662 - DNA, 1400 bp, mus musculus
ttattgtgtctacttccctttttaggtctagtatggtttttttcatttccatcacctgtttggatgtgttttcctgtttttctttaaggacttgtaactctttagcagtgttctcctgtatttctttaagtgagttattaaattccttctttatgtcctctaccatcatcatgagatatgcttttaaatccaggtctaccttttcaggtgtgttagtgtgccctggactgggcgaagtggtcattctgggttctgatgatggtgagtggtcctggtttctgttagtaggattcttacatttacctttcgccatctggcaatctctggagttagttgttatagttgtctttgtttagagattgttcctctgttgcttttgttaccctctatcagcagatgtgggagactagctctctcctctgagtttcagtgttcagagcagtctctgcaggcaagctctcctctttcagggaaggtgcacagttatctggtgtttggacctcctcctagctgaagatgaaggcccaaaacaggatctttcccagaagctgtgttgctttggccaggaaggtagccggttgtctggagccgaagatggtgccgcctcagaagctctgtggctctcgcctgtcccagaaactgctggcctctgtattccacaccctcacctgtgcagtctgccctccgaggagtcccggagccaaggtggctcccgcggagcgtgaggcagaaacctctcgggccgggcggacccctgtgctctcaccaggaaggtggccagttgtctggagccaaagatggcgccgccaaggcaactcttataaaggacaacacttacttgaggcttgcttccaagttcagagcaccagtccattatcatcaaggtaggagcatggcagcatcctggcaggcatgactcaggaagtgctgcgagttctacatctcattccaaagccaaacaggagaagactggcttccagacaactaggaggaatgtctcaaaccccaccttcaaagtgacagacttcttccaacaaggccacacctactccaataaggcaataagacacctcttaatgatgctactccattggccaagcatattcaaaccaccacaacagagaaaacccatatcaatggaaatctggatgtgaacaatttaagaacttaattaaataggaacctcagagtcatgcctcattaacaggatgaaagagacagaagagagaatatcagacattgaagacacaatagaaaaatatacaccctagtcaaagaaatgttaaatctaaaaattattccaggtataaaatgttatgaatatatgggacactacaaaagaccaaatctatgaatattaggaatagaggaaaaagaagaaacccaagtcaaaggcagag

SEQ ID NO: 3663 - DNA, 1200 bp, mus musculus
tggataaatagctgtatatttattactcactttaaatctctctctcttttttgggggggggttgttggttttttttaagacaggatttttctgtataaccctggctgtcctggaactcactttgtagaccaggctggccttgaactcagaaatctgcctgcctctgcctcccatgtgctgggattaaagacgtgcaccaccgccacctggctaaatatatctttttgcattggtactagtgtatatgaattctttgtttcaggtgaggtattttgaatcttgccatattgagtaaatccctatggtccttaaacatgcatgtattatgctgtctccaaatccaagttaaatgctctgctttagatggttttgatttgtactccaaagtaaagaggatcctgctagcatatggacaagagaaggccagcttccctattcagcttcactgacacccagtggagatgtttctccttttcctatgtggccacttctgtcatcatgcaggtattactcttaatgaactggagaaaactcttatagttgtctctgaaacctcctttctctctactctagtgggaagaacagaagtttgataatttaaagaagagtagaaaatattaatctatgcctattaacacaattagcctattaacctatagacacaatcggagaatatgaaatctagtgaaacaagttagatgaagtggagaaaaacattttcattcatgtgtgcaatcagtagggaacatttagcagtgtgtaattgaaatgcttagaaatggagaatgtgataataagtagaacagaaagaaattaacagaatatcctaggtgaggatgaaagtggagatggggagaattacaaaatagaaatgtggggccaggcagtggtggcgcatgcttttaatcctagcacttgggaggcaggggcagaggcagaggcagtcagatttctgagttctaggccagcctggtctacaaagtgagatccaggacagccagggctatacagagaaaccctgtctcaaaagaaccaaaaaaaaaaaaaaaaagaaaaaaaaaaagaaaaaaagaaagaaagaaagaaagaaagaaagaaagaaagaaaaatgggggtaggggggatatgaccaatacgtatgatatatttctttgtaagatatcataatgagcactattaatttaataatgaatatctgga

SEQ ID NO: 3664 - DNA, 1000 bp, mus musculus
agaaggcagaaatagaaattgtggagggaagggaatctttatgctggcttacttagcttcttatactgcccagaactatttactaatgggatagtgctgccagcaatgcctgaaccctcttacaccaaataatactcaaggcaattcttcacacgtgcctagaaaacaacataataaagacattattcagttattcaaggctgtggaaagatgacaaagccaattaagataccagatatacaagaataataaattggcccaatagcattaactagcttgttttaaacactaattttgttaaaattgaagaacaattgggagaatataaaacatcttataaaatatttgattgcttgaaggcataaatatgacaaaactttataattgagattttaagtatttaagtatttattatcattttatgtgtattagtattttgcctgcaggtaagtaaatgcactatttgaaatcattgcccacagagaacagaagaccagaaggacagctgtgtggtgtgagcagcaagctagtcctctataagaacagtgaatagttagtaactttttcaggccatggatgtgtctgtgtgtgtgtgtgtgtgtgtgtgtgtgtgtgtgtgtgtgtgtgtgtgtgagtgtgagtgtatgttagtagggagctacacccagagtcagtggtgttccccttctcaaaagataaggggaaggaggaaatgggggagggtttgtttgaggaagtactaggaggaaaggctaggaagggctgatgttctactacatagtgaataaataaatacagtaaaaaagtaaaaaggaaacattaaaaatgcacacacacacaaattgaagcattttttttaatttgtggataagacttttgattagaaactgtaatcattataagaaaataatgaattccagtgtaaaacctcagagtttgcttttgtgaaacataattagcagatattaaaacatttttgtctagcatgttattttaagaa

SEQ ID NO: 3665 - DNA, 1000 bp, mus musculus
tttcttagatattttcatttacatttcaaatgctattcccaaagcccctatatcttccccccaccctgctccccaacccacccactcctgcttcctggccctggtattcccctgtactggggcatatgatctttgcaagaccaagggcctcttctcccattgatggcagactaggccatcctctgctacatatgcaactagagacacagctctggggggtactggttagttcatattattgttcctcctatagggttacagacaccttaagccctttgggtactttctctagttccttcattagaggccctgtgttccatccaatagatgactattagcatccacttctatatttgccaggcactggcatagtctcacaggagagagctatgtcagaatggggaacaaaattcccatggaagtacttacagagacaaagttcaaaggtgagattgaaggaaggaccatccagagactgcccaactccgggatccatcccatatccaaccaccaaacccagacactattgcatatgccagaaagattttgctgaccagaccggttaattcttaacaacaggtttattttttctggttcaaggacagggcatttttttttctgatagacttgggttgcttttcatttagcaataaaagggtagatgcttttttgggcccaacaaaagatgaatgtatgtatacacatatgagtgtttatacatattttttgtacacaagcttttcctttagccagtgtgatcctcttctcctggttcaataaagatcaataattctacatttctctcccacctggacagcgagagtctatggttctaagcaaaagagaaagaagcccggagcctagcaaacacctaagtggatgctcacagtcagctattggatgaatcacagggcccccaatggaggagctagagaaagtacctaaggagctaaagggatctgcaaccctataggtggaacaacattatgaattcaccagt

SEQ ID NO: 3666 - DNA, 1200 bp, mus musculus
tgataagttgttcactttccatacttttataagctttctgttgtccctgttgctgctgatatccagttttaatccatggaagtcaaataggatgcaacatattgattataatattcttgtgtctcttaagactagctttatattcaaggatgtggtcaattttagagaacgtttcaggagttgctgagaagaaagttgtgatggtttacatatgtttggcctagggagtggcaatattaggaggtgtatcattgttagaataggtgtggcactgtgggtgttggctttgataacctagttctagctgcctgaaagtcagtactctgatagcagcattcagatgaagatgtagaactccttatgcaccatgcctgcctggatgttgccatgttcctgccattatggtaatggaatgaacctctgaacctgtaagccagcccaaattaaatgttgtccttataagagatggtttgggcatgctacctcttcacacaagtaaaacccaaactaagtcagaagtgtattcttttcttcttttgtgtttgtgtgcaatattctgtaaacatgatatgtcgatttggttaagggtatcagctacttccaactttactctgtttagttttttttttccaggatgacctatgaattgttgagagtggtatattggattcacccactaactccatgtgaagtccagtttatggtttaagttatagcagtacttattttatcaactttgttgccagttttgctagagttactagccctggttcaactgaggcagtggaccattctccaatcatgagatcctgtttcaaaacaaaagccaaaaggaaaagatattttcaataggaagacactcaaattgcaatggtctgtggaaaacttgagactacattactcgtaaatgaatgggagttacccccttagttatattcagtcactccaagacaagagaccaatactggatagaatgaacagaaaaggacactgagacacagttagtgggaatgtaccgacacagccactagagcaagtagagaaaacattacacagaaaactagaaatagagctactacaaacatgaccctctaattctactcctgaatagatatctgattatgcttgcttcaatagcttactagataaaaggggtggtgttttcatgcaatttgcatgtaacgactagacatgttcttc

SEQ ID NO: 3667 - DNA, 1000 bp, mus musculus
aattaatgaataaaagagaataagaagtggaaagtgattttgaggaagacaggaagtgatagaaaattatataattatactatggtctaaaacattttaaacagtaattccaaatgaaaatacaaaaattacaaaagctgattaatttaaaaattaatttgttgaaattggctaggagtgaagaagtaatgctaaatttttataatctcgtatcagttaccttaatagtaatcctcatcttgttgtggttttgttttgttttattttttgagacaggggtttttgtagaacaatcttatccttgagattgctttgtagaccaagctggtcttgtactcaaagagatgtgcttgcctgtactttctgagtgctgggattaaaggcatgtgccaccacacctgactaacagtgattatatttatctgtggatgatttttatttgttaaatttactttgatgagaaatcagtttcttattaaattgaaatatgttgtagccagccagccagccagccagccagttcatcagaaacactgagcaagcattataatcacaacggatatcaggaattcctagtaagagattgtgaggagcaggtgtggcggcagtcccaagaaggccccagagactgcagctaagtcttatgacttgcacctgacttcctcacctgaatataagccacaaccaagctgcgcaggtgtaccaggatactggcaaatccattttggtagagatatgcccctgctgccctgattagctgaagctgtgtacctggtgaggttacgtggcctgctgtgagtggatgagggctgagagtatataagagtaagaggcccgggttagtgagaggattattattagtgggagatatagatgaagagaaagaagagagaggaagactgaagtttgctgaataaactgctgttagaaggactggtggtcgtgtcgttcttgctggtcgagagcagacgcgacaagagatccctaaaccccaaagttt

SEQ ID NO: 3668 - DNA, 1000 bp, mus musculus
ctcctcgtaaattatttctaaacaactctgggaataaatatttctttcccttttctctcagaattaagtttttctttcttttttgtttaaaaaattggatattttctttatttgcatttacatagctaagcataacaaaacccaataactccagatggaaatgttaaccagaatgcccaaccctttagagatagaatatggagataccacatccagtagatagacagccctcagtgaagggaagggggtcaccaacctaccttccaaatttttacacagaattgtttctgaataaaagaaattcagggacaaaaatggagcagagattgaaggataggtcatccagtgactggcccaatttgggatccatcccatggtcaggtaccaaacacttgcactattactaatgccatgttgtacttgcagacaggagcctatgatggctgtcatctgagaagctctaccatcagctgactgagacagattcagatacttacagccagccattggactgaaatagggaacccctatggcagaattaggggaaggactaaaggagctgaaagggtggcaaccccataggaagaccaatagtatccactaatatgggaaacctgtgttctcccagagactaagccaccaaccaaagaacatacatgggctcattggaggcctgtggtacatttgtagcataggattatcctgtctggtatcaatgggagtgtatgtaccttaccctgtaaagacatgatggcccaggaaaggggaatgaaggaggtaggatgaggtggtagtgggtgcaagggtgagggggtatgtgaatggaagggtaggggaagcaccctctcataggacaaggagacagggtatagggtgaagaattcttggcttggggactgggaagggggcaacatttggaatgtaaataaataagagaatttttttaaatggaaatacaaaatgagaccctcagtttaatctctgtaaccacatgaataaa

SEQ ID NO: 3669 - DNA, 1800 bp, mus musculus
tcttccatttctattattcttagttttcattttctcattgtgtcctgattttcctgaatattttgatttaggagctttttacacttcgttttttgttttttgtttgtttgtttgtttttggtttttggtttttgaccagtgtgttaatattttctatggtatcttctactcttgaaagtctctcttctatctcttgtactctgttggtaatcatttcagactcctgatctcttttctagattttcaatctccctttgtgacttctttattgtttttaatatccatttctagatcctgtatggttttgttcaattccttcacctgttttgttttgttttgttttgttttgttttgtttttcctgtgtttctttaaggggtttatgcctttactctttaaggcttctacctgtttacctatgttgttctctatttccttaaggtagctatttatgtccttcttaaagtcttctataatcaacaggagatatgattttatatctggatcttgtttttccagtgtgatggggtattcaagacctgctgtggtgggagaactgggttatgatgatgccaagtaaccttgatttctgttgtttatgtttttgaacatgcctcttcccatcgggttatgtgtaatgctgcctgcccctgctgtctctgactgtagcctgtccctcctgtgatcctggttgtatcagaactccttagagtccacctgtctctgtgtttctgtgaatctaggatcctgtgatggtgagatcctgggtatgtcagagcacctgggattcaagatttctctgggtgtgaccaaattcttgagatcctgtgatcctggcatgttagagcacctgggaatcaagcttcctctgggtgtttgggactgggtggtgtggagccaggacctaaggtctgctcatggcaccagctcagacaagaaagactatgagatacttttttgcacgtatgtattcatgtaagctcattcctagaaacctagtgtccatgaagctgatcagtagccttaatagtgtatttttatgtaaaatcttcagttttccatttttattattactggacataaattctctttatctttttcatttctttggggatattaatttttattctctattttattaatgctgaggagtaaatcaagagcctcatgaccactagctatgttatctagaatagagtaaaatacctatcaaaaatttaaaatgtaaacattaatttaagcaacattagaggtctgagtaggaattttctgctatatattgtattgtaataaatgatggatatgattattattagagtgttgtaattgttattctgcaaataccaagacattttaaaaatctcatttataggaaatgcaaaatatcttgtgtttggtaaataatgttttcaactttagcatactgaattaaaaacttgtcttcaaatgaaacatttagaaaatgtgcatgtaattaagagaacagaaaagagatattcttcatcaagctgaatcaattgaaaattatgttatatatagattttattttgagtcaacatttaatttgtttctggttatgaacctttttgaggctcaacgaaaatgattcataaatcctggaaacactaagaatcaaacatatctgcctgaactcaaatttaataataaaataaatatagcccagtgtttctatagttccttaagttttgtattggttattactataaaacacacacacacacacacacacacaaatacacaaaatttcttcaaaattaaaactatcttgaccaacctagga

SEQ ID NO: 3670 - DNA, 1000 bp, mus musculus
ttcttccaaaactttctaatatcttgactttatggcacagggtggggtctcgcctctcccagcgatcatacttgtaattagaaaaaggaggagtcttccaatactcttcccagcatgcctctctgatacacagcagcactaaaggagtaatcgttgatggttttcatacaggatctctctgtgttgcccaagctggccagcctcctggtcttctttcaccgtggtacagttacagactcgtgcacatgcctgggtagacgtctgaaagttaatgttatgacggaatcatgtcagtaacctatccgtacgtcccttcattaaagccagctcttgcatccttatgagtcggcataaggttgtgatcggctgcacatctgcactgactatttcactctatgacaccaattggtcacatctgtgaatatcaccactgactcgtcacctaattctctgaccactggaatgatttcgggctcatcatggacgttacaaagttttaacgtttgcgtgcctatcaatttttcattattagcaacaaatcctgtatatttcttaacttgtgctttttttttttttccttttttttcccgaattttttgttaggtattttcttcatttacatttcaaatgctatccaaaagtcccctataccctccccactcccacttcttggccctggtgttcccctgtaatggggcatataaagtttgcaagaccaaggggcctctcttcccaatgatggccgactaggccatcttctgatacatatgcagctagagacatgagctctgtggataccgattagttcatattgttgttccacctatagggttgcagaccccttcagctccttgggtactttctctagccaggtggtggtggcactcgcctttaatcccagcacttgagaggcagaggcaggcagatttctgagttcgaggccagcctggtcgacaaagtgagttccaggacagccagggctacacagagaaaccctgtc

SEQ ID NO: 3671 - DNA, 1400 bp, mus musculus
atataaaattgttagaacatacaaattcttaccatttacaaaacaagagcatacgccctaaatctgataagagaatgcatatttcaaatgaccaaaacatatcaaaacaaaagcagaaaaaaaaaaaaagaaagaaagaaaaagagtacttgacaaggatgaaaatggtactcaatcagatcaaacatttgataggatctttcctatctcaaatccagtgtaaataagcaggagtattattgattcctaaccaatattattggactttgacagaaatgcccataatgccctaatatcaatgctataaatactgttacttatccttactttaaattaattaattttttaccatccatattccattcctagcccccacaccccacaccccaatctaccctctgtctgctccacaccccacacctcctcccccctccctgtctccatgtggatggccccaccttcccaccccacctgatctctaaactccctggtccctccagtctcttgagggttaggtgcatcatgtctgaatgaacacagactcagaaatcctctaatgtatgtgtgttggtgtcctcagatcagttgatgtatggtgtctgtttggtggtccagtgcttgagagatctaggggttacagattgagactgctggtcctcctacaggattgccctgctcctcagcttctttcagccttccctaattcaacaacaggggtcagctgctatcgtcaattgattgggtgcaagtatctacttctgactttttcagctgagtgttgggtcttttggagggcagtcatgatagatcccttttttgtgagcactccatagcctaagtaatagtttcaggccttgggacctccccttgaactggatccaactttgggtctgtcactggaccttcttttcctcaggctcctctccatttccatccctgtaattctttcagacaggaacatttatgggtcagagatgtgactgtgggatggcaaccccatccctcactaggtgccctgtcttcctgctggaggtggactctgttaagttccctctccgtactgtcaggcatttcacctaaggtctctccctttgagtcctgagagtctcttacctcccaggtctctggggcattctggagtgtccccccaacctcctatttcctgaagatgtctgtttccatttcttctgctggctctcagttgcttcagtctttttcccttaaccaataccagctcaggttcccctctctccccaaccccccaccccatctacttcccatcccacttccctccctctctcccaacttgtgactgctttcttctctctcctaaatgggtctgaggcatcctctcttgggcacttcagcttgttaacatttttgaattctttggactgtat

SEQ ID NO: 3672 - DNA, 1400 bp, mus musculus
actataaacatgttaactttaatgattttctgattattttactttaaactcccaaatgatttctctatataaaaactcacttgcacgagatcctattggttaataagaaggaagaagtagaaattaactttattttttattagatattttctttatttacatttcaaatgataaccccttttctagtttcccctctgaaaatcccctacttcctccccctcccactgctccccaacgcacccctcccacttcctggccctgacattcccctgtactggggcatagaaccttcacccttcacaggaacaagggcctctcctccagttaatgacaactaggccattctctgctacatatgcaactagagccatgagtcccaccttgtgttttctttgattggtgatttagtcccagagagctctggaggtactggttagttcatattgttgttcctcctatggggctgcaatccccttcagctccttggctgctttctcaagctcctccattgggaaccctgtgctttgtccaacagatggctatgagcatctacttctatacttgtcaggcactggcagagcctctcaggagacaggtttatcaggctcctgtcagctaattcttgttggtgtctgcaatagtgtctaggtttggttgttgtttatggaatggattcccaggtggggcagtctcagggtggtcattcctgcagtcttcactctgaactttgtctctgtaactccatccatgggtattttgtttcctcttctaagaaggatcgaagtattcacactttaatctccacctcacaccagtcagaatggctaagatcaaaaacacagatgacagcagatgcttttgaggatgtggaggaagaggaacactcctcattgctgctgggactgaagctagtacaaccactctggaaatcagtttggtggttcctcacaaaattggacatagcagtactggaggatccagcaataccactcctgggcatatatccagaagatactccaacttgcaataaggacacattccccactatgttcatagcagccttatttataatagccagaagctgaatagaacccagatgttcctcaacagaggaatgaatacagaaaatgtgatacatttacaaaatggagtactacactgctattaaaaacaatgaatttatgacattattagacaaatgggcatctggaggctatcatctgaagtgaggtagccaaatcataaaagaacacacataatatgaactcaatgataagagtggatattcgcccagaagctcagaatactcaaggtacaatttgcaaagcacatgaaactcaagaagaaggaaattaactttatttatatatagaatcaactgccttctttgtcagaaaatg

SEQ ID NO: 3673 - DNA, 1000 bp, mus musculus
tgtaattctttgaaggatttttatgcttcttctttaaggacttctacctgtttagcagtgttctcctgtatttctttaagtgaattttaaaagttgtccttaacatcctctaccaacaccatgagatgtcattttaaatctgaatcttactttttgggtgtgttggggtatccaggactcgctgtggtgggcagactggtttctgatgatgccaagtggtcttggtttctgtaagtaagattcttacatttgcatttcaccatctggtaatctctggtgttagatgttctagctgtctctggctggagcttcttccgcctgtgattctgttagcctatgtcggcactccttggagtccaactgtctcttgaattccagtggtcagagcactctctgcaggaaagctctcctctttcagggaaggtgcacagaggtctggagctcagatctacctcctggctgaagataaaggccttaagggaccctgtcgaagtagctctgtttcttctgcagtccatgtgctctcctgtgcagactggtctcagagcaacctgggatacaagatggtgctctcacctgagttccggggtcagagccctctctggaggctgactttccccagtgatcctaagatcctgggtgtgctagggtgactgaggattggagagtcctctgtggatggtggagccatgctgtctgccgagtttattcccaaggtggcacggggctggcacagaccaaaatgaaccccagggcctggttgggcagatttcctttttccctgttcttgctggcacaagatcctccaggttgtgttagaacggaggatgttgcattccacgcaccagtgatcccaagatcctgggtgtgctaggccgcctgaggtgttgagagtcctctggattccgtgggactgtctgctgaatgtgttgtaaaatttgaaacttagaatgtacaaaaatatttaaaatgacatgtatcaaataaaacaagcctacag

SEQ ID NO: 3674 - DNA, 1000 bp, mus musculus
tcaagaagaatgaagactgaagtgtggacactatgcccctccttagaattgggaacaaaacacccatggaaggagttacaaagacaaagtttggagctgagatgaaaggatggaccatgtagagactgccatatccagggatccaccccataatcagcatccaaacgctgacaccattgcatatactagcaagattttatcgaaaggacccagatgtagctgtctcttgtgagactatcccggggcctagcaaacacagaagtggatgctcacaatcagctaatggatggatcacagggctcccaatggaggagctagagaaagtacccaaggagctaaagggatctgcaaccctataggtggaacaacattatgaactaaccagtaccccggagctcttgactctagctgcatatgtatcaaaagatggcttagtcagccatcactggaaagagaggcccgttggacaagccaactttatatgccccagtacaggggaacgccagggccaaaaagggggagtgggtgggtagggaagtgggggtgggtgtgtatgggggacttttggtatagcattggaaatgtaaatgagctaaatacctaataaaatatggaaaaaaaaaagaatgaaacatctcccccaggcctcaggtcatatcacaccaggcttgtaatccatagttccttcccaagtaaggaacattgtgtgccattttggggctctctctgaccttgtcttcctctattttcagcactgtttataaccctgtgcacctagtaaccttgaagctcatgctggcatcaggatgagatgacaaaattttcaaggaattctgagctctacctcctgaggagatatttataacaaaaagtttgattcaagaatttagaacctcaaacacaaggcctaaaatagggacatccatcaacttttagaaagtattagtcacgggcacaaaaccacacataaagccatagcttaaaaggcataatagaataa

SEQ ID NO: 3675 - DNA, 1600 bp, mus musculus
aaggtttatctgcctatatcatagtatgaatattttccttaaaatatacaatatattttcagcctgttaacacaaatttgtgaaagtacacttttaaaacttgctagtttttctttggaattttcccattgcaatgcaaccgagccagaatacatgttactataattggactcagcaacatgtttatgctcatgtcctgtgttgcaggaacctcttccttttcactactcctcacacacatataagcagtacatgttgactctgtttaaatgtcagaacctactgtatttgcactgttgtatttgatttactgtttagagaaatcatttgtgaatttctgggcacaataatctgaatttttaactctagaagttaaaaaaaaaaagtctgtgatcttgggcacgatcagtggaggtccccaaggtccccagaggattctccacactgaaggcatcctagaacacctgggatcttgaaatcactgggaagtggaatgcatcatcagttccaaaaaccccacaggttcttaggctagcagaaacaaagagcacctgcccaaccagtggttggggttcattctagtgggcaccaccgccatgccatcttgggtgccatctccatggaaggtcccaaggtccccaaggattctccatacttcaggcaccctagcaaactcgggatcttgagatcactgttgagtggaacacaacatcagttccaaaatcccagagggtcttgtgctaccagcaacagggtcaaaggacaaaggcaggcccgagcacacccagaatcttgggatcactaagacaagtccacacatgagagcacgtgggcagtagaagcaacaaaacttgaacagggtcccttcaggccttcatccttacccaggagacagaactgagacccagaaccctagacaccttccctgccagaggagagtcagcttccagggagggctctgaccccaggaatcaggaggtggatctgagctgcagacttctgggcacctttccagcaagaggagagatgacctgcagagagcactctgaccactgggactcaggagagagttggtctcccaggaatgctgacagaggctaaagaatcacaagatgaacaaactccagccagagtcagctagaacatctgcaccagagattactagatggtgaaaggcaaatgaaaaaaacttagtaacagaaaccaagaccaattaataatcagatcaacaaatgcactaaatgaagacagaatattaaaagcaggaaggggaaaaggtcaagtaacatataaaggcagacctattagaattacaccagacttttcaccagagactatgaaagccagaagagcctggacagatgttatacagacactaagagaacacaaatgcaggtctaggctacaataccaagcaaaactctcaattaccatagatggagaaaccaaagtattccatgacaaaaccaaattcacacaatatctttccacaactccatcccttcaaaggataataaagggaaacaccaacacaaggacagaaaatatgtccaagaaaatcaagaaagtaatccttcaacaaacctaaaagaagatggcc

SEQ ID NO: 3676 - DNA, 1000 bp, mus musculus
ggaaagtagagcaggagatgagtaaaggagggagaatggaagaagaggaggaaggaaaatctaaagagaagctagaagagtcgtggtaagagcgggaacccggaggcccacgaagcaaaagggactcggacctgagacctagaggatgagaaagtctgtagaagagagctgcggactggtcagcagcgagagcagagatatggaaattcttccggaaaacttctatcctcactcttgtcctcgcctgggttctccgaacccgcaggccaggcagactgaactgcgaggcacaagacctggcagcgctttaacgctagcaccgggccatccaaggggagcacagccttcagggatgcggggcaccacagggactctccagagtgtctctaagatagaggaagccgccagaacctcggttacccttagtgaccgggaaccggcgaccatgggaatgcttggggacgacaggaactctccagggtgtcactaggacagaggggaccacggagaccttaggaattcttggggagagccgaggacttagtgatgcccaaggaagacatggagaccccgggaactgcttgggaatctggcgcggggacggggaaattcagggattgttccagggagggacaagggaggcaatccagcccctagcctggcctcgggactgagtgcggttgggacctgggtcgttcttccgtctcttaaattgcttggtttgaagcgtttcaagaagggaagacgggatctctactagcagttggggcgctgcagtatcgcggcgcctgggactgaagaactcgggcgaggttgagcatttgcacccttgtcctacaggtggagctcttacccgacagagacccggacaacgatgggaccaagattagtgtgagtgtcacagggaccagcgacagggggcacatcctttagtaaactaccaagcagatccaagatggatattagtagaaacggttttagatgtaaaaccgtttaattc

SEQ ID NO: 3677 - DNA, 1200 bp, mus musculus
gtgaacacctatgattttcatcttagagatctttcattgaataaatggtaatagataatgcaatgaagcccaataccttgtagatattagtgtatagaagaaccttatttttccaacatttgtctactttcctctagaaactgcaagtcttgagcactatgacttttcagagacagctatgcagcattagactcagcatgcgtcacttcacttctgcctgttttcaaaactatagctgtacatgtctacggttttcacgtatgtgccatagttattttaaagtgttttgagaaggccccactgatagctgtgtactggtaccaagaaacattggctctcacttgatgataacatctgaagattcaatgaggcatgtctaggaaagctttctctcaggccgtgtgagttaggcacagataaatctatctcctttgtatgatgtttgtgccatgtgagtcagagctctgccctcttccctggagtgtgagagggagcaggagatgctgctccaggggcccccagaggtgaatatgcagaatcttgccacaagtcctcctgggactcattgctatgcttggaaaagctgacttgtcacttctccggactttcatttatgtcctttgacaaaagtagaacaaattattttacattcttaaaagtatgtacctctttccaatttccaaagcaacgaaagactttccttcacatcctcaagtctggtgagtcatctcagtgatcagtgagaggagactgaatgcccagaacccattctcacactggcctccctgcgattgttatcaaactgagaagccttataattcaatgtcatctactgagcaaggctccccttacataaaagtacacattttcctgttgctgtgaaagactactagacagctcctttgtaattttatatttcttccttagaacttgacctgaaggcaagaagactcataaagccagttttcctcatctttgctcaaaagcagcagcagtctgagttaggatttgttctggtaatggaatcctgactgtcttttacattatctgtggcacacaggctgaaggctttatctttatcagtgtcatgattcgaacaacaaaatagttctggctaacatatagtgacaggtaaatcatttaaaaacaattgcacaaaaagttcttttcagttgtgattatcgttcttaatagtatttg

SEQ ID NO: 3678 - DNA, 1000 bp, mus musculus
tatctccatgatattgatttgttgtcctttgagtaggtacccaagagttgtacagaggagtcatgtggtagagttgggatttatttatttattcactttacattctgatttagcctccccacctctcccctccccccaaggctccttctcccattcctccctctgtttcatctttgagaacaaaagggggtccctcctgggaaaacaacacaccctgacacctcaagtcacagcaggactgggtacctcttctcccactgaggccagacaaggccatccagttagagaaacaggatccagaggcaggcaacagagtcagggcaagcccctactccagttgttgggggacctgcatgaagatcaagctgcatatttgcaacacatgtgcaaggggccgaggtccagcccatgtatgctcactgattgattgttccatctctgggaggtcccacagggttcaggttagttgactctgttggtattcttacagagttcctaatgtttttaggtctgtaaaccattcccaaacctcttccacaagacctcctgaactccatctaatgcttggctgtgggtcagtagagttgtttttatattaacatgtgtagctttcaatccagtatggtcactcttgcatgcactttcatgacctggaacaaacagcatctcagaagtagggcacttgttatatagtattcaaaataatgaaagtcacatgagagcctgcaagaggcagagaaggaggtgacatcttggtatacaaaacataatttacttcatcattactttgataatctgatctgaagagtgaagttgggtgtacatagaaaagcataatattgaatggtgtagcccatagattcttgacactatcttacagcaatatctaatcatggttttctctttccttttttttgttttggctttgatctttgatttatgcatcttatgcttgaaaaatcctttctttcttgaaatgagcgaactgactccaccaatt

SEQ ID NO: 3679 - DNA, 1000 bp, mus musculus
aggataaacaggctgtgaaagaaattagggaaacaacacccttcactatagccacaaataatataaaatatcttgatatgactctaaccaaacaagtgaaaaatctgtaagacaagaacttcaagtctctgaagaaagaaattaaagaagacctctgaagatgaaaagatctcccacactcatggattggcagaattaatatagtatatatggccatcttgccaaaagcaatatatagattcaatgcaattcccatcaaaattccaactcaattcttcatagagttagaaagagcaattctcaaattcatttagaacaagaaataacccaggacagcaaaaactattctctaaaataaaggaatatctggggggctcatcatccctgacctcaagctgtactacagagcaatagtcataaaaacttgtgacttcccacggccacatgaaccgggtcctcctgaaaggcaggctggggctaaaagagaataaacggggagaaaaaggacgaggtcaagacaaaattctgatcaaagcccaaagtttactaaaaatctgtgcttatatagagggaaagcccatctcccacagattcactcttgatgcctgttgccagcctgtaagcaatctgtctgacagcactggtttggcaagaaagtgtcaatcactgggttgcctgctgtctctggaatctctcaggaatctctcagcctctcagcaggtagcagtgtcttggagcgggacagcaccagtggtgacagaacaatagaaccatctaggtgggaaggctccaccccaggtggtctcattctcagtggcagcaaggtctcagccagcctactcaggtctgggggaggctacaaaaactgtgtggtattggtacagtgataggcaggaagatgagtggaatagaattaaagatccagaaatgaacccacacacctatgatcacttgatctttgacaaaggagcaaaaaccatccagtggaaaaaaggccagc

SEQ ID NO: 3680 - DNA, 1800 bp, mus musculus
tttctcattgtgtcctggattgcctggatgttttgggttagaatctttttgcatttctcattttctttgttgtgtcaatgttttctctggtatcttctgcacctgagattctctcttctatctcttgtattctattggtgatgcttgcatctatggctcctgacttctttcctaggttttgtatctccaaagttgtctccctttgttatttctttattgtttctgcttccatttttagatcctagatggttttgttcaattctttcgcctgtttggtagtattttcctgtaactctttaatggatttttgtgttttctttttaagggcttctacctgtttacctgtgttctcctgaatttttttaagggagttatttatgtccttcttatagtcctccatcatcatcagaagaagaagaagaagaagaagaagaagaagaagaagaagaagaagaagaagaagaagaagaagaagaagaagaagaagaagaagaagtaactttggatccatctcttgcttttctggtgtgatggtgtattcaggatttgctatggtggaagagttgggttctaatgatgccaagtatccttggtttctgtggcttctgttcttaggcttgcctcctgccatctgattatctcaagtgctccctgccctcaatatctgattggagcttgtccttcctgtaatcccatttgagtcaaaactcctcagtgtccagctttctctgtgactgtgtgattccgggaccctgggatcccgagattctgagtgtttcagaattattggcctgagatcctggtgtgaccaagctcctgggatcctaagttcctggtgtgttagagcacctggaagttgtacctcttctggagaccttggggctgtccactgagttagaaaccaaggtagactagcactgataggaaggaacccaagctgctggtcagatggggctcctgtttctctgctcctgctgaccccaggcactcccagttgtgctggaacagacgttgtgttccactcaccagtgatcttaagatcctgggcctgctagagtgcctggggggtggtgaatcatctggggaccatccgctgagtttgcacccaaggtggcctggagctggcgtagactggaaggaaccttgagcagatttctttttttttttttttttttacttttttttttctttccattttttattaggtatttagctcatttacatttccaatgctataccaaaagtcccccatacccacccacccccactcccctacccgcccactccccctttttggccctggcgttcccctgttctggggcatataaagtttgtgtgtccaatgggcctctctttccagtgatggccgactaggccatcctttgatacatatgcagctagagtcaagagctccggggtactggttagttcataatgttgatccacctatagggttgcagatccctttagctccttgggtactttctctagctcctccattgggagccctgtgatccatccattagctgactgtgggcatccacttctgtgtttgctaggccccggcatagtctcacaagagacagctacatctgggtcctttcgataaaatcttgctagtgtatgcaatggtgtcagcgtttggatgctgattatggggtggatccctggataaggcaatctctacatggtccatcctttcatctcagctccaaactttgtctctgtaactccttccaagggtgttttgttcccacttctaaggaggggtatagtgtccacacttcagtcttcattttt

SEQ ID NO: 3681 - DNA, 1200 bp, mus musculus
tacacaatggaatactactcagctattaaaaatgacaactaaatgaactttgtaggcagatggatggaactagaaaataccatgagtgaggtaactcagacccaaagtgagtacatggtatgtactcactgataagtggatattagcccaacagctcagaatacccatgatacaactcacaaagcatatgaagtttaacaaaaaggaaggacaaagtacggaggcttcaaatccacttagaagggggaacaaaataatcataggaggcagagggagggaggggtctaggtgggagaggggagaggaagggaaaaaggggagcaggaccaggtatggaaggagacaggtgagaagtccagagggcctggagaacgaaaaaaaataagaggcagttgaggtggagaacttggggaaccactagaaagtcccagccgccagggatttgagagtttcctgggatccggtggggatgacattagccgaaatacccgacagctgggagaaagaacctgaggagacaacttccagttgatagacatgacccccagtgaaaagatggggtcacccacctatctaaaaaattttaccccagaaatgttcccatctaaaagaaatacagtgaccaaaaaaatggagtgtggttgaaggaaaggtcatccagcgactgcctcacctagggatccattccatctgcagacatcaaatcccaatactattgctgatgccaagatgtgcttgtagacaggagcctggtatggctgtcccctgagaagttctgccagcacgtgactaagacagatacagatactcacagccagccattggactgagccaggggaccccaatggaagagctaggggaagggctgaaggagctgaaggtaattgcaacaccataggaagaacaacactatcaattaaccagaccattcagagctcccagggcctaaaccatcaaccaaagagtatacacagacaggatcatggctccctctacatatgtagcagaggactgttcatctgacattagtgagagaggaggcacttggtcctgtgaaggtttgatggcccagagaaacggaacgttagaggggtgaggtgggagtcggtgggtgggtgtgtgagggagcaccctcttagaggcaaacgggagggggatgtggtagggtgttcatagaagggagaccaaccgggaaaggag

SEQ ID NO: 3682 - DNA, 1200 bp, mus musculus
tgtatagcctaagtaggcttttgtaggaaacccactgtctgtgagacagctctgtgcaatggtttctatggaacaatgagttttgagtggaatttagaacccagcagaatcctttgctgctgagtacagagggaatgccccatttgctttgccacttctggcaccgtgaaaggcttcctcagccacaccgtggaacaagcgatgaactttaagtcaaagtgtttcttccctacagaaaagaattttgagaaaaaagacaaagaccacttccggcaaaataagtacccactctcgagggaactttataacctgatttttggtgaaagaaaggtacaaaggtattattaggtctggggtacttggactgggatatatgctttatttagttggtgtttcctctaaatctgtcgacaacacctgtaccacagacagacattccctgcaaatggttctgactcctttttctctatgtattacaagcatataaaatcaaacatgatttctagttgggtaaaaatcatgaataaaggtgactatttgggagggataataagctggaatatcttaaagaacaagaatggctatttcttctttaacccagatattccatatagataaatggcggtgatgacccttcaagcacaagggaacatctaggtttttatgatgctgatgaagcagagctaataaaatgtattgtgaaatttcttactatttagaggtaatcatggagacactgaaacctaatgttgcttatggtcaaagatggctataaatattttccccactttcttttaaaaattattttatttttgaattgtgtatccatgtatgaaggggtggtacacatggatggaggtgccttcaggggccagtggtgtcaggtatcgaactctggggagttggagttacagatagtgagagcctgccacagtgtgatggtaagaacctaactccgatcctccaaaagagtagcatgtgtcccttactccagcaccttctttccagcatccttctctctgttgtttaaagctttcttctcctataattctattcttccctcagtactaatcatatctctggcttctttcttccatcactgaataaggaatagaagtggacatttcagggccaacttatcccaaggttgattgcaacatctctatttttttcctaaagtgacttccagcttcaatttgg

SEQ ID NO: 3683 - DNA, 1000 bp, mus musculus
tccaacgtgtccttcacccctgagaatcgaggaacctcttgatttaagtaggtaggatctgagaacagctgcacaagcaagaccagctcactggcattgaggggaggtgagtgagccaggtagcaactggagcagagctctggctctctccacctgcagataagaaggtgtctgatctgctgagcccttatctggtacgagatatcattcacaccgggtgggggcgggatcctgtaataaggaggatcccgttagctcctaatttgacccacacctgactgaatcaaggctctggaacaatgctccaacataatgctgtgactcccgcagggaaggggactctggattcccaagctatcacaatgcagagccctgagaagactgaccaagaagagccccggaagccacagtctatagaagcaccagggcctgaatgaaacttccaggtctgctcagggacctgtcttagactggagaaatgacaagcttcacactcctttttgtctgtgtttagattactgaagctgagggtgacacagaggagtcaagtcagaggagaaactgctagcctgtctctagagagagttgattagaatccctccggtagggctggcgagatggctcagtgggtaagagcactgactgttcttccaaaggtcctgagttcaaatcccagcaaccacatggtggctcacaaccatccgtaatgagatctgacgccctcttctgtcttctgaagacagctacagtgtacttacatataataaataattaaatcgtttttttttttaaatctctccagtaaagataattcctggtttagacaagtgtctccaaaggtttatgggctaaagtcttggtcccatgtcgaggaggtgctatgatattttgagatagtgtaacagggaccccaaaagagtagactatccagagtgtgaatgtgtccaggaagccgagacctcagagcgagagcagcctgaagccttggcaccaggaaaga

SEQ ID NO: 3684 - DNA, 1000 bp, mus musculus
agggtgctccctccaccactccggttctcctgccctggcattcccctgcactggggcattgaacacccccaggcgcaagggcctctcctcccactgatgtccaacaaggccctcctcttccacataagtgatcagcaccatgggttgctccatgtgtattctttggttggtggttcagtccctcggaactctggggtgtctgtcatgttgatactgttgctacctccctggggcttcaagctccctctgctccttcagcccttctccaaatcttccattggggcccattagcttggtccaatggttggctgtgagcttccacctttgtctttgtcaggctctggcagagcttctcatgaaacagccatatcaggcctccatcagcaagcacttttggacatcacacaataacatcagggtttggtggctgtgtatgggatggatacttaggtggggcagtctctggattgcctttccttcagtctctgcttcaccctttgtctctacatttcctcctgtgagtattttgttcacccttctaaaaaacactgaagcatacacattttggtcttcctcttcttagtcttcacatagtctgtgaattgaattttgggtattctgaactcttgtgctaatatccacttatcagggagtacacaccatgtttgttcctttgtgactgagtcacctcacttaggatgatattctcaagttccatccatttgtgtgtgaatttcatgaagccattgtttttaatacctgagtagcattccattgtgtaaatgtaccacattttgtgtatccatttgtctgttgagggacatctgggttgtttccagtttctggctattataaatatggctgctatgaacatacaagcatgtggccttatcacatgatggagcatcttttgggtatatgcccaagagtggtctagctgggttctctggtagtactatgtgcaactttctgaggaactgccagactgatttccaaaacc

SEQ ID NO: 3685 - DNA, 1000 bp, mus musculus
atttaaaaatcttaaatacatttaatatttcttctctttgtgaaagaatggatggaatccatatttttttatgagagttatgttgctagcactgtttagaaatggagactgaaaagcaatttagcttaacatcaatgtgtatttgcataccactatacaatctcacttaggtgacacagccagagtagtcaagctcgtagagagagaaggatgctgcttacagagctgggaggtcgggagaaatcgacactcaatatttactgcatcagctttctgttcttttacttttatttatttagctttttacttttaatttcttacagtccactagttatcctcctctcggtctgccctccaacagttccttatcctactcctcctcccccccccctgaacctccccccacctctcccatggctttcacacaattcctggctgcagcacagaccataaacacggttcagagctgcagtaggaccacggatccagacaaggacctccgatacagccaggaccatggatatcagcatgacctcaggtggcagtgtactagatcattatggcccctggcagaagcacaccccactacatcgccatggcttcaggttgtagcacagaccatggacatcctcacggtctttggcagtaacacaggtattaacccagaacctggctgcagtaggaccacagaccatgatgtggtcctcagtggcatcatgggacagacatcaccatggcatcaggtgacagcacagggcattcacatcaatgtgatccccagtagcagaatgtcccacagatatcaatatggcttcacctgcagcacaggtcacagattctgcatagcccagggtggtaacatgggccacagaccattacaaggtctctgatgtggtgggcgtggcctggtggctggctcggtagaatttcagtaaggttgaaaataaatttgtgtgcacatgtatgtgcagtaatttgtgaggtatatttttacacattt

SEQ ID NO: 3686 - DNA, 1000 bp, mus musculus
cctatggtctagcccagactgtgaagccaaactagacagtaatgaacagccatgcccataacttaacctcccatcatgagcagctgcagttacaaaattaccattttcatgatttagccatgctagcaactcccatgtttttacctccagtacaaagctgtctcctgcgtttaggacacctcattggcaagtgtctatgtgacctccttatgtaggtgttgtgacaggctttgttgtacttctctcatacccaccatgcaacagatacatcaaacaacaaattccagtaatttacagtgtagacttatttagagatagggtctttacaaagggaaccaagttaaaacaaggtccttgggctagatcctaactaacatgaccagctttcttgtagaaaaagaaagtgtaggtacagagatagtcacacgtgtaaaaaagattatgcccattgtcagggttcttgcatctgttgtttctgctaggtttttcctaggttttctaggtttttccatctccaggaccccctcagattgtgttttctttattgcttctatttgcattctcagatcttgaacagtgttatttatttccttcaccatctaactggcacgatgcagccaataataacagcaaaaaagattgctagcaattgccagaagatgggaccaattctttcctagggttagctactagtagagacagacagacagacagacagacagacagacacacacacacacacacacacacgaaggggggcaatttatcatacagacatatttatttcaacttctagcttttataactgtaagataataaatttctattttaagcctgtcttgctgggtatttgataacatctctgaaaaatcaaaaacagatgccaaaaaagcatttgaaccctaacatggttccagccccacccttcttcccatttttctctgttgtgggaacttcctctgctatttactgacatcaaacaatttagggtcatcctcta

SEQ ID NO: 3687 - DNA, 1400 bp, mus musculus
ttttaggaagcattttcacatatatgtctcttgcccagttgcatgcaattctctatggtacaccgttaatgatggatgttctgagttgtcaggagtgtatcttcagatttactcagtagcacaaatgcctctattagtggcaccagtgttgaaaatttgcactcacaatgtcgcaagaatgcgtgtttgtggggcggttggctgtgcacagacagcctagtcccctgttgagcaaaggtctggaaccccggtgacctggtgggcggtgatttctgcctgcatgagacagaaggtgttcagccacgcctcctggactcccccacctcctgttgcagctgcagcctcctacaacccccccacccccagaattatgtggccatcagtcatgtaggagcagcaccaagccctcccaaatgtaaataaggtttctccaaagctctcaggccagaccagagagaagtacctgtcgtcaaacccttacccacctcaaaactgtatgtaggattcctatccggaaggattaaaggtgtgcaagaactactctgtcgtcccgagccttctgaacaagagctataacacttgagaagtgatttgctcttccgatgtgcctcctgaagctctgctgcactcctcactggctagttggcctttagtcggttttggtcggcccagcccgacccaactcagtgcagggctgctcagagtagcccagtaaccaggaaggagacggaggtggagccaactgcagcagcagaagctgcagaagcaacctctcttccctgcccacacttgcttcccttcgcaggaactcccgcaccaggccaagccagacacctccatcgaaagcctctggtgcataggcccacacatagactgatgtatgactgcaatatcagactgctctaagtcgtctcatctgatgagacacacgcaccacctaccgctgttttagcttgcgtttttctaattactaaaaacacaggatgattttctttattaagcatgcagaactcgcctattgtgattcactgttgctccttttccattggatcatggttggccgtagtgatttagagtaaatatagatggaggttctgagaatcaaacctggagcacgccagacaagcattctcgctgagctatatcttcagcccaagtattctgggtagcaacagtaataatggtcagtattttgagagttctcactgaatgcaatctcatagcatctcatagcatcatagcatcgcagcactgtcaacctaacctcttttataaaaatacaaaaattaagaatctagaggctaaatagcttgcctaaagtcacatgacagctacgaggcgatggagtcatgacttagacccagctgttctaagcaaagtgctaatcttctgccactcac

SEQ ID NO: 3688 - DNA, 1000 bp, mus musculus
gaatcctagaggacagacgccatctttaaataacaacaagaagcttaaacaaaacacttagcaaaacgttacaaaaaaaatgaatactggaattgtgttgagtcaagcaatatgaacagtttaatgtactttgctgtgaaggtttgaatctgaaatgatcccttccagctcatatgtttgaaaatctggtctcaactcttggtgttgttttatcagtctgcggaccctttgagatacagagcttcaccggcagaagaaggtcaatatgggcgaggcttcaaaggttaagccagattttgggttgagcttatgcttgctgcctcttggtctgcttcatgtgaatgagccaccactgcatattcagccactgtggatggaagccgcgccttccctgttatggctgtatcctctaaagctgagccaaaacaaaatgacttttccttccttgggtggcaatagcacaaaaatgacagtacccctttccggtaaggttttgtttgtttttgttttttgttttgagatagaatctcatgcaggccaggcttactttgaatttgctaggtagctatgtagaggctaaccttgaactcagggtccttctcactcttcctctcattggaattcatgtttacaccaccacttctggttgcactggatcccccataagccaggatgcgaaggctctgacgcccatctgtaatacctttgagagatggtaatggtggaagtttgaagaggttgaccctgtgaagaaagtgcagttgttgactatgcctttgaaaagatattggaactgcggctccttttcttccaatttccatcgtagccaccgttctaggagcaccgtactctcaccttgactttctgccttacagagtccacagcactggagctgagcaacaatagatgggaagccctgaaaccacggaccaaaatcaaccttttctccttggagttgcttatctctggtgttttgtcacatagtgagaaactggctaac

SEQ ID NO: 3689 - DNA, 1000 bp, mus musculus
ggtatgtactcactaataagtgaatattagccaaaaaaagtaaagactacccaggatacaatccacaggactcaagaaggttaataagccaaagggccctagtgaggatgcttcaatcctatttgggagggggaagtaagcagtcactgggggcagggttgggaggacagaaggaggaacaagggaggaagaggaaaaagggggaacaagatcgggtattgggaggggaaatatgagtgaagccctgaggattagcattatgaacgggaacaggtaaccttgggaggtgtgtgtgtgtgtgtgtgtgtgtgtgtgtgtgtgtgtagcctctagaatgtgccagagatctgggagatgagagactctcaggactcaaagggagggaccttagatgaaatgcccaatggtagggagagggaacttgtagagtccatctccagtagaaagacagggcatcaagtagagggatggggttgccatcccatggtcaaaaactctgacccagaattgttcctgtctaaaagaactgcagggacaaaagtggagaagagactgagggaacggaggttcagtgaccaacccaaattgggatccatctcaaggagaggttccaaggcctgacactattactgatgctatggtatcttacagacaggagcctaacatgactgcccttcaagaggcccaacagattgagacagatgcagatacacccaataaatgcactgaaatcagaggaaagcctggaagaagttgtggaggagggtgaccccataggaagaccagcagtctcaagttacctggacccctgagagctatcagacactgagccaccaactaggtagcatacactagctggtacgagacccccaacacatatacagcagaggactgtctggtctagcctcagtgagagaagatgcacctaaccctggacttgagactccagggcgtggggagacctggcagggtgggagtggggatatcctcttggagatgg

SEQ ID NO: 3690 - DNA, 1000 bp, mus musculus
tggttgctaggaattgaactcaggacctctggaagagcagtgagtgctcctaaccactgagccatctctccagcccatattaaaaatcctcttaaaagatttttatttttaattcaggaaggggcaagacctcatgagtctctcttcttccgtgacagtgttggcttgcccagtcctatgccagccttgcacaggtgaccacactgctgagagttcaagtgcaacagcatccagaagtcagcattccacagcttttcacccttccctctcacacctacatgtattcactcttgcatggtgttccctgatccgtaaggaggtgatggagatattccatctacgactgagaattcagcaactgcactttcggcacttggacatccattatgagtctgtgcaataaccactgcccactacaaaaagaagcttctctgaccacagattgcagcaggacgattctgataacttaaatttcagtatgtagaaggtagttgaacagacacatcctgtcagttatcaaaacagcattagcatcttcctcactaaggtttatagaattgctggccatgagttattggcaaggtttatagatctacactcaaattccctcatgtgagcattcctgaagtctgataaaaagccattggttgcctgtctgaaagccatgccacccttgtgccagtgagtcttgtctagcaagccattagattagcacagagggttgttggtccgtaacccagaaaagatttgaccagagccatctcatgccagcccacatagctctgctggcactttaagggcggtccttcaggagggaccctcccgctcagtgtcagtttcattcctctgtgttttaagcccacaatagtatgctgtctttatcaagagtcttccagtctagttctgctgacaaccagcaggaataaccatgtcctttgttctggggatctcaggagcctgctgctgaggttttagttaataaccttatgttttctgggag

SEQ ID NO: 3691 - DNA, 1400 bp, mus musculus
tggtcttctcattgtgtcctggatttcctggatgttttggtttagaaaccttttgcattttgcatttactttgactgttgtgtcaatgttttctatggtatcttctgaacctgagattctctcttctatttcttgtattttgttggtgatgcttgcatccatgactactgatctctttcctaggtttcctatctctagggttgtctctccttgttatttctttattgattctatttccatttttagatcctgggtcattttgttcaattccttcacctttttggttgtgttttcctgtaattctttaagggctacctgtttaccagtgttctcctgtatttctttaagggagttatatatgtctttcttaaagtcttctatcatcatcatgaaatgtgatttttaaataaaaggcttgcttttatggtatgttgaggtatccagggcttgctgtggtggaagaactgggttctgatgattccaagtagttttggtttctgttgtttatgttctttcccttgcctctccccatctggctatctgtgtgtacagggtgttgctgtctctgactgtggcttgtccctcctgcaagcctgtgtgtcagtacttctgggagaccagttctctctgggaggaatttgggtatggagatctgtgtcacaggatcagctccaggtgcagacagaaacttgaaggatcttgtgtcctgactgttctgggtggttccctcttgggctaggaatttgagcagaagtggtggggttacctgtgctcacaggcttttcagcacttcttggagaccagctctcttctggtgggcagtatgaagtactgtgtcagggaatcatctctgggcaatatggcacaggatcagctcctggtgcaaagggaaaccccagatggaggaatttaagactctgagctctccacagtgcgtggccagccttacgtttgaaccatgtgtgtggttaatgcttatccacccatgttttattcaaccatagtggtacccagaagctatactctccaggctgtgatgggggtgagaagattgatgagatttgcttatactccctcttatcattgacatctcagcacactctctcctctgacataagttctgtgctatgagccagacagttcagcaggtgactacacctacatccactgggaccccaataatcaatgattcccacatcaataaattctcttcctattagtgtcttctactgcctccttttgatgggctcatatcatagtatcctggggaagttttggctacattggagaaaaaaaacagacaatgtttgtacaaatggaaccatttttcttcattggttatttgtctattcttctcgctgatagaactgttttaaaggcaaggctgcaaacaacacaag

SEQ ID NO: 3692 - DNA, 1000 bp, mus musculus
acgcaagtagaccttgccttgtaaaagcccgattcagatttcaaataatttgattttactttttgttaaaatagccttcatctccttgctcctgagagctaatgttggatctctccagatgggggccttagggggtgggcagaaactactctgggggcagggtacattgtgccctctgctggggagccaacctctagagcagctggggtcaagagcccattccaaggaagttaaaggagaaatcggtttccaaagtgaaaatctctattccaaacgtggtctcactctcatctctctgagtgcttcattaaaccagaactcacctgcagccttcctcacaaaacgtgtctgcctgccatgcaaagtgatagcagaaatgatgaacacattacaagtttgtagaccctaaaattaaactccacctcatttatttcatatttcagcagagcaggggaagcctggcaaagaggcacaaatccttcctggtgagtctgctgtttctacactggtaagggatttgtgctctctggtgtatcctcagttttcctgaaggcccagctctgcttgcgaataggaggcaggtggcagtattatgtatgaggagaggagtcaggaaccccaggtctagggagatgccagtgctatcttaccaatcttagccccctctatgtctggatagcatttagatcagtgctactaactgtggttagaggccagcttcagcaccacttttgcatcaatagaaagccataaacctaagcctcatcccagatcctttgaagcaagatcttcatgttaatacaagaactcatagtctatagaggtgtcacactttcagctgcaccactatagacatttgagatcaagcacaagcacacagagtacagaactttacagacaggaccttcacccagttcctcagttaagatgatgaagacccagagacaaacacagctgcatacacattttatacagcagagtatgttttatagacctcagt

SEQ ID NO: 3693 - DNA, 1200 bp, mus musculus
tctcttattaatgattctaaaaaataaaatctctgtagctatcagcaatacaatgataacttgcagtgtcctgttggcttcaataaaaggggggagcggaagcggttcaagttgccttggaggggactacataaagcagtataaaatgtatatttttccacatagaaaataaaaggcatgtaataaaatatatgcagtctccccacttctaattcccaaaggaggcactagtatttgggataccactgtgcactacattgtaaagacaaatttaagcacttgttcattcttcaaccatgaggagacaaaaaggtaagtaggaaggtgctaggctgtcaggaggaaccacacagaaaggaagttcaaacacggctatgttcctcctgaacccagcagaggccaccaagggccccagagggctctccatgccacaggacctcaggatcacctcaggatcatgggttagtgaaacataacatcagctccaaagaatcaaggagggtcttgtgtcagcaggaacagggacaaaggaacactgcccgaccagaggctgggatccaccctggtcaggtccagccctgccatcctcctcctgaaccctgttgagggccccagaggactctccacaccgcaggacccctagcactctcaggacctcgtgatcattgcagagcacgtgggcaacagaagcaacggagcttcttggacagggttcctttagacctccatcttcagcctggaggcagagctgagacccaaccccctgggcaccttccttgcagaggagagtctgcctacagggagggctctgatcctaggactcaggaggtggatcagagctccagacttctgaacacctgccctgtaagaggagagcttgcctgcagagagtgctctgaccactgtgactcctgtgagagttggactcccaggagagttgacagaggctaacagaatcaatcacaggaggaacaagctccagccagagacagctagaagattaacatcagagattaccagatggcgaaaggcaaacataggaatgttactaacagaaatcaagaacactgagtatcatcagaatccagtatgcccaccacagcgagtcctggataccccaacacacccaaaaagggagactcagatttaaaatcatatctcatgatgggggtagaagattttaagaagggcagtaataac

SEQ ID NO: 3694 - DNA, 1000 bp, mus musculus
tcagtcaacacctcatagcctgatttcagcaagcttgcagcctcacctccagcaagcgcgggtggcagaaattaatcaatatgaagaagcgtattcagtatatattgtggctttggtctgatttgggaataaggtgtgctttgagggctggatagtcaatgaagggcaaccagatttcggagccatatcaatctaagagagaggtatatgccaagaggccgtggtttgttaataatacaccacagagccatgtttgtgcaaaataaacacaaacaagctgcgtatattctcctttatggatatgaatggcttgggaaaatctgagatcctaagacaggcacagccaccacccaccataactcccaggcaggactatggagcataaataaatcttatgtctcagtctagctatttttattatataatttgggaggaattgtagcctgccccagtctgaagcaggctggtacaaaccttgtcaccactgaggtggggacacctgtggtgcagctttccgacctggctggctcctttttgaagtgacaactgccctgctcttctgctacctgacgagacgctgaacctgtctttctgagacattcctgaataagcaaccagcctggtgaccaagtgctgacagaatggctccaggcaccaagagtggactggtggggtggggtggggttggccttcctccttgtaagcacggtctcttagtaaacttatgggccttgaacagaaaatgtgttttggtcttcattaatttctctcacagtctaagtctctttcagcctcagcctgcctcccaggtgtactcggttcgtgtacgctgtgggccggcataaagcaaaagcccaggaccagatgggtttagtgtagagttctataaaactttcaaagaagacaatttccaatactctcatactatcccacaaaatagaaaaagaaggtactctacacaattcattctatgaagccacatttactctgatacctaaac

SEQ ID NO: 3695 - DNA, 1400 bp, mus musculus
atggagctctgaaccagcagcgtctcttccaaaaatcctttgccgtttctcagtcccacattggttcgccaattgttgtgtccggccagcagaccacaacctgggttctagcctggaaaggcattttggaaacctggaagagaagaggggctaggtggcgagagaaaggaatgtagccaatacagttattctgatcaaggctcaaattttattgttgcgacactagttatgaaggaagggggaggggacccgattccctccgaataatctctggtccagtagaaaggtgctcgtgtgtggctccgcaggttccagcagtgggcgtggcagaacgaatgagcaggaagttccacccctgagcaagcaggtttcaggctgggggaggggagactacataaggccatgtccctggacatcagctcagactaagtacatttacctcactattgatggtaacaaatctctgctgctataaggccacagacccagatgtaggccctggtggcagcacaggccagaaccccaccatgatccaaggtggcatcactggctatacatatctggctattcctcactatcctcaaatgtccagtctcttcattgagaaatgaaatgtcattgttctcttcattgtgcccacatccatgttcctccttcttttccatttctccaccacttacttgcttctcttagtgctgcccagagtctctgagaatctgatgacatctcaggatttgtctcgcaatgcatacattatagcactgagcagggatcatcttgggcatgccctacccagacctgtgctgcactggactggtggtcatctccagcttgcttttttcagggaattctagactgctaattacttagatgttcacaggtcagaacactgagtgtagacatagcctttctcctctctgaaacccactgatgcacatgcgacacagcagctatacctgtaatgtttctagaagaaggtaaaatataactttaattgaaataaaattacataactttctttcctctttttctttctccatccctctgtgctaccctcctgctaatgcctacaatactattaaactatcaaattgatagccactttttctttattattaatgcatacatatatgtttatatctatgcaaatacaccagattcttagtttgtaccttatttacttttaatcagtaacaattctgccaagttattccactatattcactataatccatatactcatgggttcctaagcatttattgtttcacacttctttaaaatagaaaaacagtgttgagaagttttgtaacaaaccttcccctgaatatataagatttcagcttatatatttcagcttcattcaacttctgattttacattgttattgtgttctaattga

SEQ ID NO: 3696 - DNA, 1200 bp, mus musculus
actaacagttaaaaaaaattttaaaggtacattgtcagaagctatctaggaaaggcaaatacattttctggagatgtccattttgcatgattttgatgtctaagctcaagatgtattttcacatagtactgttgtgtagatgaattaatgatttcataattcctgaaattgattttatagaactcctaaattgatactagatgagagacaatggaccatgccaggaagcctgttaaggtagaaatgttttagaccctggaaactcgagtacacaacaggaacgataggtgcctccctgctccctgccagattcctagcctagaatatgtaccacactctgcacatctgtcattgtagcctaaaacacagttctccacgctaatgagctacctagaagccctgaggatttagctaataagctccccttcctgggcatttctctttgaaaaagatatttaatctcttgtccactctgagaagttggtatgcatccattttccatgattaacaaccaataaataatttggaaccaaggactgtctctttcattgagaaccaccttggggagcatagagaaagctttttcctacagaacaacaccttaaattttcttttgaaggcccatctgtgcccccagacaaccaccactatctttgccaatgaactaagctagagtgcccatgcccttagtccagggctattcatcatactcagcctgaacacccttgattccactctgaactcctcatgactcagtgatgcctggatgtccaggagtttgggagcactcagtgccagcccatggcccccaacgttttgtttctgacttctctgtatggttcttccgactggaagcccagaagtcagggaaccccaactttgactctacacatctcagaatgtgtttttctatccccatagcagtatgtatatccatgcttccctgaagcctggcacccataggcagaggcttgggataagtgaagttaagcttcccacataaacgcagtcccacaacaagtaatctcaattaaataatagcttcaaatagcgctctgtaaacattctgtgtcacaggttaattgcactaggaaaagagcagacttgaaacaaacgtatgatcaaggaaaacactccttctaggttagttgtgagacaattgtcaagtagctaaaggtcttaagctggaagtggacttga

SEQ ID NO: 3697 - DNA, 1000 bp, mus musculus
gaaagagaaacacttttctagaagacctggccagcaggaaaacagctctgcccaccagaagatctgaatgcagcaaaaatctctgtgaatagaagaagagcaaaatgttgcaaacttgaagagagaggccatattaggtcactaaagtctcccagaagttgttgctggagacaaacctagaagtgtagctttcaggattagaggatataccaaggaaacacttatcaaaaaacaagtttggagctactaaaagaaacaacttttgcattttaaaaactgtcctgatgtaagtctgtctcagtcctgcctcccacccccagcccaggggttctgacacatcaaggatcacagttgcacctgagcttatagtggagccttggctctggcccttcatccactctgtccatacccagaggcagctcaaccccaaggagttctggcacatccaggatcacaggtgtggccctaaccccaaccccaatgcctggcttaactggggtcctgtgggacacagaaatccctgcccagccagaaacacacattccttctggtttttacctgatcccaaaatggagcctgagctctggatctccacatactccacctacacccagaggcagcttgttccccagaagttctgacacatccaggatcacaaatgaagccccaatcttaccccagtacctgaactaaataggaacccccagacaaagtggtcacagatacccgtggccagcctatggcacatattcggctcagtttatacctacaccagggagtggacactggactatggctctctacacaaaagctcaattcccaaaagatctgacacacccactatcacataatcaaaggaacaactagacccccaggaattctgacacaaaaatggtcacaaatcacaggctcagaggagctaaaagctccagtcagagacagcaaggcctgttaacaccagagaaaaacatgtggcaagaggcaaacactaaaacataag

SEQ ID NO: 3698 - DNA, 1000 bp, mus musculus
ccttcctttaaccatactgaaaatttgagacgtttgatccagggcaggtcctgagcagataacactgtctgctgtgagactgagagtgcctgcaacagccaagtcagcacttcacagctttctgcctccagctgcttggtatttagatctttctgcctcctctatagtgattttctctaaaccttgacttttaatgaagctcagggggaaccaagagctatttagtgaggtcctactcaatgtgaggtcccactggatgacataaacgtatcattctaagggctgttcgtctgaccttgcaatccagctctttgtagtccagggggaaaaaaaggttaaaaacaaaaacaaaacaaaacaaaaaacatgctagaaatgccctcaggagccaagattcaaggcagactgtgataactatccagagagaaacatcagagatgctgaggaggagagagaagcattgcttatcacgaccacaatggatggtgaagaggttagctcagggcatttggaaaattctaccagacccctcccctcctggaagagaggtcatggagcaattaggcacctctcccctcctgaagagagaggtttaattgcattcctcagaccatgggggaggggtcactgaccaaccactgaccatcagccaccaggaagtaggggaggcccagagcatatagatacatgctgcaaccactggccacctacagacaagggaagtccttgccacctcattccctaaagaccagtcagtttaaaagtcacactgttctgccagtcacattgtgcctaatggctgctgctctgaaaactgtataaaaactcacgaaacgtggggctgcatgaagctgttctccctcctgtgtgtgcagggcaaccccagcatgctgggacagtcctcttgcttttgcatcattcccctactttgctttgttcactcaaggggtctccggtaagttaaggctcaccagagtcttacaatggagcatacaagctt

SEQ ID NO: 3699 - DNA, 1200 bp, mus musculus
acctggtaatctctggagttagtttttatagttgtctctggttggagcttgttcctcctgtgattctgttagcctctgtcagcagtcctgggagtctagctctcccctgtgtctcagtggtcagagtactctctgcaggcaagctctcctcttgcagggaaagtgcacagatatctggtgttcggacctgcctcctggctgaagatgaaggcccaaaacagcgcttgtcccagaagctgtgtagcttctgtagtcctcactctcacctgtgcagactagtctctgagaaatccgggacccaatatggctccccaacctgctccagcagagccctcctgggtggatacctctcctctggcagagaaggtgcccagatttctggagcctgaaatggggtctgtcccagaagctgtgtctcttctgcctgtcccagaagatgtgttgcttctgtagtctgcactctcacctgtgtagactagtttctaagggatccaggacccaagttggctcccccacctgccataattttgaagtcttaccattttctgtaaactgcctttcaagtttttaatacacaatctgtgattaaaactttccttttaagatagcattggggaatcagaaaaccggcttgatctggggcacaagtcccttccagttggcgccagcactgggtcaccttggccacggagtcagcagacacccacgtggtccctagaggactctccacatgttcttaggatcactggtgagtggaatacaacagcagttccaatccaatcgtgacgggcctgtggcagcaggaacaaggacaccggagcccttcctgaccagaagctcagataccttttgatcagttctcatttaccttggtttcgaacagaccagacagctccacggtcctcaaaggagacaccatttccaggcactgtaacacggccaggatcttaggacagcaggatcccaggataacaggagctgggtcacaccagtatttcaggagcttgactgccaagaactctgacacacccagaatctcaggtttacaggagcccaaaatcaaaggatcacagagaaagctgaactccgaggagttctgaatcaactgagattataggaaggacaggcatcaatcagatatattgaggacaacaagcaattgagataatcagatggcaagaggcaagcataagaacagaa

SEQ ID NO: 3700 - DNA, 1000 bp, mus musculus
cattagagcagtaagccatacattctagtatccatgttcttttcttgttagtttttgaaagtttagagactatgtttattcattgtaattttacattttctttatttttttcaaattagattaaaatattggagcaggaaaatgaacatctgaatcaaacagtgtcttccttacggcagcgctcccagattagtgctgaggcgagagtgaaagacattgaaaaagaaaataaaattctccatgaatctatcaaagaaacatgtggaaaactaagcaagattgaatttgaaaaaagacaaatgaaaaaggaattagagctttataaagagaaaggagagcgagcagaagaacttgaaaacgagttgaatcatcttggaaaggagaatgaattgttgcagaaaaagataacgaatttaaagattacgtgtgaaaaacttgagacattagaacaggaaaattcagagctagaaagagaaaataggaaatttaaaaaaactttggacagctttaaaaaccttacttttcagttagaatctctagaaaaagagaattcccaactcgatgaagaaaacttagaactgcgaaggagcgtggagtctctgaagtgtgcgagcatgagaatggcccagctccagctagagaacaaggagctggagagtgagaaggagcagctgaggaagggcttggagctcatgagagcctctttcaagaagacagaacgcttggaagttagctaccaggggctagacacagaaaatcaaagactacaaaaagctctagaaaatagcaataaaaaaatccaacagttagagagtgagctacaagacttagagatggaaaatcaaacattacaaaaaagcctagaggaactgaaaatatctagcaaaagactggaacaactagaaaaagaaaacaagtcattagagcaagagacatctcaacttgaaaaggacaaaaaacaattggagaaggaaaataaacgactccgacaacaagcaga

SEQ ID NO: 3701 - DNA, 1000 bp, mus musculus
aacccacctactccctcttcctggtccagacattcccctatactggggcatagatccttcacaggaccaaggccctctcctcccattgatggccaactaggccatcctctgctacatatgcagctaaagccatgagtctctccgtgagttttctttgattggtggtttagtcccaagaggtcgggggttactggttagttcatattgtttttcctcctgtggggctacaaaccccttcagctccttgggtgctttctctagctccttcattggggacactgtgctccatctaatggatggctgtgagcatccacttctgtattagtcaggcactggcagagcctcgcaggagacagctatatcagtcttctttcagcaagctcttgttggcatctgcaatagtgtctgggtttggtggctgtttatggggtggatccccaggtggggcagtttctggatggtcatgccttcagtctgtgcccgaaacttgtctctgtaactccttccatgggaattttgtttccccttctaagaaggattgaagtgtccacactttcgtcttccttcttcttgagtttcatgggttttgcaaattgtatcttggttattctgaccttctgggctaatatccatttatcagagagtgcatatcatgtgtgttctattgtgattgggttacctcacttaggatgatatccttcagatccatctatttgtctaagaatttcataaattcattgtttttattggctgagtagtactacattctgtatccattcctctgttgagggacatctgtgttctttccagcttctggctattataaataaggctgctatgaacatagtagagcatgagtccttattacaagttggagcatcttctgggtatatgcccaggagtggtatagctaggtcctcaggtagtactatgtcaattttctgaggaaccaccaaactgatttccagagtggttgtacaagcttgcaattccaccagca

SEQ ID NO: 3702 - DNA, 1000 bp, mus musculus; identical to SEQ ID NO: 3701

SEQ ID NO: 3703 - DNA, 1000 bp, mus musculus
ctatagtggtacatacctttaattccagcattcaggaggcagaggcaggttcaagaccagcctggtctacaaagagagttacaaggcagccagggttatcacccagagaaaccctgtgtgactggggaggcagggaggagtatgggactggggatgttgttttgcatgaataaaataatctaggcagttatactaagtgaatcgagatctgagaaataatttggtctcatttgagacttgccaggtttgataaagcggattctaaaatgtaatgaaagccaaagagtaaagttaaggggacagaactcttgggaagtgactcagcagtacagccagactgccatccccataaacaaatggagaggattctggaaaccacatccaacaaacaagcattggcacaggatacttagagcaatgactcaggacttcctgaggctgtctgcagagctacttctctgtcccatggatgtgatgccccaaaccaaagatttcagtgtgtctctggcgcggacactctccatagtgtcaggatggttttccctttaggatctcagcagcattggctcttgcagaagtttctgggagggtggagatctagaggcacaggcaagccccaccctgtggcctcagacaatttgtctctccaaggactggtgctgctagggacctccttagtgtcatggagcccccacagctgcttttctacatgtatggccagaaggggagcgccctcgggtagggcagaaagactcctgccccagtcccggggtcccaatcctgggccctattccaacctgcaccctgctttctctgaaaccttagcatgtggtctcactatgggtcctcagcataggaatctgcattataaaccttggcaagtctcaaaggagatcaaattatttttcagaccttttgcatcatgaccagggccttttccttccctcccttaaagcgcccactgataacatcttccagcacaattgggtaagcagcctca

SEQ ID NO: 3704 - DNA, 1000 bp, mus musculus
aaacaaaaccagtctgcttttgcttagcaccttgctgctgttgccctggaagtctcgtgaccagcagagggcaggccatggccatggtgctgcacagcctctggactcaggctgttggtgtggctgcagcttccactgatgagtacttactgtctgggggatgtaaatcagcaggcagccagcatgattgccattaagagctagaaaagtgagtttccaagaattcaggagactggcagcctcccacccccagggcattaggagatgaggatgacttgggaaatgaaatcatcctatgttaattgactcctctcaaagcaaccatcattggaatgagtgattcctggatgctgtcttcagcatgctcaccctaatggagacagagacgtgggaaagcagcacctgtgcagactgacaccgcctggggactcagaacaccccctaagagagccaccctgtgtcggagggcaaacaggtctattccagaatgacatgcactaaggctggccagagtagatggcttatcagcataaggctagagagaggttgggccgaacaaggatgccaggccaaaacagccgttccctaagagctgcagagtgggaaagaaaaggctgaaatggacggaggagtcattgtacagtccatgcagcactgagagtttagaaggaaaggaaggattgcacgattttgaggcaattagcagagccttagatgctgcactcagaggcaccacatagctctgttgtacccatggtgtctattaggtctggttaacaaggacatctagcaaccatcaaaacagagcttctatgcccaatggtggcagaaaaggtcgttcaaaccaatcccagcactgaggatagctttagagtctaggcaaggacctcacaactgcctactgtagctccagtggatccaaagccttcttctggcccctgtgggtgctcacacatatgtgtacatatcaacacacacacacaataaaattaacgttgaa

SEQ ID NO: 3705 - DNA, 1000 bp, mus musculus
tttcacatatttacaacttttatttttctgtagcttaaaatgaggcctcagtgaagttatattttaaacatttttatttttaaaaaaaaatgcacaggtatgacctactcactcaaccacacttcccctcccctagcccctccccttaggaatgtatatgacagatacaaaatacaaagagattctactaagaactctaatggcgcaactacacctattgtactccaatgaacaaagcgaatcctaaaatagaaacatctgttaagcgccaggcactcaagctcacagaaacggaacgatgggcagagccatgctgatgaaaaggagggcccgtgggtgaaggacgtgaaaggaaagaacatctacagccccggtttgttgtagaaaggacagggaaagctgagggttcattagaaaaggaagggaaagacctgaagacagcaagagtctttgaaacaattgaggctgcattggaaccttatataggcgattcccgtggagcaagagagagagagggcacacaagagctcctaggtcagggtgaccctggctgaactcagaaaagacagctcacgtgggttgtgcaatgtgtctttccatcgttcagaacagtcggaaccagtcagggccagtggtctgctgctcaggcagggtaatccactcaaagtagtccagctagaaaggttgggaaaaggtaactatttaagataagctacttgtgtcccagtagtgccgcttcttatctaatagacatcactcctgcctagtcactggagcacagggataaaagctcctctttgaaggaggcagggcctttgccaccggcaaaatgttccccagcatcttggtcaacaggtcagcagagaggacaggttgacagagcactctctggtctacttggttcctagccagtatgtgagtaaaggtggctagctagtacacttgactcagcaagtcttcatggacgcattctgtattaggaatccagaacaagtttcaa

SEQ ID NO: 3706 - DNA, 1400 bp, mus musculus
tcccagacagaaacccagcactcattgccaattgttctccagctccttcctctgcccttgacaacgattggaatccactcctagcctctgaggatgtgtgtattatggctacacatcataatctttttatataagtaccattcattctcccattttacagacagagaagttgcagttcagagcagtccatgtgctctggtcaaggtcccagaggccggaggtgaagagggtaacgttttctgcactgagcaggaaagaaaggaggaaggccactcactgatagggccctcaggatcacacccttcgttgacatgttccaaggctggtctgggactgaggaggttttccagagagaaggggagaccattttggcaatactacaggccccagcaatgggaggccatctttgctgtagtggtagctggcagtccaagaccagagtagcttctgcaatcctgcctatggaggcctctagagcagcagcctctgactgccccctcctctcagtcctgacagctttgctttctggggacgctccacaagcaggctggccaggccactcctcttggagcaggagacctgcttctttctaacacaagccagtggccccaggctgcctgggggctgagggactgagggactgaggaacaattcatgaatggccttggatcagaggtacctggtcccactgagagttgtgtgaaccttttgttcccttcctgggaatgtgggagaagctgggctgacagctgcatgcccactgtgtccttaagccctgggacctttgcctcctctcagagccttacttaggctattaagggacactttctgggccttcatctaggccacagagacttgcagagcctcttgtcttacgtgtgggtttatggtgggtgtttgggtgtgttccttcattgtttctaaaacctagaggctcatggtttctttctcagactcttggtcccccactttcccagcattgccatgtagtaggaaaaacagggctcagagtgactcaacctagcctctgtggaggaccctccccttttgggcattgctttcactcagggtgtggcaccattggtcctgagggtcctcagaagggctatggttgcagcaagcagagagctccagatgggctgtgctgaagcagctgttgacagggttctgctagcccccagggcctctggaactcgatcatgacagcatctgtctgtgtctgctcccaccagatggatgagctgggaggtaaggcatgtggcttcctcctggcaatgtctgtctgtgaatgtgaccctgcagctgtctgcccacctcccccatacttcatctctctagaaggagtttccagcggtaacctgacctcacgggtgagcctactccttggggtcaggactgtg

SEQ ID NO: 3707 - DNA, 1000 bp, mus musculus
tcactgaagggacatgctagacactaccagaaagatccctgctttatattcattcttatgcccccagagcatttaatcaccatgggactgtaaagtcagggggtaactagaggctgtagccacactccatcatgtgacagaatggatgaagtctgactattaccagtgtgaatagagccattttgttggattccatcctggtggaatgaatagcctctgttctgtttattgattacaccctgagtagcgaagcagaggtggtgagcgctgcccaggaaaacactcagatgccattgtgtgcctttcactttggccaggccagataatcagtcagaaatttacttttaaactctaaacaacatgttcgatatccttacatcccacaagaataaaatctcgcagaaatagaaatgtcttaagtcactcatttccaagtccttttcactaaagcccaggctgctaccctgcctagtttacaaccccattgaacttcacctgaggagtggctcttgggtccctgccccctctgctctcttcctactcagtcaatagtattttaagaattctatctgatcatggcactgtcaaacgacttcttattgtactttgaataaaactcaaatccttgtggtcttgctagactagaagccacagagtcctggctaatcatctgaccttgatataacctgtggaggccttctaatcatctgactagctgtcactctgcctagatccctacaaagctgtcacactgctctcttcccgcacctaacaacatacttatttctcttctcctacttacctggaaacctttttcagtaaccttgaaatccttctccctctctgcccccacccccacaccatccctttatttgttccttggagattaagcgccatctctaagtatttgttgtttcatgtgtttatttgctcggtttatgtttttacaaaaccccattcaaaggatgaaggtctcatgatcatcttgcttactgagtag

SEQ ID NO: 3708 - DNA, 1200 bp, mus musculus
tatcctacaggcatttggcaatatctagttcattggtttatgatgaagtgttagagcattgcttgaaccttcttcctcttctctgagtatctatcctgatgacatttgtagtaaccacctccacactttcctttgtaacatttgcatattcacgtcccaaacactatggtttacctgtcctaatctctaaatcaattaaatcacataaaccaaccttattatattaaactactgtaacattgtaatttttattgggtattttctttatttacatttcaaatgttttcccatttccaggtctcccccttagaagccccctccccctccccctccccctgcctctatgagagtactctctcacctactcacccactcctgacttccctccctgtcattcccctatattgggactcaggcccaaagccctctcttcccagtgatgttcaacaaggccaccttctgccacagttgcggccagcaccatgggtccttccatgtgtactctttagttggtggtccagttcctgggagctctctggggtatctggcctgttgacagttgctcccttcatggggctgcaaacccccttagctccttcagtcccttctccaacacttccatcagggacccagcactcaatccaatggttggctctgtatttgtcaggctctggcagagcctctcaggagacagccttatcaggctcctgtcagcatgcacttcctcacccacaatagcatctgcgtttggtgtgtgcatgtgggatggacccctagatggagcagtctctagattgcctttccttcagtctctgctacacactttgaacatttcctcctgtgagcttttgttcactcttctaaaaagaaccgaagcacccacattttggtcttccttcttcttgggtttcatatggtctgtgaattaaattttggatattccgaacttttgggctaattttcacttttcagtgagtgtataccacatcataatttttataatttctacgatactgagtaagtttagtacaaattatataactacaatgctgttaatcgacatcatataaagaattattacttttttaacatttcgcattgatatcctcttttcctgtgaataaacatttttagattttttttttcttcttaactagtatgtcaattctagatttttcttgctttactttactggctaga

SEQ ID NO: 3709 - DNA, 1000 bp, mus musculus
tgtataaagtggcgtgtttgtgtgtgtgtgcatgtgtgtgtgagtgtgtgtgtttagttgtatttccttcagttctttttttattagatattttctttatttacatttgaaatgctatcctgaaagtcccctataccctccccccaccctgctcccctacccacccactcccacttcttggccttgccattcccctgtactggggcatataaagtttgcaagatcaaggtgcctctcttcccaatgatggctgactgggccatcttctgctacatatgcagctagagacacaaggggtactggatagtccctattgttccacctaagggttgcagaccccttcagctccttgggtactttctctagctcctccattggaggccctgtgctccatcttatagatgactgtgagcatccacttctatatttgccaggcactggcatagcctcacacgagatagctctatcagggtcctttcaggaaaatcttgctggcatatgcaatagtgtctgggtttggtggctgattgtgggatggatcctgggaagccaggagacaccatcaggttccctgaagctggagtaatcatcattagcagatcggaactctggtcttcatgattgcacaggaggggctcttaactgctgagccagctttacagcctgaagctattcgtgatagcctcatgatattgggaaatataaccccaaactcagcacttatgattttgcaaagtgcagagctaagaataaaactagtaagtaatggtcattgtgcttcagtgatatatataaactctttttatctcagttaattttcttagtaagtccatgtcagaggcaatattagttttcctcattagcaggtggaaaaactgctgcttaggaaaggtcagtagctctctaaagtcatggctgtcaaggttcaactgaatcacgggagtgatgccttttacacaatgccatattcaaacatttaaccaaattcactgaagtttgt

SEQ ID NO: 3710 - DNA, 1000 bp, mus musculus
caagctaatttgttgaagggcttgtgtccagtgtggcagtggacagaggtagctagaccatgtgatctctagtttctacaatagattaatgtattaacgggttctacttgactggactgttgaaaaatgttagaaactatagtatctatgggcaaaatacagtattagggtggacgcatatgtacctctgagggttaagtctcctctgtgaccttgcctctgctcgggcacttaggagttaggcagctttagtgcaccttatatcagccctgccccatcaggttctacctccacttgagcccacagaaatgggactgagagtttaaagctcctggacagagagcaaagcaaagctttcctttgtaagttgtttttcttcagtattttgtcacattgatggaaagctagcacatgtatacatacctgttttatgggaggggctgcacaataaatctctgccagaatattgctgctccaacacctaatacctgtaaatatcccagtaaatagcactacacatattggaaatataagctctgatgggatgacggatggaagtcaaaaatataaaaatgagagtgaagtagcggaacactgcaccacttcctcgggttggccagcactgtatgcctcacaggcattctaccagaattaaggtgaaaggcagaagaaagtgtgtgtgtgaggaggggtggggggtcagagaaaacagcacaaatgagcctgcaccaggtcaaagcttaaactgtagagttgggctggagtggctgtgttctctttttgtagatgaattcaaaacagtatctctatctagaagtgacaacattgccaagaccacctgggtcagacttggatttctgcctttgatgatctgcatatctttccatacccgtcttactactgtcagtaggataagcatctaagaagatgggttctatttctttgttttctccccacggggtactggtttattagtatattgagtctaaaagtcctatgt

SEQ ID NO: 3711 - DNA, 1000 bp, mus musculus
ctatcaccatctattgtgtgttaacaaatttgctttcaggagctcttgactctagctgcatatgtatcaaaagatggcctagtcagccatcactagaaagagaggcccattggacttgcaaactgtatatgccccagtacaggggaacgccagggccaaaaaatgggaatgggtgggtagggaagtgggtgggtgggtggggtatggggaccttttgggatagcattctaaatgtaattgaggaaaatacgtaataataaataatatatatttttttaaaaagcggaaagagtaaccctcctctttttttttttttttttttttttttggttttttcgagacagggtttctctgtgtagccctggctgtcctggaactcactctgtagaccaggctggtctcgaactcagaattccgcctgcctctgcctcccaagtgctgggattaaaggcgtgtgccaccacgcccggctaagagtaaccctcaaatcggaaaacatactgtaacactcttgaaggagagaaactgaaagtccattacctgtttagcaagctatactcttagggaaaactcgactctaccaaaaggtccaacactatgtggtggtttactgttagactgtaattcaatctccatatttcgctgtaagattgtgcactaaattgcaaaaactgttgattgctagtctcatgcatagcccaaaggtaagtatcacagggaacatttgccaatgtattcttcaaggatatactaacctaaatatcagaagttgtgagacctttttgtttttgttttgtttttagagacaggcattctctgtatagccctggctgtcctggaactcactttgtagaccaggctggccttgaagtcagaaatctgcctgcctctgcctccagagtgctgggattaaaggcgtgccccaccatgcccggcagttgtgagatttttaagtgcataacaaactgctgtgtctcataaactagacactaccaaactt

SEQ ID NO: 3712 - DNA, 1000 bp, mus musculus
aactattgaaatcagaaaaatggaagtcacttatcagtgaggtctcaaggtacacagagtagaatggaggatatcatgcaggcttcgaaggcactgtactctggaaaaccacacaaggtatggaatgctgggcggtcctcagcagctgagaaaagctagtgaacaagcagggttgtcactgatgcagctgaaaggaaattaattctgccaacaaccaatgagactgcaaaggagttctgagtcccagatgaaaattcaacttcgatcagtacattggctgttgggggatgaaattgtgagcaggggccatttagctcacagggtgacttctgacctacaggaatactcaacagggtgccttaaaatcatagactgcctcttctcattgggacccgctttgctggagagatggagcaggtcttcctctggagtgctgtacatctaatctcccatgggggggcctctctgtgctctcagacatggtccccaccaagccaacctgcctcctgagcaagacaaggactctcatccttgtgggacccaaccagagctctctcctcctgcccttttccctttggtccctgggcttaggcctggggtggggttgggggtagggagtgagggctggggggttaggggttagggagaggttggtgagagaggggcagggagggggacaattcattttcagctcttccacaacatccagagacgtttggagtgtccaagagcctgagaacctgtcatactctgtgcaggtctgggacacccaagcagaatctggtagtagagaggcacagtctgaggcctcaggaacctcagactgtgcctcccctccctctggagtggggtgctgaggcttttcacagcccgacaccagtcaaacttgcagtgtcctcctccatgtgcagtcctagccctgtggcagagcagatgccggacaccattttaacccacatacatgacctatttgaggtacagttatttggataataagatc

SEQ ID NO: 3713 - DNA, 1600 bp, mus musculus
ctcaggtgacaacacatgttgaagaggatgtggtgaaagaggaacactcctccattgctggtaggattgcaaactggttcaaccactctgaaaatcaatctagaggttcctcagaaaattggaaatatatctatctgaagacctgttataccactcttgggaatataaccaaaagatgtcccaccatgccagaggggcatgtgttccactatgtttatagcagctatatttgtgatagtcagaagctggaaacaacccaaatgtccaatgacagaagaatggatacagaaaatgtggttcatttaaacaatgaaatattactctgctactaagaacaaggacatcctaagttttgcaggcaaatgatggaactaaaaaatatcagcctgagtgaggtaactcaaacccaaaggtcatgcatggaatgtattcactaatgagtggatattagaaaaaaaaaggtttagaatagccaagatacattctacagaactccaaaagttcagcgagctgaagtacccaagtggagacacttcagtccacttgggagagagctgaaagcaatcacaagtgggaagggagagagggacctgggaggaaaagtgagaaagtgaagtggggaggagaggggaacctggtctgttactgggagagagaaaaggactgaagccctgagggctaacagaaagaatgcaaacaggtaagctcagggagataggaggttagggggaccctccagaatgcactagagacctgggaggtcagagagtctaagaactcaaaggcagggaccttaaaagacatgctagagagtaggaagagggaacttacagagcctacctccagcaggaagacaggacatcaagtgaggaatggtgttgccatcccacagtctcaactctgatccataattgttcctgtctgaaagaattacatggatgaaaatggagaggagcctgtggagaagaaggtccaacaacagacccaaagtggaatccagctcaaggggaggtcccaaagcctgacactattactgaggttatggagcactcacaaaaagggacctagcatgacagcactctggaagacccagcaagcagctgaaagagtcagatgcaaatatttgcacccaaccaatggacagaaactgctgactcctgttgttgaattagggaaggctgaaagaaactgaggagaagggcaaacctgtaggaggaccagcagtctcaattaatctgcacctctgactgagatctctcaaacactggaccaccaatcaggcagcaacaccagctaatatgaggcccccaacacacacacagtaaaggaattctgggtctctgttcattcagagatgatacacatgatgcacctaaccctgaagaaactggaggtctcagggagttcataagcatggtagggttgggagtgtgggcatccatgtagagatgggatggagaggaggtgtgggatgtggaacagttagagggtggatgtgggggagggaataaactatagttaaaaagataaattaattatttatagtataaaaagataaataaataaattaattaattaaaaatagtcaatttttactaca

SEQ ID NO: 3714 - DNA, 1000 bp, mus musculus
ctactaacatttactaggtgtcttagggttttatgactacaaaaagacaccatgacaactcttactaaggacaacatttaattggggatggcttaaagtttcagaggtttagtccattattgttatggcaggaacaatggtggcaaaaaggcagacttggtgctggagaaagagttgagagttctacattttgatcttcaggcagtaggagactttgtgtcacattgggcatagcttgagcataggataactaatttctatgcccccactgagacacactttcttcaacaaagccacacttacaccaacaaggccacaatcctatgggtcaagtattcaaatgcaggagtctatgagggcctttcctattcaaactatagtagatgacataagattgtacatggttcgttttaatgttctgcaacttttaatttttagagtactaaaattgccccactattgacattattttctactttaggtgtttaagattttattaagagaaaatcttctagattctctttactatttttcttgttctgtaagcatgagaaaaatacacatagaattgacaagctacagtgacaatgtgttgcaaagaaagggaggcagtataaaacttgaaacaatccaactgttctttatatgatacaccatttgttcccaatcagaaacattaaatgtctttttttataggtatttatttcatttacaattccaatgttatcccaaaagtcccacacacacttccccacccactccctcacacacccactcccacttcttttctaaggaacagccagactgatttccagagtggttgtacaagcttgcaatcccaccaacaatggaggagcattcctctttctccacatcctctccagcatctgctgtcacatgaatttttgaaattagccattttgactggtgtgaggtggaatctcagggttgttttgatttgcatttccctactgattaaggatgttgaacattttttcag

SEQ ID NO: 3715 - DNA, 1000 bp, mus musculus
ccatatcagacaatatatacttctaagcagtgtgtgtgtgtgtgtgtgtgtgtgtgtgtgtgtgtgtgtgtgtgtatgtgtgtgtgtgtgtgtttatgcttatgttccttccagcttacaggtattattctccatgttaccatctattgaacattataaattttctctgcataaattcactgtagaatacttgaagtaacattagtgtcttatctctctaacagaactactttttaataaatttgaatttaatttagttttcttacttaattgaaaatagtgtttttcatacaatatagatcatttttcaccttcaccaactcttcccaggtttacccctcacctccctaccatcccaacaccatgtcatttatctctctcttggaaaacaaacaaaacaacaatagaagacaagacacacacatacatacaaacaaaacagaaaccaaaatatacaggcaaaagaacaattagacaaaaaaaaaaaaagcccaaagcaaaataaagcaaagcatctataaatattaataccattgagttcactttgtgctaatcaaccactcctgggcatggggatgacaatgatgtgtggttaggcttacccaacgagactccattgaaaaaaaactaagttttccatctccagcccatatcagttccagatagtttctactgtccatctcagaactgggacttgtgcaggccctatgcacactgccaaaggctccctacagaatttttgttgtttgttttgttttgttttgttttgagacagggtttctctatgtagccctggcagtcctggaactcactttgtagaccaggctggccttgaactcagaaactcacctgcctctgcctcctgagtgctgggattaaaggcgtgtgccaccaagcccggtagaattgtttaaagacagagttctttttatgtttttacctaagttattcattgacttcaataatttttgatatatgatagatacatcaacaccttaat

SEQ ID NO: 3716 - DNA, 1400 bp, mus musculus
ctccattaccctcttatttgttttccgtccttttcccttggtttctttccaattgccagttatttccctttctggtttattgttatttgtttgcttgccttattgtgtttgctgacccattgccttttatcagagtttcttacatgattatgagtgagggatcatttataatagtatactctctctacccaagtgtctcagatagttttctgttgctgtgacaagataccctgagaaaaacaactcagggaaagatggctttactttggctcatagttcagactacagtacaatcatggtaagggaatcaaggcaggcagagcataaagcatgtcatcacatcgctcccagagtaaggaagcagaaagcaatagttgtgcttagctgaggtggaaatttctggtatctttggagactttagttgtacaggcgatgtttttctggaagctgtcttatgaaaggatgtttttgctgaagcagacgcatgggaggatgctttcttgagaacagacacgtggtgtttctctggaagcagcctggaaaaggggcatatgatgttttgccagagcagatgcttgacagaacacatgatatttggaaagggtataaatataacccaacagacagtggacaaagctgagtggtattgattccccttgtcactctttgctggtcattgtcagacttcattgagagaaatgcatgaaagaactggtgggattccagtggcttcttgtcacttccatggactcagggagattggcagagcctcaaggatttctggatcaaattgcctttgctgactcgtgaatggtgtttgtgggtggagggaactacagctactgattcctatgaaccgaactacagataccctgacaatgcagattggatactttacaacaagttatttccaagcaggtccacatcctcctttgtcccattaacattttttccactacctctggtgggtggtggcctagaagtgaggttaaagcatgttaagtacacttatgaaagaaggttttgaaaaatataagtctacactcaacccattctctccatttagtacagtacatggtctccacccaggaaatagtttactgcatagctaaaataagtcatcatctctaaccaattaaccttgtcaagacaatcccttgcaggaatggttaggggccgaataatcgcttgcaggtctccctgaaggtgtttctcttaagagattcttgatcctgtggcattggcatctgtcttggttagtttcaggtgctgtgacaaagaacatgactaaaatcaacttagggggcaaagagtttcttttagtttacaatttcacagtacagtccaccactgaggaaagtcagggaggaaaattttggaggtcaagaacctggaatcag

SEQ ID NO: 3717 - DNA, 1200 bp, mus musculus
tatatatatatatatatataatgcgcacacattttcaatatttacctatttgtactaaagttaagatactgagaacaagagaattttgtttctcttgatagtgttatgcccacagaaaattgcacacagtaaatacttattagatgtctgtgaattgacatccccagatcaacagatgttgaagtaatggggctatagaatataatgtgagtgtccaacttgacaaaccaaatccttcttatcacacacagagaagctcagctgagatctgatgagagcctgccagtgtagttgctactgtgcttagtgtaactgagatgatcaaacagtcctttgccccttagaaaatatgtaactcatcatgtctaccctactacccatcccttcacaatgttatctgcagttatatttgacactgtaaaattaatagaccaagtggctctcagaaaagatccagcctgaaaagggagcttcccactatatggtgcacagttagaaacagctggtctgtaggcagggagggatgctgactgcttccgaagcatttgctgtgtcctgttgcccatcctggagcactagcccagctcacccactcttcctggagtgacacatatgcatagcatgtgcctatggctgtacttggttattcaaaacatatctgaagcccacaataacgagcttgtgaatatggaacagaaaagttccagtcaaaaatgaatatgatggaaaaaagtgtgcctttgtgatgtgtcaaaaaagatggagcccttgacttggtgacttagagcactgggaagtccatcattccaaaaagccaagattcctgaactgaacactggccaagcaacataataaactgcctttctcaccaacatacaaaccctctgctttcatataaaattacagttaggtgacaacactgaaggtgagtttttggtggctaatatcttaaccttcatcaaaaatctactatagatcatgttagttggttttctgtgactataacaaatggcaccactacattacggcgggtcttccctcccaggtaagcttccttggactcaccctaacggacatgcccaaaggttgtttcctgaataattctaaaccatgtcaagttcacaatcaagacagacaacacaacaccacccaatgttttaatttccctctgaatgactcaaatacctcccaatcatactc

SEQ ID NO: 3718 - DNA, 1000 bp, mus musculus
tacctcactcaggatgatgccctccaggtccatccatttggctaggaatttcataaattcattctttttaatagctgagtagtactccattgtgtagatgtaccacattttctgtatccattcttctgttgaggggcatctaggttctttccagcttctggctattataaataaggctgctatgaacatagtggagcatgtgtccttcttacctgttggggcatcttctggatatatgcccaggagaggtattgctggatcctccggtagtactatgtccagttttctgaggaaccgccagactgatttccagagtggttgtacaagcctgcaatcccaccaacaatggaggagtgttcctctttctccacatcctcgccagcatctgctgtcacctgaatttttgatcttagccattctgactggtgtgaggtggaatctcagggttgttttgatttgcatttccctgatgattaaggatgttgaacattttttcaagtgcttctctgccattcggtattcctcaggtgagaattctttgttcagttctgagccccattttttaatggggttatttgattttctgaagtccaccttcttgagttctttatatatgttggatattagtcccctatctgatttaggataggtaaagatcctttcccaatctgttggtggtctttttgtcttattgacggtgtcttttgccttgcagaaactttggagtttcattaggtcccatttgtcgattctcgatcttacagcacaagccattgctgttctgttcaggaatttttcccctgtgcccatatcttcaaggcttttccccactttctcctctataagtttcagtgtctctggttttatgtgaagttccttgatccacttagatttgaccttagtacaaggagataagtatggatcgattcgcattcttctacacgataacaaccagttgtgccagcaccaattgttgaaaatgctgtctttcttccactgg

SEQ ID NO: 3719 - DNA, 1000 bp, mus musculus
ctacctgtttggttgtgttttcctgtctttctttaaggagttgtaactctttagcagtgttctcctgtattactttaagtgagctattaaagtccttcttgatgtcctctaccattatcatgagatatgcttttaaatctgggtttagtttttggggtgtgttggggtggccaggactgggtgaggtgggagtgctgtgttctgatgacggtgagtggtcttgatttctgttagtaagattcttatgtttgcccttcgccatctggtaatctctggagttagttgttatagttgtctccagttagagcttgtttctttcgtgattctgttagcctctatcagcagatctgggagactagctctctcttgagtttcagtgatcagagcactctctgcaggcaagctctcctcttgcagggaaggtgcacaaatatctggcatttgggcctgcctcctggcagaaggtgaaggtccgaaacagggcctgtctcagaagctgttagcttctgtagtccacactctcacctgcagagactagtcttagagggatctgggaaccaatatggctcccccaggtgctctggcaaagccctcctgggcagggtggacacttctcctctggcagggaaggtgccctgatgtctggagcctgaaattgtgtctgcctcagaagctgtcctctagggatcttgggggtgtctgccaagtctgcacccaaggtaaccaggtgctggtgctgactggaagggacttgtgaccctggtcaggctgggttttctgcttccctaatgctgtcttaggtcctgcacgattggattggaacagaagttgtgttccactcaccagaggtcctaatatcgtgtggagagtcctctagggaccttgggggtgtccactgactgtgtgcccaaggtgacccggtgctggcactgaccggaagggccatctctttctttaggttagggaagttttcttctataatttggttgaagatatttat

SEQ ID NO: 3720 - DNA, 1400 bp, mus musculus
gcagcgtctcaccaatctctccggcacccaaagaggttccgtctggtcctgtggaaacacacaaacagaccctctcgcccacatcaacaccggatctggtgaatccccaggggggatggacacaatacctcgtggtaatgagaccataacctcaatcacctgtgtgtccatctggggagtcaatacgagagtcaagctttcactgctgaggaggcatagggaggaggagcaaaagctaattcgccttcctcctccgcctcagctcttttattttgtcctttctgtccacctgataacactgtgtctcctttctttttcctttttctttttaagcccttctccttttccgacatactttcttgttgctctgtaaggattttctgacctgtcttgactgcctctacacacagtttcaaacagtaacagagtccatatatcagaacaaacaagaccaaaactatcagacctacccacaaagggtcaatgggagaaaaaagcataactacacagcgaggatctattgatcactacactggggttatcacaattccttaacttgtcccaaagccttgaacctaaacttgtccctattatcctcttactttcactttctctcttactttcacttccttgtctccagagccggagagcctatttgtctctttaccgagagccttactgtctctttaccgagagccttactgtctctttaccgagagccttactgtctctttaccgagagccttactgtctctttaccgagagccttactgtctctttaccgagagcctaatcccaatcccgggatactgagttactttgtgcctgcttcctggcaactttatacttgcctctattttatccgaggtccttcccaaactcctgggttactttgtgcctacttcctggcaaatttatgctcacctctattttatccgaggtccttcctaaactcctggggtcgcaagtttcactcaccgtgaacttaccctgccggcaaccactgactgctgaaagttctgaactcggtgggggagtcggttccccgtacgggccaccaattgtcgcgcccactctcaaccagcaagaacgatgcgaccaccagtccttctaacagcagtttattcagtcctcatctttcttctttctcttcatcagtacctttccccagctgaatagttctgaatccacgccggatccttctcaacagtctgtttcacgggaacctttattaaccccttcttccccgttatgcagttctgaatcctccctgtagcagggggtcttcgctcttgcctgaagatgtttcttttcccgggtttcggcaccacttgttgcgcgcgctcaactggccaggaagaacgacgctgctacaggatccttctgcacacatttattca

SEQ ID NO: 3721 - DNA, 1000 bp, mus musculus
actgcgagttcctgggaaggttgccccttggagatacactgggacagggcctccctgcgtggaattgtgagcaaatttttaactatcaactcactgagccttgggacagcagaaaatgcagctaaattacatagtgtgcctctggcatgagaaacaaaccttgggccagaggaaaggcttcaaactcatagtcccatcctctgtctctacagagcagctgtcagctccgattaacttctctgctcgcaaaaatcttcagctctctgaatggttccatcctttcggtcctcctttctgctatggtctgtggcttggctgtttgatgagctgtcacagctggctgatcagaacgctgtccaatcagcttctccagtaacagcctgctgcctgaccttgttctcacattgcctctcccattcctctgatcttgctgcagttcaactcccttcccctgctgtctgatccccttcctgtctaatcagcctgatagacagtttgattacctgctccttcctctcaccctgctggcctccctgctgctaccagctgtactgtggcctgccaggaactcaccatcagttcctctgaccctccattagttctgccggctgatcgactttatacttttttcccccagcaattctgtgatcccctgttgagtccttccactagtgcttctgatcagctgcctgacattttctcctttggttcctattcgattcccttggtgttgatcaaacttgtctggtgttctatagcaggagttttctttcttagtctggcactggggatacccagatggctatctttgacaagtgacaccatctaagcttggccaaactcctcctgctccctccaaatcttcccccagagagtagcatgtggtgttgggatccagatatggccttttgtatccaatgagttatttatacatttaatttgtaattatgcacttttcttggaacaacttgactactgtcgtcttcaagttagttacaga

SEQ ID NO: 3722 - DNA, 1000 bp, mus musculus
tttctctcatgtattacaacttgaacagatatttttccttccttccctcctcccagtccctctcctgtaactttaatttttcagcccttatttttaatgatggttcttaaatgcttaaatctctcttttagcccaccacccatcagaggcagtggaaaagaaagaatatgggggaagtgggcctgtttggaaatgttcttttgagcaactcccatctgtgttttccggaaattggcagttcagttcataggagtcagcagcagcacctctagctgctcacaaatactttatgaacacattgcagatagcaaacagaaatcagcaacagtggcactatataacagaaatagccagggctcagtcttgacatgagtcagcaggagggtcccagagggtctccaggagaactttttagctgtgcctctctcagagaagcaaagatcatagaagctgcaaaacccacaagtgttgtgtagctagctctaccagcaagtcaatcttagcctttcactgtccatcacattctgtttatactccctctaaacatcatgtgtcctccatgggtcttgcctcaccacgtgtcttgcccaggtgacatcactctgccaatcaccctgagtttgcaaaagtggcaagaaattgtagcataccaccagaagatttggtgtgtttctttctatggagtcctgacaaataggactcaattatgcagtataaagtgaactaaaacatgcatatcattaacaaagaatcccttatcatgtgtcctttcatgtgcttgctctagcagaacaacctctctcttgtgtctgcttcggtgaaaatttccttcacaagtctgccttagcctttcacttgtgtccacttcaggaaaacattgtttcatgtgtttgtcccagcaaaatactgtctaacacagctgacttttcaaagaacccttcagtttccacttcattccctcctacatctacttctacttctttccttcctctgcttccct

SEQ ID NO: 3723 - DNA, 1000 bp, mus musculus
ataatacagaactcattctgtctttgccatcagttcccctgactctcgggcagtgacatgtggaatggcgtctctgtctgcagagaaggtcacactggaccaaagggactatgagaagtattcagtgtcctgccaggaggatgtcacctgcccaactgccgaggagaccctgcccattgaactggcgttggaagcacggcagcagaataaatatgagaactacagcaccagcttcttcatcagggacatcagtgagttttgcctgggagcaggtgctagggaagcaaagacgatgtctgccacgtgtccatgataccctggggcataggattggcctgcattcttttccattctcctaaaaagcatgatacagacactaccctcttcatcttacagatgaggaaattaaagggttaagctaacctttttccagatctcaaatctcacagacagcagaccagacccagacctgccccaatggtggcacctaatggattatgggttaactacatgcttagtgtaaagcagaaaccaagcacagggagggttccctgattgctgagcccagatacgagactctattaagcagaatgactcaaccagtagggacttccggtctgtgcagtgcagaaagggttctaaaatgtaggatatggccaataatggtgacttcctcgagtggaaagatcactctcagcagatccctcacaggtgctgccctgatgctcagagaagtgaaagagctattccagagactagaaggtggagggctctgtcagccaagctcaggagcctaagtcctagctccaaagcctggccaggataataaaggatgcttgtcttcttctgcagtcaaaccagacccgcccaagaacttgcagatgaagcctttgaagaactcacaggtggaggtcagctgggagtaccctgactcctggagcactccccattcctacttctccctcaagttctttgttcgaatccagcgcaagaaagaaaa

SEQ ID NO: 3724 - DNA, 1000 bp, mus musculus
aagaaaatgctactacgggtagatttttaactggttgtagaatttcttgaagcagatacatttgacaaaatccagttttagaggacagtttagtactaagaagcttcaaattgaaaatacatcaagaatacagatgatagtgaaatatttggaagttagtttagtgataaacatagtagatctgtttttgtttcacatgtatgttggttacctctatgtatgctggttacctacatataacctggttgcctacaggttatcaaaacttttgtggcttttttttattagatattttctttatttccatttcaaatgttatcccctttcctggcttcccctctgaaaacccctatcccctccctactccccctgctcactaacccacctgctccagcttcctggccctggcattcccctatactggggcatagaactttcacaggaccaagggcctctcctcccattgatgaccaactaggtcatcctctgctacatatgcagctagagccatgagtcacaccatgtgttttctttggtggtttagtcacagggagctctgggggtactggttagttcatattgttgttcctcctatggggctgcaaaccccttcagatccttgggtactttctctagctccttcatttgagatcctgtgcactgtctaatggatgactgtgagcatccacttctgtattagtcaggcactggcagagcctctcaggagacagctatatcaggctcctgtcatctagctcttgttggcatccacaatagtgtctgagtttggtggttgtatatgggatggatcgccaggtagagcagtctctggatggttattccttcagtctctgctccatactttgtctctgtaactccttccatggctattttgttcccccttctaaggaggactgaagtatccacactttggtcttccttcttcttgagtgtcatgtgttttgcaaatggtatcttgggtgttctgagcttctgggct

SEQ ID NO: 3725 - DNA, 1000 bp, mus musculus
agttttcaccaaactcctcccctcaaggctcagtgatctatgcagaggaaagtttgtaagagccagtgattctcagtgattctcgatgactccagagaaagcagtgtgcttcagactcagcgggagtgatgcacacatgaatgcacagagactgtgacagcacacgtgagacctgtgaaggtacaaaccagacaagatcccagcaccaaaaacggaaagaaacacttcctttttctttctttctttgtttctttctttgtttctttctttgcttctttctttctttcttcctttctttctttctttctttctttctttctttctttctttctttctttctttctttctttctttctttctttctttctttcttatttacacctcaaatgctgctccctgtctcagtcacctcttcacagagtcccttccccaaccagaacctcagcccctctttctctgagaaaatgccgaccctgggtgttccccatcccggcacatcaagtctctgccagattagactcatcctctcccactgaggccagaaaaggcagccacagagcctgagctgcacttctgctacatagttgtcagaggacttgttccagcccatgtatgttctttggttgctggctcagtctttgagagctctctagggtccaggacagttgagtctgttggtcttcctttggggttcctgtccccttcggggttttcaatccttcccccatctcttccataagagctccgacctccatgcaatgtttggcagtgggtatctgtgtctgctgggtggagcctctcagaggacagttatgctaaactcctgtctgcaagcatagcagagaatcattaatagtgtcatggattggtgcttacccatgaaacaggtctcaggttgaactggttattggttggacatttcttcagtctctgctccatctttgtccctgcaatttttttagacagaacaaatttggggatgaaaattttatgggtgggc

SEQ ID NO: 3726 - DNA, 1000 bp, mus musculus
ccttttatgaccttcagcatagaaggtaaagtcattttatggggcagacaaatgagccaaccaaaatcatgtcctgcttgcttacaagtcgctgctccagaacttgctaaataaactatttgtgggaagagagtgctgacctccacctacttagtttccttttctggaactacttgtgtcatgcaatgacccctgtcctctcaagaggcaaagccctgtgtcagtcacatccactcaaacctggaagcactgagacatgatttatggcaagaagttctcaacatctcccacgggaccattcagttctctgtacagaatagggaagagtcacaaacatggtggggttggagtgcagggaaagccatagacctccaattctccttcactctcccactgtaattaaacacctattctgaagaagcacgatacacttccctaccaaagagcttccaaaccctgaagaggcagatgtgaattagctggttagaatcctgagatagcagctatcaagtagggatgctctttaacaggtatcaccaaatgagaacaactctaaatcagtattgtactggataccaggaaccagtgagaagacagacagaagttgtaagaaatcactctggcaactgcaggccaaggggtgagacatacagcaggacaggagagctctgggcttgttgccagctttgtttttcacttgccttgtgaccttgggcaagatacacactctctgtggccttagtctccacatgtataagacaacactaatgacaacttctttggatgggtgcagtgactggaaagacaatttatttttaaaaacatccccggtagtgtgtgatagattggagaccagggactctacccaacacagatgcaaactttaaatgtagttcctgccctcattttacaaaaagaaaactgagggtccaggtcactgctcagtgctagcaatttcaccagcatacttacagccttaaataatagaataagtgctcca

SEQ ID NO: 3727 - DNA, 1200 bp, mus musculus
tgtaactctttagcagtgttctcctgtatttctttaagtgagctattaaagtccttcctgatgtcttctaccatcatcatgagatatgcctttaaatccaggtctaggttttcaggtgtgttggggtgcccaggactggcttaagtgggagtgctgggttctgatgaaggtgagtcgtcttggtttctgttaataatgttcttacatttgcctttcgccatctggtaatctctggagttagttgttatagttgtctctggttagtacattttcctctcgtcattctgttaatctctaccagcagacctgggagactagctctctcctgagtttcggtggtcagaccactctctgcaggcaagctcttcctctttcagggaaggtgcagagatatctggcattcgaacttgcctcctggcagaagatgaaggcctgaaatactgcttgtcccagcttctgtagtccacactctcacctgtgcaaactagtctcagtgggatccaggaaccaagatggctccctcaggtgctccagcataaccatcctgggctgggcagacacctctcctctggcagggaaggtgcccagatgtctggagccggaaacagggactgtctcagaagcactgtcgctcccacttgtcccagaagctgttagcttctgtagtccacactctcacctgtgcagactagtcttggtggaatctgggaaccaagatgtcttccaaagatgctccagcagctccttccctgtattcttctcaaagaggaggaatcttgcagtcactatcaggaaaactgtgtgcttttaagacttgtatctacatcatttacaacatcagaattatctgataggggattaaaccttgatccatgggactcaagcaataatcaatctatatacttggggggcttaagtgcaaatactctgttagacttccaatgctagatgaagcaagatttatttttctggtttctcttggaatcggggaagagttatgtagaagttaggccctctactttgggtcatgcaggctaaacccaaagtgagctttaattgcactgaaggcttagattcttctcttaagctctctggccattgacaggactctttcccttgcagctatatatcagtgaccgctttttcctttccagagtttcctgaggaccaccctcaccttttgagccttgccaccaggat

SEQ ID NO: 3728 - DNA, 1000 bp, mus musculus
gtaatttctgctctgccagaggatctgaactgaattcccagcacccatgtccagcagttcacagccatttataattccatttggacaggtgttatggtttgtatatgctcagtccagggagtagcatttttagaaagtgtagccctgttggagtaggtgtggcctcgttggagtaggtgtatcactatgagtatgggctttaagacccttatcctagctgtctggaagccagtattctgctagcagccttcagatgatgatgtagaactctcagctcctcctgcaccatgcctgcatggatgctgccatggtcctaccttgataatggactgagcctctgaagctgcaagccagccctaataaatgttgtcattacaagagttgtcttggttggtggtgtctattcactgcagtaaaaccctaactaagacaacaggtgtctaatacctctgcagacactgcacatatatgcacataacccacagagacacacacatatacataattaatagtaattagtaataatacccttttcaagaaaatggatagaaccagagagcattgtgttaaataaaataaaactaattcttcaaggccatcctggtctacagaatgagttccaggacagcctaggctacagagtgagttccaggacagccagggctacacagagaaacactgtctcgagaaaaaaaaaaaaaactaattcacaaagataaatactgcatgttacccatcatttataaaatctaaaaaccccaaaaagatggaaacagaggggagttataaagaagtggactccagggaaaagatcaaaagagaggaaagaggaaataagtatgatcaaagtacaattataaaagaattacaatgagacaccttattttatagaattgacatgtactaattaaaaaagactaagaaattagttgataaggtaggggtaccagagggatgatgggctaaaagagtcaccgtgagggacttcctggtgtgattg

SEQ ID NO: 3729 - DNA, 1200 bp, mus musculus
ggtgatgtttccaagtatcatctcacacatgtatttaaagatataatacacaggtgtggatactggagacagagcaagagtgtaggaaggatctctccatcatcattgtctcatggttggaaagttattcatagaacaaatgaatgttaatactttgtaacaactgcagaagccagatgaagatacacagtgcctaggtttagtataatggatgattaaagaaaggaagagacagtcagacagacagagacagacagtcacagagacagacagcacccatgaagttcagtgggtagagagatgggaagcatctgggacaagctgaggggaacatgaccaaaatataccatgaaaaatattaatgttttaaaaagggatgcatcaagaaagcaggatggaaagtgttgtccatggacctttgctcctaactgcaagcagcacaggcaaagatggtttccacctagagggaagagaaagaattaaatccagtccttagcctagaaacccaggacagagccaccaaggtgaagcttggtgctgtttggagccctgtgacccttgcatctccagaaaaagcccagagctacattagcacaatgagtgggggacgttgccgtacacttcctaatcttcaacaacagaggcatgacaagaccctgcctgctgggcatagaagctgcatttggctttggagctcagtgcagggctatcatggtgaatcaacaccaagaagatatcaaaggtccctcttagacaagcagtggtctgcaggagagtcttttgacctgcccccaaatcaggcagatatgtacacaactgtaataaaaagtcaagtactagcttgcattcatagccttgaatgggcctctaccctggactacacaggactcggttattataagacttgggcgggcctaggttagcatcagccttggcaggaactgtttccaccaccctcagccagcatactgcagcccagctaaaaacatggactccatcagatggagctatagacttatctcagtgatacgtagaaacctgtgccaatatgggacagattcatagtttgacctgcagtgatgtcagcacactagaaatgaggatggataaagacacttccagactctcagaagttgactaaatatagctccacacaactttcctatataaatgctgaaagttctctgctctccagaaaat

SEQ ID NO: 3730 - DNA, 1000 bp, mus musculus
ggtggctactgtcagctccttctagtcttgatgtcccaaggcctacctggctgggcactacctgtgtcctagtagggctgtgtctctttactcaatagaagttcccactccatatctgagactcaaggatttccctaaaaatgccacccaggggcaggtatttttccagaggccccaagaaggggaacctttgctttttcctgcagtccagccaatgggggccgcacctgctcgggcctggcctatgacttccagctctgcaacccccaggactgtcccaattccctggctgacttccgggaggagcagtgtcagcagtgggacctgtactttgagcacggtgatgtccagcaccactggctgcctcatgagcaccgggatggtgagcttctggggaaatgggtgggagtcagttcaggacactgggcggggcaggcaggggcatgcactgttgtacacctctgatcctgcaggaggcaaatctgtggtgatgcttggaccagaagcagggcgcagtgctggctagtgtggctccagggtcccactcctgagcaagggctctgggctggggacagggcttcagttccaagggaaccagaacaccagatgtggaatgaatgctgggatggaggttcagagggcacaaagtcctacaatacccatgcagggaacaaggctggagttgcatggcacctcaggtgttgggtaggggcagaagttgaccccgtgaggcaattaggtgacttctgataggtaactgagctggtttcttttctgttgctgtgataaagtaccccaacagaaacaacctaagggagaaagggttggttctagctaacagttccaggctacaatctattatagcagggattacattgaggccacgggcacttgatacattcagagtcacgagcagagagaaaaagaatgcatgaatgtgtgcatgcgttcagctctttctctctttgacacaatccagaacccaaacccagggactgac

SEQ ID NO: 3731 - DNA, 1000 bp, mus musculus
gtctgtggtgatctgataggatgcatgggataatttcaatatttttgtatcggttgaggcctgttttgtgaccaattacttactttacatctcaaccacagtttcccctcccttttctctctcccagtccttactccacttcactgaccccacctacccactcctcctcccactctcttcagaaaagaagagcccccctccatggataccaactgtccttggcatatcaagatgcagtaatactaggtgcaacttcccttgatgctagaagaagcatcccagtagggagaaagggtcccagataaggacaacagagtcagaggcagctcctgctcctgctgttaggattcccacatcaagaccaagatgcacaaccattacagtctgcagagggcatagggagtcccatacaggctcctggctggtcgtttggtctctgtgggcctctatgggccaggtcagttgattctgtagattttcttgtgctgcataggattcattatttgtatggctcttttttgttagcttaattgaagcaaagaacacacttacctatgcttgctccttttatactggtcctccttccttatttagttccaaggtggtcccttagaaccacatcacatcacccctttcaaagaacatctgtaccatttcttccaaggcaagtttcctagaaacaaattacctacaattttatttgtaatagcaagtatttatttcttcttttgtccaaatgcttactattcttagaataggttaatagaataaatgatttggagcagtttaactcatagcaacagtgtacagaggcttcccacacagcctctgaccaacgtgtgtacagcctctacaacaagaccacccagagcctgtaggttacactgggcttcactgtctgtttcaagtgtgtttgtaagcacaggtttaaaaaatctttgtcaaaaatcaagtccatcatttttgccactcagtttggggtgttataaataagactata

SEQ ID NO: 3732 - DNA, 1000 bp, mus musculus
gggtaaaacagggaggcattgctgtgggattctcccagacagagaatgtataccactgcatgcttgacttctctccatgggcggacaagggagcgtggagctgctgctggagagagatcaagttctttacctgcaaaaatactggcaaaggacacatggcgggatcgacggcgagtcggtcaagtcagcaggaacaagcctccgccgtcaaaatggcctgagtgcgcgcttgcgtgcgcatgagcatgactggaagcgctttgtgtgcctgtgcctccaattaggctcttatgtggcgccggagcccgtgttatgcaaatgtcagggtgtttgtgtttgggtgtagtgtgtgtgtgtgcacttgagtttggccccttagggctccctatgggaggagtggctttgcccagcattctagagagcacaagtctcttttcaaaaccaacgtgaggggccagcatgggggtcagcagataaaggtgaatctcacagcctggcaagcccataggaactctggcgtcccctgcgttgcccgccctccacatgctaattttaaagattcaatcctggcagaagctctcctggccttgtgaacctggggctattccccctaaagctctctcaggccccacccagtcctgacttctctcttcctgaggaagcccacctctgagtctacctacctcctcctctgtctctcctctcctgaccctgatacctctctataaatcttccggaaacacgcagactaatcgtttacctgggtatccatgctaggctgggggatatttacaggcatgtgcctcaggctcctccctcagggcccagcgttcactgaccctggtgggcacgatgcctttccccttcatgaagtcagaaggcagctttcctcccatgcaagcggtcggtcggtgtatttgcattgcgcgttaggagagtccacagcatcccagctacgggcgggcaggcagctcaaaagagaggatgttcagctcaaaag

SEQ ID NO: 3733 - DNA, 1000 bp, mus musculus
tctagacgtgtggttgactgtgcctcactcacaaggtctggtctccaggacaaacaagcctttcatggtgagactactctacacgcccttaggaagaccttgagaagtagagacaaccgttttttgtcagatttcctggcacccctgttggaaaactgccagagggtggagcctggactggcagagccaggaggtctgttttgttgccaggacccaatagtttctctaacaggggacccaggccacctgtcttaaaatctcagggggtgggagacatctcttgttcccatttgctgatcagcggcgggaacaggtgtttgaaagcataccgtttcccctccccccgggggggggggggcttcttgctcctgggaggcttatctggctgtctgagagggtccagtgccagcccaaggactgagaaacaaagactcgacttacaatttgttacatcctcgttactttctcccgcctgaggcttggcctcttggaaatcatccaggggctcagctgccttctgctgtgatctcagcatccttaacctccagtctttgatctgcatttcctgcttctgatgaaacacaacccgctccccacgccatcgaaagtacagtgcatcttcagccagccgcacaattactcagaagtaccgagtgactcttggaatttattttagccacctgtgtctgtgtgctgctttgtctggctcgagattaaggcttctttttatacctcagactgtgcagtcctttcttttatgcctgcacaacgaccctgtcacccagaccaggcgatgctcaggaatcccagcctgtgaggagacccccagaggtgcaagcttgtgggcggtgggtagggtgggctcccttgcctcttccctcctagagcaagcagtagctctgagccagccccactggtgatgcagagttgggaacactggtaaagtttaatctttggttaaaaacaaacaaacgttaaattaaaaacaaacaaaagttaa

SEQ ID NO: 3734 - DNA, 1000 bp, mus musculus
tttcctacctcagtgtgcggaactggggtaggggtgtattggaagaggggggaggaagagagtgcccgggtccagccagagttcctcctgtgctctgggcaggcagatgcaggaggactgtcagacgctttccacttggccctggatgggcatctggctgtgtgaagccactggaccccactagacagggggtggacaaggggcagctcctgataccaggggccctggggtgacacccttggccacggggatatgggaaagagggcagagggagaaaggttcccacacaggcgagagtccttagtccggaccatggctggagcacaggaaggctttctgacaggagattagaaacggctcattagaagaaagcctatcccatcatccaagcacagtgggccttgatgaaaagagacagtctatggttttagagctttattatagaaaggcagggagaaaggagagaaagtgaagagagagagagagaccggccatggccaagagaagggggaaagagagagagagtaagagagtgaggagagagagagtaagagagcaaggtgggcccaagcagcccctcttatggtgggctgttgctaggtaactggggaggattatagcctgaaggtcagaagcttgggacattgtctctctgactcctaccatgcttttcctgtgggggagggttgtgggggtggtaactttgacaggagccaggggctcaggagatatgaggaaatgcctactgttccatgtaggtgaattatcaccaccgggttctaccagggttcagacctcagctcaactggagaccagactgtctgggcatagcccattgccccacacctcaagcttttgcatatgtatcttcttcagtctgatgtcctctactcaacgtgcttcccaaacagtcctctctcagctttccattctagacttagtcattgttcaggggtattctcttaacctgctaagtctactgccttcatggcaacctcac

SEQ ID NO: 3735 - DNA, 1400 bp, mus musculus
cgtcaagagtacaagataagggcctttccaccggagtctcaaggttttctgcgtggagacgtctaatgtagcaggtcttctttttttgagtaggcctcctggagctgctttttcgctcgctgtctcactcactggagcaccttgagcctagagaacaaaggctgggaaagcagcatgtcagcactatgcacagaggctatttttaccagtggaggggggccccctgtagagtaatttataggggggtcagtctaaactgtccaggggtgtttctatccctgaagagcataaagggtaggagagctatctaatcatagcgccagtctccgctgtcaatttggtaaggatcccttaatggttctattaattttttttacctgtcctgagctttggggcctgcgtgcacaatgtaacttttaaccgatctctaatatcttggccagtccctgatttacctgggcaacaaaggcaggtctattaccttgggaagatttcttttagaaattctacctcatcatagcacagtccttgaagcttttgactatttcctctgccaagtcagagtcctgtaacatagcagtcaaaggacctaaccacacctttgaatttttttggcccccaggccaagtcaaatactgtccataacttgatagtgctcagcgacgtatctaaagctggtctctctgatgtcataataatctttagggctccttgactgccaggatcactgctccttgggcctcctgattggcggttagatctgccacctgaatttttttagccacagcatcttaggtctttttctgtagatgtcaacagccctctttgtatattgccccgtacagtggcaaaagcatacctgttgtcagtgtagacttttctttgccatttatagagcttgtcttaaagtcacaagttcagctttctgggccgacatccctcaggaaggctgctggcctagatcacttgctttctgttcaccaccatactgctgtccccgccttctgcttacctttaacctcgaggctactgtcctcagaccaaggctgatctgatccttcagatcatttcttttgccagaatgtcagcgcagtgatgagtaggtgcagtctcacgcagtgggacagcaggtggaatgaagcgaagatcactcatttagacaacaaaaagctctgatgtgtcacaggagcgttggtaatgctttcaagagtgtgggatgccactacagttatttgctgtctcagagtgagcttatcagcatccttgacaagcagattatggcagcaatagctttcaggcaagaaaaccacccgctggcaacagggtgtaacttcttggataggtaagtcactggcctttttcaaagtcccaaagtctgagtaaggactcctctggtgacc

SEQ ID NO: 3736 - DNA, 1000 bp, mus musculus
tttagaaacaaaaatgaaatggccatatacatttgctcatttaaaccaaacaaaattcttaatttttctagctgtaatttcaaaagaggagcaccttgtcacctgatgaatccaatttttgtaggaaaaacagccatctgttcccttaccatagaactttgagaagctgctggtccctataagaacagcatttataatcagtgcctagcagggcttctctagccacactagattcctaactacaggtgcagggttctaaagaccaattaatactgtttattttattttattttatttttttattaccaaattatctccagatagtcggagagtactgcttttctcaaaacccattttctcacatctcaggtgtaaactatctctagtcagggtataaagcacctatgagaattacctttgtttctctagattttcacatagctctaaacacgtacacaaaaacacataaaacagaaaccaacaaatctagacacactcgaccctttcttgtcctccacaagcaggcaaaagaattagacgatgttggagggggaagcttccgcttcaacagaactcggtccctctgaccgatccggagacggccaggcgtccctgactctccttacctcccagggcgtcccccagggccacagcctgtggtcctcttagcacgtctgccgaccacagtcctccggtccttacggcccaaaaggacagctgcaaatacagacgcgcgcatttcagaaaaccccatcaccccatcgtctacaaacaccgtcgtccacttctacctagacgaccaaaaccagagaatctcacttgtttctcactctgccaggtgtaaaaccaaagcacgaggaggtgggactcgaacccacgatctcgtaaccctgaaaccaaagcacgaggtgggactggaacccacgatctcgcaacccgaaaaccaaggcacgaggtgggactcgaacccacgatctcgtaaccctgaaatcaagacaca

SEQ ID NO: 3737 - DNA, 1000 bp, mus musculus
gggggagatataaacaaggaagatatataaacaagggaaatatagagaaagaagaaacaggactgaataaacgtgtgcagaaggatcctgctgtggcgtcgttcttgctggcgagttgggggcgcgctcgagagttggtgccgaaacccgggacgggacaagaaacatcttcaggcacgagcgaagaccccctgctacagggaggattcagaactgcatcacagggaacagtggtaatgaagtgttcccgtaaaacagactgttgagaaggacccggcgtggattcagaactcttcagctggggaacggtactggtaagtctcccagattgatccccgggttaaagggggatatttttaagagaaagaagaaagatgaagactgaataaactgctgttagaaggactggtggtcgtgtagttcttgctggtcgagagcggacgcgacaattggtggcccgtacggggaaccaactcccccaccgagttcagaactttcagcagtcagtggttgccggcagggtaagttcacggtgagtgaaacttgcgaccccaggagtttgggaaggacctcggataaaatagaggcaagcataaagttgccaggaagcaggcacaaggtaacgaaaggttcccggctttgggacaagttaaggttcccggctttgggacaagttaaggttcccggtttgggggcaagttaaggaactatgataacctcagtgtagtgatcaatagatcctcgctgtgtagttatgcttttttctcccattgaccctttgtgggtaggtctgatagttttggtcttgtttgttctgatatatggactctgttactgtttgaaactgtgtgtagaggcagtcaagacaggtcagaaaatccttacagagcaacaagaaagtatgtcggaaaaggagaagggcttaaaaagaaaaaggaaaaagaaaggagacacagtgttatcaggtggacagaaaggacaggacaacagagttgaggca

SEQ ID NO: 3738 - DNA, 1000 bp, mus musculus
ccatggttgggacaagattctctacaggctcaacaagttccctgccgtttcccatagacagaagccagagtctaggaatcagcaggcagaggcgagaagagtaccgtgcactcttgcctgcactggcccaacctacacagtagttcaggctcatagtcagtagcttagaaggaacactggactcaaaacttgagaccaaacacacttgggaacaggagggttgacacgctgtctggatggtagaaagagataaaggtaattgtgtctcctattaaatgtcatcagaggactctatacgtaaagtacttagcagtgtggcctttttaaagacatggcctcactatggaaccctagttggcctggaccttgcactgtaaaccatgctggtcttgaactcacaaaccacttacctctgcttcccagatgctgggcatacatgtgtgcaccaccacacccagctgctgggaccattgttcatttcccttccccatgacctcacgctccacgggcctagctgacttgtattgagaaggagccacaaccttgagtctgctcagctggagggactgattttatcgtgagcactttgctccttatgactccgaggcagtaggtgggaaggagctacagtgctggtttggctgagagtcatcttgattaccaagaggagcttagattagtcttcagtggaggtaagggaggctgttaatgacttttgtcttgctgtgaccaaataccagaaagaaaccacttaggagaggaaaaatttattttggttcattgtttcagaggtatcagtccttcatggctgtcatggcaatgatggcagatgggagtggctccgtcagtggaggtgagagtgtgaagaggagtcgctgttcacaccgtggcagacctggaacctgagagagaagtgggaaccagggcaggtataaccttccaagacaccccctttctagtctacttctaccagccagactcagcctcccaaaccttccac

SEQ ID NO: 3739 - DNA, 1000 bp, mus musculus
ggtccagcctcaggactgggtctttaactgatgttttctggtttcttgggtgtcacaatctggggtataggttatgttttggtaagcaacatctccaacttgggtgatgttccataagcaaggtgcctatcccatctgtggccacaatcacttctcagaggcgccttcttggaatttgttgatcagtgaggggaaaaaaatagaaaaccaagtgccagctgcaaaaggtagtcagaggtggcatgtcacttctgcagatgtttccttatacggtggccacgtgtatgccagcatatccatggtactctctttttagcatattgtgcttactaccttgtgtctcaaaataatggcaggaattcatttaatacccattatgactactcttgcttcagcctaccctgcacattacagtatagcagatggtaataagccaaaggggcgaccctcgagatgcaccatcttcttacagtcttggagtctttggcagatttggtgaatggccttaaccctgaacactggacacttccctagatgaggctctgactccgcaccctgatagctcctgggccattagtctccaagctcatgtctcttctttaggaacttctcattgtgtttcccaagaagttcggtcttagtgaatagtttggtgatagtgaatcaaagcttttcttatgtatcatgctcagagaacaagcagccctttccctctttcccattcacaactctcaaatgctgcttcttgtctaaaccaggtactaggtaccagctcaaaaaggccatcagagatggcagagcatgtatctccttaggcagtgtcaactagtcttgactggggaagtgagagaatggaagtgtgtattatgtcctgggtgtgtgcatgccaccttaatttgcctgtgttccaaaagaaattaggaagtgaattatgggaaaacagagatgttaccggttagcaaaaccacaggagaaaaggatcagttgattccttcccaca

SEQ ID NO: 3740 - DNA, 1000 bp, mus musculus
cttcaagatgtgggccacacccttccctcaagtccctaacaagcaccactagacctctcctatgatgctttcctaaatatgtattgaccgatgacctcccaagttcatacccctcccctcttgccaattatgttagccactttgtcatagaagccacaagctcgcaagactgtgccctgacctagatatagctctgtgtcaccacccatatagatattctcagtgtataggtcacctgcattgcaaggctggcggccattgcctgcctttctaccatgattaattatgtcaagcctgcctgccaggtggcctcaccttgcacttggagcagtgccacaactcgagtgcccgcagcctcacaagaatagatgccactgtcacagggcagggctggcctgagggtcagcctggctacggtccagtcctgctctatgatgacacggtgcccatcagcgcacacctcccgctcgttcatcttccacgtggcctgcacgggccgcgagtactggcagaggagctcagctgagccaccctcctccaccaccaggtcctgcatggcactcaccacctccactgtgggatctgtcggccaacatggcagacatgcatcagtccctgggacagtgccaccatggcccacccaccttccgctgtctgtgttagtggcttcagctgctgcaagcatggagctttggcaggcaatggcgtagcaacaggtgcctggcctgtggccaggaaggggacccatcatggctgcccaagagccctacatatcagacatgcctcattctgcccatggcagatgacaatgtcaggctgtctgtccaggctgggttcctctagcccaaggtgaacacacaggtcccatcttaaacacacctggactccagatcctgggagtctgaagctgcagcccatcttgcccctctccatgagtgtaaagatgctagctgatacccttgggccccatcccatccccacctgttgaaatcctactcaa

SEQ ID NO: 3741 - DNA, 1000 bp, mus musculus; identical to SEQ ID NO: 3740

SEQ ID NO: 3742 - DNA, 1000 bp, mus musculus
acggaaggaccatgatacaagaggatgtatggaagggccttagggcttctggaccaactggccatgcagtgcctgctagcttcaaaaccagtgttgccttggaaaccattcccaaaggctgtgcttactcagcagtgctttatgagactgtgaaccgacaaaactgctttgaaccagatctctatagaaacacactgatcttcaaaatcctggcttcacagaaagctcaatgactgacctatcagaagccataaaaaggttcatatggagctttagataagggggttctccaacagatcaccccacatttgctcttactttgaatttcggaggaaatgggacttgggtccacttctcagctcagggccatgttaactcatccgtccataaatcctgtgtgactaagtctaccaagaaaaaaaaaaaagcaccgcttcatttaagatttcccacacatggcaacccttggtcttgcagagcccttgcctctccctgcgatgcttattgttttatttgttggttgtttgctgtagtgtcccccacgtgcccagcactgaactgatccctaggtctttgcctgtgttggagacctgggttttcttgtcaaggtgtctcacttgcagcacaggagttgcaacactgtctctgtatgtgtagactattggcttgtccttggtggattttgttagaactggcaacagtgtgttgatagtctaacagagaggaaggaagtgttcgagccatagaaagaacaaagaacagattacagagggatactcacagaaccctgtgtacttcacaagagaaacactaggcctgcgggatgtctcagagggtaaaggccctcgccaccaaacccgacagcctgaatttgatgcctggggcccacttggtggctgaagagagtcaattcccaagtcttctgactctcacatgtgtgtggtggtatgcacacctatgtgtacccaaatacacaataattaaaaaaaaacctttttta

SEQ ID NO: 3743 - DNA, 1000 bp, mus musculus
tgggctcaagttttgcaaagctaagcagtcctgggcaaggtgtggccccttcattgtctgggctccagtctgttctacaaggtgttccaacaagttgcagatcttctggaagacaaatccccttggctgtccccaggcttctgtctttttcttcccccagcatgaaattcctgaagaaatctcaattcctcccgtgccttgatttcacagcctagtgaccaaagtgtagaagacgggactttagaataccctcattcctgctaggtcaggcagttacaggtctctcactggaccttgaactcacagactggccagacagcaagactcctggaatcctgctgtctctggctccccgacactgggataataggaaccaggctccatgtctagtttttatgtgggtgctgggatctgaactcaggtcctcctgcttacacagctggcacttcagggactgagccacctcctcagcctgatcttatcctgtaaaacagcctgttgtattggactctgagtaagccataaaccgacatttgtaggttttttgtttggttatttggtttggttttgagactaggttatgctatgcagcctaggctgttctcagacacctgaactgaaacaatcctcctgtttgagcctcacaactagctggggttctaggtacaccacctgcttggccccatgtttgcttcatttgctctgtgctttaacccagcactgatgagtaaccctaagatttgcctatcggtattccatatggctttgctggccagatctcctgtccatgggcaatgttatagtgaatgagaccagggagagctcaggcttatggaagaagcagaccagggtccacaggctgttagataggcagagtcaggagaggaagaagggccatcaagggcaggtgctacacctgctaagcctctttgaataggtgacatgatttgaacaggcctgagaggagccatgtgaccatgtaagaaggtgaggtgagcta

SEQ ID NO: 3744 - DNA, 1000 bp, mus musculus
atggttttgctcaactccatcacctgtttagttgtgttttcctgtacttctttaaggtatttttgtgtttcctctttaaggacttctacctattttgcagtgttctcccgtatttctttaagtgagttattaatgccattcttaaaatcctctaccagcattatgagatatgattttaaatctgaattttgcttttcgggtgtgttggggtatccaggactgactgaggtggtagtgctgggttctgatgatggtgagcagtctcggtttctgttagtaagatcttacatttgtctttcgccacctggtaatctctggcattagtttttatagttgtcttggctggagtttgttcctcctgtgattctgttagcttctgtcagtattctttggattccagctcgctcctgaatctcagtgtcagcgtactctgcaggcaagctctcctcttgcagggaatgtgcacagaggtcttgcattcagacctgcctcctgactgaaaatgaaggcctgaaacagggctgatcccacaagatgtgttgcctctgcagtctgctgtgttgcctctgcagtctgcgcactcacctgcactggtctccaagggacctgggacacaagatggttctctcacctgctcaggcaatcagagccctcccaggaggccaactctcctctggtggggaaggttcctggatgtttggagcctgaaaaggggtctgtcccagaggctctgtcacttctgcctgtcccagaagctatgctgcttctgcagtcccctagctcaccctctgcagtctgtgagctctcctgtgcagactggtctccgagggacttgggacacaagatccttttttagttttaactcatcttggggttgtttattttttgatggtggacaagtgcttgaaatcaatttgataaagtttaaattctagtttgaagttctgcaccttcagaatagctattctaactgtatggaaattcattacaaacattgggt

SEQ ID NO: 3745 - DNA, 1000 bp, mus musculus
cccccttacccacccacccccactcccctacccacccactccccccctttggccctggcgttcccctgtaccggggcacacaaagtctgcgtgtccaatgggcctctctttccagtgatggccgactaggccatcttttgatacatatgcagctagagtcaagagctcaggggtactggttagttcataatgttgttccacctatagggttgaagatccctttagctccttgggtactttctctagctcctccattgggagccctgtgatccatccattagctgactgtgagcatccacttctgtgtttgctaggccccggcatagtctcagaagagatagcatatgtagatggagccatgagttccatcatgtgtattctttggctggtggtttagtccctgggagctctgggggtactggttagttcatattgttgttcctcctatggggctgcaaacccttttgcttcttgagtactttctctagctccttcattgtggaccctgtgctctgtccaatggttggctgtgagcatcacttctgtattttgtcagaaactggcagaacctctcaggagacagctatatcaggctcctgtcagcaaacacttgttggcatcctcagtagtgtgtgggtttggtgattgtatatgggatggatccccaggtggggcagtctctggatggtcattccttcactcttttttcctcaccttgcccgtaaatttcacgatgtcatttttaacagctgagaaatattccattgtgtaaatgttcacttctttatccattctttgattcaatgatgtctattttaccaattttaaaatcagtgtgattgcttcaaatgtttttcatttagcatgatgttagatataggttttttaattcatgaattaattaatttatttcctcattcagtggtcattgagtatagagttgttcaatttccatgagtgttttggatttttgctgtttctgtttttgttaaattccagc

SEQ ID NO: 3746 - DNA, 1400 bp, mus musculus
ataggcaaataatgcctggtctagttatctctaaccataatcacaaactagtattttcatccacttttttcacatttattaagtgttattgatgcacttaataaatgcaattatgtccaaaattgaagagaaatgcaatatatagtcacatgagccttactcatacatgcttataaacctgacagagtgatcaaatatagtaaataaaatgctcatgcaaacagtaatctagtctttaaagcatgagctactgtgatcacatcctgtgacatgggtaaaacagatatcagtccaaccttctacatgatgaagtcaacacttagactcccaacttccttgtcagtctgcctgtgggaactgaatccagagcagtgtgctgtactctgaccacgggagcagaaatgtgttttgaaatcagtagagtccataagttacctccataaactatcagaaggctcccaaggaaagggatttcaacctggaaagatgacaagcagctccttgcaggggtgacattgaagctgagtttcctagtgcttctgacttgggaccacagtatcagctgggcatggtctcacatgagggaggaagaggaagaggggcagtggaagagtttcttcagagcagccttcatgtcccggttcctcaggctgtagatgaaagggttcagcattggggtcactgccgtgtacatcacagttatcaatgcatgcttcagactgtaactggtcaggggccggaaatacatgcccatgactgtcccataatacaaggacaccactgtcaggtgagagccacaggtggacaaggccttcaggaagcccttggtagatggaacccgcaagactgtggaaaagacccggacgtaggagatgatgatgcacagcagtggcacagagaagacccccaccccaaggtacatcatcttcacattgaagcggatgtcagaacaggacagctggagcaaaggtgtaatgtcacagtagaagttggccacatccttattgccacagaaggacagtctagctgtgagtagggtgtggggcagtgcattagcatttgcaatcacccaggacccagcaaccagcaggacacaaagttgtggactcataattgttgcataatgaagtgggcgactgatagccacagctcggtcatatgccattgcagctagtatataactgtctgtatttgccaagcctatcatgaagtacatctgtgccatacatcccccaaaggagatggccttgctacctaggagatggttggccagcatcttgggaatagttacagaggagaagaagatgtcaacaagggagaggttggccaggaaaaagtacatagggttatggaggcgagtgtcagagtgaatggctaggatgatgagcatgttcccaaac

SEQ ID NO: 3747 - DNA, 1200 bp, mus musculus
tgtgtgtgtcctgaagtgattttatttttatttccttcactttaagcctatcattaaatttcacagtgctttccggggtggggtagaaggaaggcattgttcaaaatgttggagactatgggctgattggccggagaaggtgaagcaggggaggcctcactagggaagcttgaggggcacagtctgccccactggcaggtaggtgacattctgagagcgggagagttggtacgcaatgtcctcagcagcctccagcttgcgcagctcgatcaggccatcgcctgctgtggccagcgagttggcgatcagctctgccgccttagcgtccccctcagcagaaatgatggctgccaccttctgctgctcagccttttccaccacaaatctggctgtctccgcttcctgctgagccacctgtttggcttccaccgcctctgtgaactccttcccaaaggtcagatgtgtcagggacacgtcatctaggatgagcccaaatgtggctgctcgctctgtgaggtcatcgctcacctgcctggagaccagttctcgctgggtaatcaattctccagcatcgaagcgagccaccaccgacttgaggatctctgaggtgatagatggcagcacccgctcatcatagtcctggccaatgttggtgtagatatgaggaagctggctggctacgggccggaagaggatacgcagtgtgatgttgacgttctgcaaatctttgctaccagtgatgactggtatattccgtggttgagagcgacagtcaaatataactggtttctgtacccaagggatgagaaagtgagtcccttcccctaccacaatgtcctgtactccatggaatcggtcaaagatgacagctctgtgcccagcatccacgttatataaagcagagctcaccacgcctcctgcaactgctagagccaagccgaactttccgatggactcaaacactttggcagccatgattccttttgttgcattcactcacacctgccttcactcatcttcacatgaattcccctaagggcttcttaacatgcacaaagctctgggttcaacctttagcatcacagaggcaggaatgacacgagtacacgcatgtgcgagcacgcgcgagcgtgcgcgcgcgcgcgcgcgcgcacacacacacacacacacacacacacagaggcacacatgaaagcagaa

SEQ ID NO: 3748 - DNA, 1200 bp, mus musculus; identical to SEQ ID NO: 3747

SEQ ID NO: 3749 - DNA, 1000 bp, mus musculus
taaagctattccccactttacttctgatagactgtcttgaatttcgttagaaagttcaagaccagacttaccttgtaaagctatacttacgggtaccctgttccccagctgaagagttctgaattcacgcagttgaatccttctcaacagtctgtgttgcgggaacactttattaccaccattccccagctgaagagttctgaattcatgcagttgaatccttctcaacagtctgttttacgggaacacttcattaccatgacccgcagttctggttccggaatgagggatcttccttgcactggtgatggtaacctccctgggttttctcgtcccaggtcttctcgtcccgggtcttctcgtcccgggtctcagcaccaactcttacacgcgttcacgcgaccggccaggaagaatgcaacaaaccggaatcttctgcggcaaagctttattgcttacatcttcaggagccagagagcaagagagcaagagctctattgcttacatctttaggagccagagcgcaagagcaaaagcaagagagcaagaggggagaatggcgaaaccccgtcccttttaaggagaattattctccgcctaggacgtattactccttgattggctgcagcccatcggccgagttgtcgtcacagggaaggcagagcacatggggtggaaaactacccttggcacatgcgcagattatttgtttaccacttagaacacaggatgtcagcgccatcttgcaacggcgaatgtgagggcggcttcccacaaccgtcaataagacaaaaaggccaccaacagattgggaaaggatctttacctatcccaaatcggataggggactaatacccaatatatataaagaactcaagaaggtggactccagaaaatcaaataaccccattaaaaaatggggctcagagctgaacaaagaattctcacctgaggaataccgaatggcagagaagcacctgaaaaaatgttcaacatcctt

SEQ ID NO: 3750 - DNA, 1200 bp, mus musculus
atatgaaaattttcattgtttttactttgagatttttagagtttgctttttttattctatgtattaaaatgttctgttttaaacgtataatttaattatttatgattcagttcatagaatctcacgtttactcacgtcccttttccggttttttcctctttacttttaggatcctcgtcgtagtcttgcaggagaaaattgctgcctttgatagctgtactttcacaaaaaaattttttgtcacaagtatgtaccaaatccttttactttgtgtcttgtgcgtttgtgtctctgttgctgacttgatgctgtcagccatgggtttcgacactgcctcctcctgtgattcctgtgggcaccattacttataaggcagagtgctttcctggtctttctgtacacggtgtaaggttttctcctgcacttgaactgagtggttctcactggttgctgtagctgtttttatgaagctgctgtcacatcactaaatgttatgcatacttaaaaaagtgaccggtggtgctgtgggaagggttttccatttgcacttttcactctcccctgtcttgctccgtgactttcactgctgtcaggagctcagaaattagcatagcatctagtttcaagctgttttcaaacatgaattcagtgctaggttttaaagagaaggagaggattgaaatgggagggtgggaagtaagggatagatagataatattgagagctgcaatatgcaggcttgccatactcatttgtacaggacagagacaatccggacatgccaaccagggtcagctagctgtcctgtaccctagtgagtctgtgacagagcagttttttaattttgtttttcctgcagccaactaagttaacagttttccccagtgagtccgatatgtatatcttacagaaatagtttagtgggtctccattttgcagtgaacttgaaatacattacagacttacacagatgtttgccgagtagctaccctatatcaggcttcaggtagtagtgtatatcgatattgttcctttacttaatggacaatttctttgttataactgcactatatattatagataattacatgcatctggtactatattcagtaagatgtgacaattcagtacagtgcatgtgtcacattttgtagaccataaagaattgtaaaactgtcctatcccctcattcccttaatt

SEQ ID NO: 3751 - DNA, 1000 bp, mus musculus
catggagggaattcaccaccacacagtcaagcacgtctacggtaaagccatggcgacgattggcgacagaattgaaagcttctggtaccgtctggaacaacatgaggtttccattcttgtcacatttattcagcactgtactggaagtccttgtcagggcatttagtcaggagaaagaaacaaaagacatccaaagacatagtcttcaaaggaagaactgaagttgttactatttgctaagaacataaagtaatacatagaaaactctaatcctaccaccaaaaccaaatgctaaaaagtaattttaaaatgcaacgttgcaggatacaaaatcaatttgtagaagtttgtagtatagggatgaaaggtaggcagaggcaaagtttggctgcctaacatgtacaaagtcttgggttctagttcataaacacaatgaaagaaaaacatctgcagtatttctatatgccaacaatggtctattaaaacaaaaggaaggaaacaaaggaacattttactgactgaagagacagctcatagatttggaaggaaaagttatattcattacaacttaatcaaaatatgtaaccaatagcaacaacagcaacaaaacaaagagaagtaaagagggagggaagaggaaggaaaggaagcaagagaagaaaatttaaaagatgaggggaaagaaaaaagaatttgagaaagagaaatggagaagggggaaagaaatcaagcaaaaaactagagaccatcaatagacccagactggtgagacaccctcaggaaagggacctgggggatgggagatgagagtcataggatcaagtgaggaacctaggacctggttcctgcttcagtcttggttgaaagtctgggtggagagcaggtcagactcaggctggggacagcatacaaccagagcttcagtaggtggggagatgaggctctgggtgtcataaagttttagtgaagttccaagcagcctgggtgagaagtgccagga

SEQ ID NO: 3752 - DNA, 1000 bp, mus musculus
cacccctttgtagatatttatagttgatcctgggcaagttgtcttgggcctgtagtcaatgcagccgttctgctcccagcacagggctgttggctggccagagagctgtatggatgtaggttttggctaccagttcctatttgcagctgcacaaatgttatttaaaactttcactggcaaacagtggcagtgtgaagcaggcctgggaaccagacgtctgcgcagcgctcagccggtgccagggactctgcgaggagcttcacgcctcagagtgcatccaattctccgactctccctgttctcaggtaggaatcagaattacagagggatggaaatgacctaccatgtcaccctcaaatgtggtggcatcaacattaaaatccacacctaccagatgtcctcttctcccttcaatggcttctccaacttgccagcagtgttcattcgcttgaactttagtccccatgtgtgccctgctctgtgccaggtaatgcctgcctctaaccagttaccacagagccagttcgggcctgaccttcagctttggattaagattcctgccagacagctcagcgtaggtggaagacctccctatctgtgcagattgattgcaggccccacagctttgtcagaagtggttttggagagccatttgagaagacgcacatttcccccttcaggtctctgtgggctcttcctgtaagctttcattcttatacacgcggaagtcccgaggagcctcaacacattctccttgaacctgaagtcaggggcataaaacctgtcctcatctctcttcaaatgagccacagattacactagtctgtcactggcaacaacctaactcacagaaaaggaagcaaaccgatcaactcacgaggtcttggggcgggggagttctcgacaatgtctcaagtgcagctgaattaatttgccatggatttaccaagcaaatatgagtagtttcgtatttcccaccagaacccacactccccgtttc

SEQ ID NO: 3753 - DNA, 1000 bp, mus musculus
cacttaaatcaggcattattattattgtcattatttaaacttcttttatagcccagttgttatcacccccttgtctacccggcaactgttcctcatcccactcctcctccccacctccaagaggctgtccccaccacacccatgctcaccccaagaggatatccccaccacacccatgctcaacccaagagacctccccactccctgggacatcaaatctcttgagggttaagtgcatcttctcttactaaggccagaccaggcagccccttgctgtatatgagtcagggcctcggaacagctagcgtatgctgcctagttggtggctcagtgtctcagaaatctccagggtccaggctagttgagactgctagtcctcctatggggtctccctccttctcagcttcgttcaatctttccccaattaaaccacagggttacctgacttctgtccattggttgggtaaaagtacctgcatctgagtctttcagctgcttgttgggtcattgagagggcagccatgttaggctcctgtctataagcacacaatagtatcagtaatagtatcaggtcttggggcctccccttgagctgaatcccactttgggcctgtcactgaacctcctttctctcagtctcttctctgagttccctgcagttcttttagacagaaacaattctgggccaaccacatccctccacttgatgccctgcctttctcctggaggtggactctacaagtttcctctctccactgttgggcatttcatctaaggtccctccccttgagtcctgagcatcattcacataccaggtctctggtacattttagagggttcccccacatcctacctcctgatattaactgtttccattctttctgctagccctcagggctttagtccttttccccctcccagtacttgaacatgttccccttttcccttccctgtctcctctctcattcaggtctctccttccctctgcactccatgaatg

SEQ ID NO: 3754 - DNA, 1000 bp, mus musculus
tggttggttgatgtgttttcttatcttggttactctgaacaatgctgagaaaacccagggtgcagagatctctgcaacaccctgatttcacattgttttggtgaatatacagagctgtattgctgaatcgcatgagcttcattcacagatgttttactctcccttccccctttaaatagatgcttcacaataacttgtatttcagctggatgagtatcctgcttaagtgactattgaagtttcccatttcgttattcatataattttctgaatccttcagttcagaaatatctgctctgcttccttttgaagatttctctctgctgaacatcttttgtttgtatattactttccttataatgagttgtcttattttgagcaccgtgtttcctgggtgtttgtttttttaaccaaattgattgaattgtaggtatatcataagttcttatgtcattggaatgggcaacttactgtaatcattgtagcatctttttctttaattttattctcctttccatagctttgcttagattcttatataattgaagtcatttcttcatgatttatgaagtggctttgatagtaaagtaattacaggcttcacgtgtagtattctacagcgtttgtactatagttgtagcgtactacaatagttgttgtcgagtactacaacaggcttcgtctgaatacctgaggattataagggaagaacaggcccaggaagaagaaccagaccaaagatctagctgatggaggcacagcaataaaggaacatctgttagctggattgcatgtcaacaagtgcctttgtgtcctcagtgggattgcatgcagaggtctgcacatgtgacagtaaaggtggcctgggttttcagtgcagttggtgaagtcctattttccttgtgtgtgtggaaatgtccacatgtgtgcaatcatgtggaagtcagactacaaccatttatgtggattcaagtgatcaaactcaggtcttcaagcttgg

SEQ ID NO: 3755 - DNA, 1200 bp, mus musculus
tctgagcacaacagaatcttcttttgtttaagttccagagttgtattctcaacctgaaccataatatctccataaatgtacaatagatatagcatagtgaacttatgtacaatgcatgcaccaatgtttttggtaagtcgtgactcataagaagaatcatagctatgcaattggcagaaacaaataggttaatgtctccaaatacggggaagaaggacattcagagacataaacagctgcaataataattgcctcaaatcaccgggtaagcaagcagcaagttcataaaggaaaagcttgataacaatgaaacaagaggggttaggaatctgaaggattcagagagagagtgagagagagacagacagacagagacagagacagagacagagacagagacagagacagagacatggagagaaaaagagagatagagaggggagagggagagaggcagggagaaaaagaaagagggaaagagacagagacagagaggcagaaagagacagagagacagagagagggacaaagacagagagatagagaaattaactgaagcaccatgagaaactggtccagctcctgtaaatagccatttatgcacaactctgactcccacaaatgttcatagaagacaggattgccaggctaagaaactccttttaaattgtttcaaaaaaaaaaaaaaaaccacaaagcaaaacaaaaacaaaaagaaagcaccatcaccaccaccacaacagaaaaccttgtcttttttttccccctagtaatattgagtaagggatgttttctgtctctcttacttcttacaattaactactcttggcagttaggtatctcagtttaccaattgatgatgtgaggaccataaagggtgaatcattaaacagaataatgcaattagaagacttatagatgtgattttataaagaattttgaaatacagtatctagtatcaggaaactattgttttgctgattgttttaggttttagtagaagaatcaacatgcattggacatgagttttctttttctttttcttttgttttgttttgtttttgtttttgtttttgtttttgtttttgttgttttttttttgtcctcctgttctaaaatgcagtgttgatcttcagatgacattttccgtatacaatgaagaattttcataggactgtagaagaaaatacattgaagcaa

SEQ ID NO: 3756 - DNA, 1000 bp, mus musculus
gggaaggattcagtcgatcagaagaaggggggtggggcccactctcactcagaatgacatgagaagtcccaaagaagaaagtcttaaagatggaaggatttttgtgtaacaccatctctctctacaactgcacaactgagagctcctatgagagtaaagggaggcattgaaatgaaatggccctttaatgtaggccaattaagtggagagtggtaagtaagataggtgcttctcatttcaagttagctcaggccaggtgtctggctggagtggacagatgacaggacagtacaaggggatgggacagcagatgagagcagcccagacctttagtcagagtggggatgttcaatgtgtcctttacaccaggcagcctccactctcttagagaagacagctctaagagccacttactaaggaagaggccacagcacaacgtggatagtgataggtccggtgcgtatgagtggatgcactgtaataatgatatgacgttttagaaaggatattaggtaaaggatgacagtcctagtggggagaatgtaggatgagttgagttaaaaaatctctgaaaagagtctctgaagattcaagcatgaggctaatggacatggtggcctagaaaagtcctaccagagatgtttcctctaatctccctgactctaaccatacttaactgggagttaagaagcaaagacagaagcatcactatcattttagtactttcattctctttctcactacagacactcaagtcattgatgaagtatgagctgaagagcctatatgtgtctacacaggtacacacttagattcatgggatcaacaatgctaacagaccagacaaagaatatgacagctcatgtttgaaggtagtcataataagtgaaatctcccctgatctcaagatcaattccatcactggatatatatatatataatctatttacctgtttaccaatttatttagtgggaaggaattctatagatgcagatgttg

SEQ ID NO: 3757 - DNA, 1200 bp, mus musculus
ctttctttccttttttttttttttttgagacaaggttctctgtatagccctcgctgtcctagactcactctgaagacaaggctggcctcgaactcagaaatctgcctgcctctgccttctaagtgctgggattaaaaacgtgcgccaccaccaccaggcaggagttcccttctttttttttttttttttttttaggtactttcttcattcacatctccagtgctatcccaaaagtcccacaaacactccccccacattcccccacccacccactcccacttcccagccctggcgttcccctgtactgaggcatataaagtctgcatacatatgcagctagagacaggagctcggggtgggggggggagtggggggggtgggggggtgggggggcactggttagttcatattgttgttccacccatagggttgcagatcccctcagctccttgggtctctctctagctcctccattgggggccctgtgatccatccaatagctgactgtgagcatccacttctgtgtatggcagtctctagacggtccaccccttcgtctcagctccaaacttcatctctgcaactccctccatggtcgttccactcccaattctaagaaggggcaaagcttccacaccctggtcttcgttcctcctaagtctcatgtgtttcgcaatttgtatcctatatcttgggtattctaagtttctgggctaatatccacttatcagtgagtacatatcatgtgagtccttttgtgaatgggttacttcactcaggatgatgccctccaggtccatccatttgcctaggaatttcataatttcattccctttctatagcagctgaatatacagtcagcgatgacatgtgcatagaagaagcgctaaggtttggcttgaacacagagaccagaaacaatgaaaaagaaggtttgattaattctcttccaattggtcaagtgctgttctgtgagtgactgggtatagggaggaatcttgtaactagtctataataggatcacaacccctaattgtaaataatgcaagcagctgaaaaatgaaaacatctcattttaattagctgcttctcagctatctgtctttgatctacttcaataagttgacactgtctgtggttttgttgtttttccatccactgatgcttggatttaagctatataacatatttgatggagag

SEQ ID NO: 3758 - DNA, 1000 bp, mus musculus
gcaggcatggtgcaggtagagctgagagttctacatcttcatccaaaggctgctagtggaagattgacttccaggcaactagggtgaggatcttatgcccacacccacagtgacacactcattccaacaaggccacacctccagatggtgccactccctggtctaaggatatataaaccatcacaatccattccctggtccccatagacttgttcaaaaacatgagtctatggggaccatacttaaacatagcataatggaaaatgcatttagtccaaatttcaaagtcctcatagtctatagcagtctcaacaatgttaaaagtctcaaggtctcttctgagattcatccaactaattaactgtaatcccgaaagcaaggcaggaaatcagctgggcaaactccaaactctgcatctccatggctgatgtcaaagcagtcttcagatctccactcctttttcacctttgttgactgcaacaaattgctttctcctgggctggttccactccctgttagcagctttcctcagcatgtatcccatggctctggcatctttaacagctttgagtctccaaggcaatgttacaacttcttgtttcagtgtctaggattccacttgatcttttggaccctcctaagggctggcatcacttgtacaactctgccctctgtagcactctaagctcaggttgatccactccacacggctgctgttcttggtgatcatcccatggtactgacatctccaatacactggggtgttccactccaactaggcttcaccaatagcctctcataggctctcttcatggtacctgccaagcatcaaatcctttgcctgaccccttcagtcctgggcaatcaactacagctaaggctacaccttctccaatgtccttccatgacctcccacagtgccaagcctcagcttttcttcatgacaccttcgtgccttcaaaaccagtaccacctgggtgactctttcacattaccaagt

SEQ ID NO: 3759 - DNA, 1000 bp, mus musculus
gagctaggagtgagaatggatatcagtggtggacatatttgaggctagctggaaacctgggatgtgggaaactactgggagtctatggaggtgaccctagctgatgctgaaagtggccacctctagtagccaggcaagacttccaatgaaaaggagaggaacatcaactcatcccaaaattttcaacccagaatttgtcctgcatataaggggcaaatgataaagatgaagcagagacagagggaacagccaattattgtcctaacttgagacttatccagtgggagagagtcaacccctgacaccattaatgatactctgctatgcttgcagacttgagtctagcataactgtctcctgagaggcttcatccagcagcatatagaaacagatacagcgattcatatccaaactttaggcagagctcagggagtattactgtggggaatagaaataagcaagccataagtatcaaagacattgcaagaagacctacagagtcaattaatctgggttcttgggtgctcacagaaactgaaccatcaaccagggagcatgcaggaactggacctaatatttgtagcacatgtgctgcttggtcttcatgtgagtcccctaacacttagagcagcatctgtctgactctgttgcctgccattggatccccttcccctactgtgaatgctggattgggcctcggtgggtgaggaggtgattagttctggtgggactagatgtgccagggtggggttagaagtctgagaagaaggggagagggtagtggggggagggatttgctagggtgggcttggaggagtagatggctggggctacaattgagatgtaatgtgaataaaaatacattttgagaaacaaatatagtaaccttttcttttagtttagttcctacaggtaaatgtatacattaaatgattgattttctgtgcctcgctcatttcacttaacataatacctatgattccatccatgctcctatgtt

SEQ ID NO: 3760 - DNA, 1000 bp, mus musculus
aaattttgctgagttgcagcaaaatttagaatctgaacatctaattctggtgttgggctaaattctcatggaattcaaaatgagagatgaaggctgcggggaaaggaaatggatctggacaccaaatactatttggagattgatgcaaattcaataaaatacctttcacaggctgattgaccaaatttagtgccatggttgtcatgtgggaccgaacaagggtcaagaggcaatgtccccttatgaaccaatgttcctgtaacagagtcaagcacttgaataataatgactttttaatcagcttgtgttgaataaacaagaaagaagacctctgttaggtcattctgttctcaatatacagggaatatgaggaaaggaatgacattatttttatctaatttaagaatattagactctgaaattacaatggaaatatttgttcaggaaatctccttttataaataaggggatctaaaagaaaagtgatttgctcattgtctacatattgagaggcagggcagacctcaagtctctagcttagaagcctagatgcaatacctttacattggcatgtgctttctgagttaataatcttccatggtccatataacacattaccaattgccttggtgtcttagttacctttctattgctgtgaagaaatagcaataccaagacatgaccaagagtttattgaggctcatgtttccagagggttagagtccatgatactactgctggatcagaatctgagagcttatatccttattcataggcgccagacagagttaactggatatggcatggacatttgaagcctcaaagcctaccccatgggacatagttcctacaacaaggctacaactccccatccttcttaaacagtgctactaattgtcgaccagaggttcatatatgggagcacatggtcaatccaaccaccaccacacttggaaagtctctccccctctccccctccccctcccccttcccctccccc

SEQ ID NO: 3761 - DNA, 1000 bp, mus musculus
caagggtggggaggtgtactccacaacctggagctggcacagaacctacccctgtttcacaggggctctctgactctggccaggatatctgaaacgagtccattatttatagtgtgttagaaatcagaaaccttgaaccagaccaacaacttgttgtaatgaatatttgtatgtaaaggtgtatgggcaaaaatatatactgtgtgacacaccgcagtttccaaggcaatggagaggtggggaaaatggaggcgtggggctgcgcatgcgcagtggaggggagttggaactaaagactcgaaggcagtgacaggcgtggaagaaggctgaggtggacaggaggccatgtcattgccgagtagtgtcggcagggtggtatgcagcagttgaaaagattcagcacctcccctctcccctgaaatacgctgcccagcagcaccgttgccctggctctgagcaatgacaggatgtccaagatgaagaacaattcatttgctggactggaactcctcgtaagacccccatgatctgtgctgcccctggaggctatgatggtattcatggtccatgttgttgctctgcgccatgttgaagcccgaggtttatgtggctttatgtggtctgggctggtgttggagatcatgtcaatgtccaaaccctatgctactgctgaaagccaggaggatgtttgttgtctgggctacagctggaggctatgctagcatctgtggtccagcaggggccaggaaggccatgctgatgtgcacggactgtactgacacctgaggccgtgttggggtctctggtcctcctgcagctggggtccatggcttgtgttaccccctaaggccatttgggtgtctgttgtctgtactgccatctgaaaccatgttgatgcttgtggcctgtgccgccactaaggaccatgagggtgtccgtggtctgtgctacagctacaggagcctagtgatgaccacggtctgccctgtagtccgagacc

SEQ ID NO: 3762 - DNA, 1200 bp, mus musculus
gccaatacagtatgcaaaaacaggagggacggtggtgggcatatgaaaattctctgaaacttttatgtaaaacaaaataatagtgccagagactgttgacattgcctggcgaggacgccaagagaccaacggcattcaagcaggtcactggacaggtacagcctggccactgggcaccaggaggtctgtcctggtgggtcaaggacatgctaggctaatgataggcttttcggatcaccagtctatgcaacactgtgtgactgagtgacggtagtcatgctcaggcgctgtgacggcataaataaaggaacctgactcagactaaagggagaagacattttgtgttccaaacaggacagcaacgagggaattgttttctcttttccttctctcttctctcctcccctcccctcttctctgccttctccctccccggcttgagacaaggtcttatatagaccaaaccgggttcactaaatagcttaaaatgatctccatcaactcctgattctcctgccttcacctcccaagtgctaggattaaaggttcaggacactatggtttgcacatggacccagttctttctgactggggatgtggagcacagtggcagtgcaggctaagggcaggacatggagcttggaggagtcgggtcggcagtcccgactccttactcattgtgtccttgagcaagccactcactcttgtggcctcggtttcctcatccgtaaaatggagcctatcacttccatctgcccggcttgcctcccagagttgcaagcgtcacatgagacaatcatcgcaagagggcctggcgtggggcagaatcaccctggaaaaatgagcaccaaggccatcaggttgctgagtggctgtcacaccctgttctggccacaggagtcccggatgtagatctcccaggagaagttccctgagctaggccctccctaggagcccaagattgctggggggcagatgccaggccctccctgagcctctaggagataggccagagtcccccctccgtgggtgagggctgccagcggggggcctgggagagtgggccgcctgggctgggaagatgctgaggtagaaatggaggtgcctgtgagggcccaagcccaggggggaaaaaattcttactggagctgtataattaaaatcctattaagcggcgcctggcagtctcccaccaacccc

SEQ ID NO: 3763 - DNA, 1000 bp, mus musculus
gaccacccaagccctatagtctcatttctaaaccctaacacaaagcattcaccccaaggagatctgtgtgctaccttctgctaggcgacaagcaaagacaggcctcaacctccttagctggctcagtgtggtcccaccctggaatgggttccaccttcaagttctcatcccaacaataggaggtccctctgttacctgctctagctgttttgctgcaaactaagccttcccttcatctctggactccttgcccataatttcctccaggcctttgccggagctttggagaccctggtacccttggcttctcccctttgcaccttaacctctcctttcaacatttttggaggacgatcacaaagctgcaggaaaaagaagatccagtttggcactgcctcacatacctgactgtgggggacgaagggttcaatgagaaagttcttgaggaagcctttggccttgccgacctaaggaggaattgtgggagatgtcgcttagatgtgtggtacattcttcacaaaggcaaggctcaagcgcgaccacgggacaaggtaacttctccacaagtcaggacagtggggtcacagatgaacttaagagttctcaggagactccctctttacatgaatacttttactcatgtctggggagggggacaggaatgtatgcatgctgcgtcaaggagtggagacctatggctaactcaggatggttctctccctccaccctgtggatactaaggatcaaacacaggccatgacgcctggtgacaagcaccctgcccactgatcaatcccactggcccaggcagtcaagcagggagatgggaacttgggtttgatggtgatagcacactactttgctctggggtaggcctagcgactcagcctgaggacatgagtctaggcctgagaggtaggggagaggagagccaaaggttgattaggtaaaattgttcctcctttatttcctggctgaagacaacaggcctacagagcta

SEQ ID NO: 3764 - DNA, 1200 bp, mus musculus
tgagttcaattcccagcaacaacatggtggttccatccatccgtaatgggatctgatgccctcctctggtgtgtctgaagagagcaatggtgtactcctatgcagaaaataaatacatcttttaaaaaagggtgtgtgtcaaattgcccagtgattatggatttgtcagtttttccattcacctctatcaatttaaaggttttactcacatgtgtgtatacatgtgtgtgtatgtacacgtgcaggtgcccacagagaccagaagagtgtcatatctcccagatctggatttacaagttgtgagccaccctgggtggctgctggaaaatgaactccatcgctctgaaagagcagccagtgtctcaactgcctgtagctctattaagttttgctttattgtctcagatgttgaagctaggtccttgagtgcatgcttctttaagctcacagtatcttcttggtatgctgattcgtcctctattataatgtcccctatttgtctctagtaattgtcttgcactgaagtctgccttatttgacgttatcatagccactactgtctaaaaatccatgttctgctgacatcttttactctctcgactttttaagtgatgtgtgcagatcagaggacaacctcaggtgtcgttgtcactttctaccttgtttgagacatggtctttatgttgctagctctcgtgtgcaccagactaccctaccctcgagaatgtggggattctcctgtctctgcccaccagtgggctgcaattacagacacaagctaccgtgccaactttattttggctctggggatttgaactcaggtctccaagtgtgcgtggtaagtgctttagccaccgagccatgtccttagctcttcctcccttcttttaagacacagaagtggttcctccacaaatatcaagcagggcataagggggtgtggttatctctgttctgcccatctggtgccgataaagaagccaaagaggtgagagtcggttctggttccttctgtatggttggctcatcaagtcccactcccgttgttcatttccttgtttagagctgcccttggggcaggtctctacaattctacttccctcctctgagaacaccagccatccccctcattcctaagatagtctcacggaacgcaggcttcaacattaatagtcctttgtcctcagtgtttgacgtgct

SEQ ID NO: 3765 - DNA, 1000 bp, mus musculus
ctttgacaagctctagccatcatgtacagaaagatctcttcacccacacatccagttcttaaatcactccaggggtcaacaagccgcccgcctgggtgtccgggtaaaggccattagtgttttgccctgtggtctagacaaactcgcctccagcctggctcacaggaggaggccggccactctccccagaggctcgtgtatatgtcaggtgtcagacagggcgctcttcatctgtttgtccctcctgcttcctgagcaggtgatagttttaatcattgatgtctgttatgtgacaggattgaactctgctctccccttatcggggcaataaaatacaaagccatacaaagcgcgtgccagatgtgtgtctgtcctttgccctcaaaaacctaccagacacacaaaaaaatacaaagaacagctggtcctactcctgggaacatgacaaagcaactcgggtcctgaaactctgtttcgtgactgaaatacaaacacaagcaatagtgcaaaggacaactagggaccctccttttccctggactccaggtacctttccctaagcacccacccttagtctttccctaggacccaggggggaggtgtttattactggtccagtctctcttgttgctatttctttattctccagcaggtggcactctcatccttaccatccacccagacctcaggtcctaggtctttctgggtacaattcccagaaggcctatggtggtctagagctgggaccttgtcatacttcactgtctcccaggatcacttcagggaagggctatggttcaaagagggtgattcaagctcgccatctcagtgatatgaagagagcatcatgaagaaggagattggcatcagtgacctacacactcccttcctgctaccctaggtgggtctctccatccagtattaagagacactcattgcctcactcgagtgattcccagccctgagctttttgggtacaaaccttggtgacttaccaggg

SEQ ID NO: 3766 - DNA, 1800 bp, mus musculus
tttaattaaatcttgcttccagtttggctcaaagctgtgatagtggtcttgttcccaacaatggggttatcagactgttgctatgaagaacctgacatggtttttcagaaaaatgtggaagaaactttgtgtcttagaatgagaaaagtagctgaatgacgtaaacagggctcacgaggcagttctagcagaagcctgagtggcagttttgagagcaatgtggattatgaaggccaagctcaagagcttgcagagaggagccatattagtaactgagccagagaccattactgtgatattttggcaaggaatatggctaccttttatccatgccttaagaacctcctggaggccaaattgaacttgtaacagactattttggtggaagatatttcaagagagactaatattaactatgtcagatggttattagttatcatccttacacaggtttgcagtgaaggtgagcaaaaggggcagaaagaaatacaaaatgcacagtgtggagagcaaaggacactgacaagtttaatgctatacagctaaggcttatgtcagaaaagaggttgtaattggttatattagtgccattaaatatatatataatcttttttttccctttccaactcagaagcgggcacctagggggcaaaacctggaacgcttcaggagcacctcgaggcttgcaagaaacagagcgcgtgcacacaccagacgggaagggtatgcaacgccaccagccacattccccggctcggggaacatggtcaagcgagacacgactgaagtgaaacacgtaagggcaaccgggcgcctgacgcgtccacaaggaccacgcgaaccactgagaaaagtgcgcgcgggtcagcgctcgggccagagagccgcacccctgccttccacacaccaccggcatacggatgggatggagagacgaggggcccgctggcagaacgagaagagtgaccgccattcgccatgaatgtccgtccctcgcctggcgcggcttagaccctggcccgaagagaactcaggagcaccacatcgatcatattagtgccattaaggtggggtccgatctgcattggaataagagggatgccctccatgcaagacaccactcaagcaagcctccagccatgaaagacgaagagctaaggaatactctgcccctggaaaggaacaacaaacaaaagctgcagcaaatgtgtttcggggtagccaaggtccagcccatcctgggagatgaagctgccttagtgctggccttagggttaagaagaacacaaaagtaaagggggccatggaatcgtgccctgtggttacagagcgctactgaggccaggcatatagcagggaaggccctgcatgaaacacccgagaagccgttgcatgaagctgtgaagcctgggtatgtacgttggagacagcaacatatgtgggaccccaatatatggggtgcccgagctgggagacatctgccaaggagagctgcacaggaggtgggaccagcccaagagaaagagatgtatcttggaggcagcaaagctggaagggtggagccactgaaggcctttgacatcagacagagttccaggattcagagttgccctgttgggtgttggtcttgtgttggtacagcgtttccttgctattacccaattactagcttttggaatggtaatgtatgttctatgctatcgtatgttgaaagtgcatacttttttttattttatagggggttacagtacagatattgccttgaatctcagcagaaaattggacagtggagtttgttgg

SEQ ID NO: 3767 - DNA, 1200 bp, mus musculus
ggttgagggaccagctgaaaagtgtccatgtggttagtggcaaaatggggaccaatccacagccctgctgaccttctgcaatgttctccacgacctaggacccagccattctttatctggccccatcccagacactgggactcacaaatagtgatctggagttgatttctggctgagtttggttctaggcaggaggaaggatggatgcaaccatccctagcttcactacagatgttgtctttctgttgctagatgtcagtggtcacccagtttctgccttagccatccattttggggttcttagcagccacctggagctctgctgcccgcagtgatgagctggcacctatgagttccactaagggaggttccgtttcatgcatcccgagaccctggtagctaggacgctgattaggtaacctcccaggtcagctgcaacatctgggagatctatttcctatgtgaacttccaaagttcaggaattacgggaaggggaaataaacgtgataggatgcttcaagtgactacaaggcacaaggaagagccttttgcatgtttcatagcatgacattaaaacaacctcaggagctgatctcacaacacgctgatttatactgagagaatgggtgaccagagagactaatttgtctagaaacacagccaacaactggctgggcttagacttgaaccccgatctttgtgactactgtgcagggagaaagggttatctgtgatgacctgtttgggtcttgcctctgtcgctgacagtcaggaggtaaaaggttggcagcaggcgagacaggcagactgacaatttctctgcctgttcacgttttcctaggctgtgtggaagtctgctgagccaagaagcttctcaagctctctggctcgttctcagagatgaggtagcaatgaagacggcagcacagactaacaaacaacacctgcagcaggtgctcaggtgtacaggtatgcaggtgtgcaggtgtacaggtatgcaggtgtgcaaataaacaggtgtacaggtgtgcaggtgtgcagatgttcaggtgtgcaggtgtacaggtatgcaggtaaacagatgtgcaggtgtacaggtatgcaggtgtgcagatgtgcaggtattcaggtgtgcaggtgtacaggtatgcaggtgttcagctatgcaggtgtacaggtatgcaggtgtgcaggtaaac

SEQ ID NO: 3768 - DNA, 1000 bp, mus musculus
tatgggccatgtcagtttctggataaatggatcactaaaatctgaacagcccccaaggcagaaggcagaacgtgtatggccaaggagcagcttggagcaagtgtgatgtgtaagtggagaggagtaattgggatgagatgcacagagttccagagcactgatccattctccatgggaggcaagggcttggatttaactctgagtaaagggagacatgagaatgtttctccttgaagggaaaacctagctgtctgagaacaatataggaagctagctaagaagctattttgatcatgcaagtgagaaatgtcagtgggtgggaccagagtatagcagaaagtggtgagattctaggtgtattttgaaaatcgtcatcgtgatacacactgcagagtaagacatagagaagtcacccacagaaaggctcacacacatgaacatgtggaaagttatggttagatgacactttgtgtgatttttctgtctttccaaatgtatacgtattttgtaagctgaacaggactatttaggagtcactatctgttcatattgttccctgtcccaaccctgcgataacttctgcctgtttctggtctttccactcaaaatcagagagaaaagaatgtgctggccactaagctctaaggttttgccaactattatctgaagacaagcaaagtgattgtgatgtcactgtcaggcctcacccctccctggcagatgaggggtttctcagtagggtcacttgtcagggtagaggcacatcgaagaaaggcaccgtggctttgcctgtcccgtaagcttatggtgttgccatcacctctgtgatcctagtggggtctaaccttagacctccccactcccaaggaaagacatgcccggaactaacaagaataaaaagaaagaagtgtaatgccccaccagccaagcaggcagacagtatgagaccactgagggatacaggaccatcggtccccaaagaaaatatggtaagaatgag

SEQ ID NO: 3769 - DNA, 1000 bp, mus musculus; identical to SEQ ID NO: 3768

SEQ ID NO: 3770 - DNA, 1000 bp, mus musculus; identical to SEQ ID NO: 3768

SEQ ID NO: 3771 - DNA, 1600 bp, mus musculus
agggtccattaggaactggctacttgtagtagaaggaagatgctggtgacagtgacagcaagcttagtagccaagaaccttcaccatgtttcctccacagccgacaggtgccccagagttctgggcacatcatttcacccactctatgtccttgcagctatctgacatggtacatggcacatggaacaatgcaggcactatgttcactcaaggcttctgctgccaaatctctcccactccattgttacgttagctatacgcatatagttatgctatgctctcatgtgagctcagctctagctggaggctgatgacttaaatggcagtggagacttcttagaaactgagactcagtaaagcacagtgggtacatgtcccggctttgccctatgctgtctgagtatcctcggacaggccacgccccttcattgcctctgcttcttcatctccaacaggaggaggatgggaatggtcagtagctcctaggcctggatcacttatgcacagccttttatgcaacctcagtggggagaaccctcaatccatgccaggtcctgttttacctacattgttccaacatgccagaggctgttcaccttggagacctgctgcggatatgggtacggcccggagatttacaagctctcccccggattttcaagggccagcgagagctcaccggatgccgccggaaccatgacgctttccaaggcacgtgcccctctctcagggcgaacccattccagggcgccctgcccttcacaaagaaaagagaactctccccggggcttctccgggatcggtcgcgttaccgcactggacgcctcgcggcgcccatctccgccactctggatttggggatctgaacccgactccccttcaatcggccgagggcaacggaggccatcgcccatcccttcggaacggcactcacccatctctcaggactgactgacccatgtttaactgctgttcacatggaacccttctccacttcggccttcaaagttctcgaatgattatttgctactatcactcgtcggatgcctgcatgaggaccatcaccttcacgaggttctccctctaggaaggcaatcttatctgattcactgaagatgttctcttatgggctgacatggtcggtctttgctgggcttcagctttcccttgcctgaccctgtactgggggtcaggggtgcggacaacaacgctgactgtggccccaagtggaaggttcagacccagagctccatgctgcctgcccacagagcgtgcttggctttcccactatgccgctatttaagttctttgtgttggcttcctttcaccaaaagatttatttcatttttgactgtatgtttgtgtacatgtgtgggtgtctggggaggccagaaaagggctgtggatgtcctgcagcaggagtcgcaagctgttgtgagccacttaagttgggtgctaggaactgaaagcaggaaaccgtctccacagagcaagctctccaaactgagcattgattttcttaatgaaaaattccattggctgtgacagtcaaagtctcactccctttgcttagttggaattattgaatttggatcaattt

SEQ ID NO: 3772 - DNA, 1000 bp, mus musculus
gcctccaagggcccatctgtttgtgcaggtggggcagattcaccagcatgggccagggctctgagggcctccaagcaacccatggctctgccacctgctgctttggtgacctttggcatagcctgtcatcgatctgagcctgtttcctatatgtaaccgagcagccctgaagtacctcagggttgtcatgacaaatcagggcagtgttgtatcaagttcctagtgtcaaccaaagccagcgttctgttccccagcatctgctcaaagcctcccacacgggctcactggtggatgacaggcaggtagtgggtttccctacgggccactccaaagactgacctgtcatccctcaaacccaagggggggctcttttctgggagggtggtctgattggggttagtggacacctgctctgagtgcccggatgcaggcatctgtgtaaacttgcccccgatggcatgcccacaggcctgccagggtgatgactgagcccatcgcaagaaatcccgcagttcggctaacttctaagtaaaaaagacctgggtggcgcagcctagggcagagttgattattgtggcaagcagatctgcaggccctccgtggagcaaatgccatgcttctgtggggatggagcctttccggccaagagaagatcggatagcaaggagggcaagggacttctgaagcacaagacacccccctcctggcctctggaggaactgcaccctaagttgcagcctctgagctccctggcctggggtagcatgacccaggcctgaaaggggccagttgatactaactgttcatcgctgctctatagctaagagcagagactcctcattcttgtaagggtaatggggcctggctgtaatgagagtctccttacaggagctggaacaaggtaatgttctgctacaaagccggatgggagagagggagggggagggggagagggagaggaaagagaagggagagggagagcaagcacttttctggatgc

SEQ ID NO: 3773 - DNA, 1200 bp, mus musculus
catcgggagtcagtgatgactacgctgcctctatgctgtcttggaggtaaataaattaagcaagggaaaatatccagttgctaaaattgttatataaagtttatcagacacagcaaatctgtggatttcctacctcagaatcctctgggacacttggtaaaaacgcagagccctagctccgctccagctccctgcatagagagactttcagggagggagagcttcgggaagctgttgttttaaaaagcatgttgtgtctaatgtacacacaagcttcggcatacagaatccctccaagagcacttaatcccgtggttgcccagaggtgattttctcagagtctccttgaaacggagaggcatcggcagctgggacaatgcttcggaacccctgagccggagctaaacctagtcgccttctcgggagtgacacctttggctgattttgtgaatcagccagagtcccagctatgatccaattaccatgattcctgccatccgaggcaacactccattaaacatcaggatggagagactcaagctcaccacttgagtgccagctaattaaagtctttaaagtatgcagctagaacacagccaatattccagaaacagacaccgaactggggatttaaaaaagagagagagagaagataaagaaagaaactttggctcagaaacctacgtggctttctcttcaaaatgacctgagggctgggagatgggtcaatggataaagagctcgccgcacaagcatggacggcctgagatggagccataacaacaacacagaaaagccaggctcagcaacacatgcttttaattccagcactggggaggtggaggcaggaaaatcccaagaacctgctagtctagcagaattggttctgtgagagagcctgcctaaaacaacaaggtgagcagtgaagaccctcaaggtcatccgtcagcctccacacacaggcacaccccgtgtactgttactgtatacacacacacacatccatgcaccattactgccccccccacacacacacacacacaatgatcttacaattaagccacctccatttgagaggcaatggggcccagagggtggagcgaggacaaggtatcttgcagtgactctgatgcagcggtccagtttaagttcacggtgcctttctgtttcgggctctgcagaacaacaggtgaaagcaca

SEQ ID NO: 3774 - DNA, 1200 bp, mus musculus
ggaagtggcccagtaggccttcctgactgcactggaggaggacaggccttgcaaggggtatcttcctaactgtggacaccggaggtgcaggagaccaactctgttagatctggcttccaaccaatagttcggtggctaccctctcccttaggcgtgggcaaggagctcctggtgttctgggaggccggagtggatggccttcctcatggagcaagttcccaaccagttcaagttaggtttctaattgtttatgagtgccagagaccaaaacctgtccatgggcgtctaacaaggctgccaaactcttcagtcttcttggtctccactcagaagagaaagcctacagaaacaaccagccctgaccctcagctcagctggcccacaggtttggctggcacgtattagcccacagagggaaggcttctggttctttctgagagggtaagaatcgcggttacaggcgatgaggcaggtgggtggagggttgcgcatcgtcctcccttcatgtgagtaggaagtccacgagtcttgttgaagatgaccagaaggctcgtggtccagtgagggcagatggaaggcaaggacaggaggggacgcccaggtggaggtgcagatgccctcagacagccataggatcccatacacaaggcctgttctcctcagggtcctccaggctgctggaggataagcgccggcgctgggtatggcgacagttgacagtgttatcctcatgctgccaggtacctggagaaggaacaacagaggttctgggagccattccttaggccaagcatacatggtgtcccagtacagcagcacaggagtcaacacagaatctagcaggatgtgtgtgacgtgagacatctggctgcatgagccactcctgagaggaagagtgaggagcaggtgctggcaggtgccacggctgcccctccctagctaggtagtcgctgcctgtaacccatggacagatggggagactgtaggtgttcttcattcgtgaacttacctagcatccagcttgcatgttacatacttggttctggccttgggagtgttagttaggaggctgaactgggctgcttcctgcatggaaggtgggtgtacagagagcacaccctgacctatagcctgtgtctgcaggggggtaggggcgggggtggggctgcagcatagcaggggccagggaagggaagcctt

SEQ ID NO: 3775 - DNA, 1200 bp, mus musculus; identical to SEQ ID NO: 3774

SEQ ID NO: 3776 - DNA, 1000 bp, mus musculus
gcaggaggcatagagaggacccccacagcatcatctgtataagacacacactggatcctgcagcatcgtctgtataagacacacatgaccccatagcatcatctgtataagacacacactggaccccacagtattgcctgtataagacacacacttgatcctcagcctcttcctttcgttgtctcaggtgtgtggggctgtctccacgggagcgatggctaggtccgtgtctgttgactgcagatctggagtcccagaggaccttcactaatctctgctttatggaggcttcacggtatttgtgaaaggatttgagttggatcagcactgaccccaaggtcagctgatcagctatagtcacactatccctgaaggtgccctgtgccctggaagctctcccaccatgactctataagtcagtggccagtgtctcctcacgtccccccgaatctcgcacaggcttatttgcaatctgaagacgcttgcacagtctgcttgccagttttacctggctcaaccaggctgctccagcgcccctgccagggcacagcctattagatgagctaaccgaccaactgtgagtcctctccaggcctgctctgaactcatggcccagtccagccctatcgcacactggggaaactgaggctctgagggcctggggtctgtgcccactgtctcagatagcaggagaagaaaacaggagccaggcaggcagtgcctcaggactcctgaccttggcactctgtgtcccactggggcagagggacaagagacccctgaagaccagcacagatcctagcagaggtcaggcctgcttgggaggcatccttagtaggagcccagacctgccccagctaacacggctgggctgctcgcctcacgacagtctccacttcagtcagaaatggctgacattaacttttaatcccagcacttgggaggcagaggcaggcagatttctgagttcgaggccagcttggtctacagcatgatttcc

SEQ ID NO: 3777 - DNA, 1200 bp, mus musculus
gcacatgcccaagcctgaggcgtcatttctaaagcgcagttaatgcggactcggaggacgagtgtggtccctgtcttggagaggaaagactttctttcagattacaagttccagtctaccaccgaaggaggccaccatgggaaccaggagccaggacctgaaacagaaaccatggagcaatgttgatttatttccctggctttcccagctccttctcttctcttctctgacaccacccacactgagccggaccctcttacatcaattagccatcaagaacatgcccacaggccgctctgacagaggcggttcctcagttgggccttcttcttctgcagtgtgcctaggtaaagctatgtatggcaccttgacctgaaagtccaccctcaccagctctcaaattccttcaggatgatcaacccttgccctctgaatctctttggcccttaggatttctatccaggccactgaagactcccaaggacattggcttgtctcccccaacatcaaatgcctgcactccactgtagataccggaagagtagggagctccgcgccctggtgtctcacactgtgcctgacgagcaaccactgaaaggctcttttgggtcagcttgatggctatgggttgtctgggtagctgctgagctctgcttctgtctgggatgagggtttggaagatactgatgtttagtcagtctcctgaataaagatttactctcccgaatgtgtgcgtgtggaggggcaccatccaatccacagagggcctggaatggataagctggagtatgccacctgtctgtgcttgagctggggcatcaactcaacttctgccatctgacatcctggcccatctgacatacttccccatcagctccaggtcctcacggcttcagtcttaaactgggagttttatcattggtgccctgagctcttggcttacagactcagacaaaaccacgccacaagcttagagaaggcagaccatgagaacattcagcttccatagtcatgatagccagttctcatgtcatcacctctaatcatgtccatatgaatacctgtacctgctcctgcacctacatctgctccttcacctgctcctgaacctgcatctgcatctacactcactcctgcatctgtacctgctcctacacctgcttctacacctacacctgttcctgcatctgtatcttctcc

SEQ ID NO: 3778 - DNA, 1000 bp, mus musculus
tgctgctctttagcctctgagcccaagcccagcagccccttctcagtcagatcagccctgtgctcaccagctcaatatccacagttgcatcccactctgttccctccatggtggtcctgggtcagggctgggatattttcttattattgtcggtctccccgatgggctcacaatctcactccctgtcccctggaacccagatcacctctcctccaaacaccggagggagccaacgacaccccatgtatggatgaacaaacttcgtgagaagcacgtgagactttaatgatttttgatgagtgactgtgacagatggggctactgcagtaggcacaggaaatcccacaggacctcatggaacctgcttgtacctgcagtgagggccctgggactctcagtcctggagtgagtgctggctgaaaccttctagtaaattttcatttgaatacaatcagtttatgcttacaaagcagctggaggcgaaggaggggacacaggaatgtctgcgtccccaccactgagatgtaccatttacaccatgtcagtggagttagtgaggtagaaggggcgtatgaccacacggaagctgctaaaggcccctgaggcacagggaaagagggagggagtcttggaactattggtgtccagggcagtgggaataggggccttggagccttcaaagctggtgacatccaccacactgtagcctccgcagaggatcagtactctgttctcatagccaattgtcggattggagtagctggatgtggtgaggcccagtacagggagctcgttagaggtacacgagaagccatagttccagcagctctgcatggtggggaggtaggtggctgaccaggagatctgcttgtccttgaagaggaagctggggtgttgtggggtttggaaggactggtagctattgtaccgggctactgagccatagccatatgtatagagctgattgtatcgattgtattcatatctttgtgccctccag

SEQ ID NO: 3779 - DNA, 1200 bp, mus musculus
ttgcatgcttagtcaccagggggcagaattgtgtggcaagattagcaagtttgcccctactgggagaggtgtgtcactgggagtgggctttgaaagactacgtcagacccagtctctctctctctctctctctctctctctctctctctctctctctcccccacccagaggacatcaggatgtaaagctctcagctactgctccagcatcatgcctaattgcatgttgccacgccccctgccatgcccatcagggactaaccttctgaatatgtaaactggctcccaacctgaaaacgtaagccagctcccagttgaatgttttcttttgtaagcatctccttggcttgcacatctcttcacagcaacaaacagggactgagctaacagtcgataagccctgtggtaagtgactcttacaagtaggcagaaccgacctgatgagcacggtagctattttgccacagtgtatgggcacatcccacttgctaccttcagttatgcacactgcaggtgcgtcccatctgcacagcctagccaacacctgatggagaaggccacaccatagtccccaacctggatcaaggcaggacaaagctgggctcctggctccaacagctggcccctgatccacccttgtttattttcttaggttggtactcagtgccttctgtggctgtgcccttctgctgcctgcctgacctcaatgcaccttagctaagaagacatttcaagtacagagggtacaagtgggaaacagcttcactggggaatcaagagacaggtgcaagaacctaggagctctcaagctctgaggatgcttggcttcattctttcccataccgtgtttataattaactatccctccctcccgtgagctttaaatcaatgcagacactgtgtggatagtaacagctagggagtaacaggctgtggttggttacatagtttcattttctatctctgagaccttgtcaacttggacagcccagtgagcatgtgacaggagctcagaggttgagggttcccatcagacttggccagattggagcccaatgccagcgagtacaccgtcccatctgtgagttgtgtcccaggctctgggtggtcactggctgcacactccctttcagcaccgtccagcaccaaatcccattgatcctaaggttggaatctagactaggcacatggctcatgtaag

SEQ ID NO: 3780 - DNA, 1000 bp, mus musculus
cttctgctcactggcccaggcattcccctgtactggggcatagaactttcacaggactaagagtctctcctcccattaatgacctactaggccatcctctgctacatatgcagctagagccatgagtccctccatgtgttttctttgattggtggtttagtcccggggagctctggagatactggttagttcatattgttgttcctcctatggggctacaaatcctttcagctccttgggtactttctctggctccttctttggggaccctatgctcagtctaatagatgaatatgagcatccacttctgtattagttaggcactggcagagcctctcaggagacagtgatatctggctcctgtcagcaagctcttattggcagctgccgtagtgtctgggtttggaggttgtttctgagatccacagttggggcagtctctggatggtccttccttcagtctctggtgcgaaatttgtctctgtatcgcatagattcccccttctaagaaagattgaagtatccacacgttggtcttctttcttcttgagttttatgtgttttgcaaattgtaccttgagtattctgagcttctgggctaatagtcacttatcagtgagtgtatatcatgtgtgttgttttgtgattgggttacctcacttaggatgatatctcccagatccatccatttgcctaagaaattcatgaattcattgtttttaatagttgagtagtactccattgtgtaaatgtaccacattttctgtatccattcctctgttgagggacatctgggttctttacagcttctggctattataaataaggctgctatgaacatagtggagcatgtgtcctgattacaagttggagcatcttgtgggtatatgcccaggagtagtattgcaagatcttctggtagaactatccccaattatctgaggaaccgccaaactgatttccagagtggttgtaccagcttgcaatcccacaagcaatg

SEQ ID NO: 3781 - DNA, 1000 bp, mus musculus
gagcgcactagacagagtggttcctcctggcagtagcctgttatgggcttttgttcagcatgtaacagcatttggaacaaagatgagcccttataaatcacagatgcagatgaaatctgcaggcactgctggcaggagtgcacattaaataatcgagtgaagaagaacaggctcagctcactctcgctcacggtgagcaccatatttaggtcccttttaaggacttcacccaccagtgtgcttcattttaatatagggattaagcaaacaaacaaccaaactgattgcgtcctggtgcttcctgaagtagactttcaaaagttctgtactatttgaaatcaagattaggcaaaggtgctattctgtcactccacactttcacgacagaaaccctgcctttgcaagtaaaaaccagttcccaacacatttcttaaatgtactctgtaatctgctggcactggcctcgagtggaaggttctgggagcagagctctaagtgccttccattccgtgttgacaggcaggtgaatgtcatctttagaatttggctttcactgttatatgaggttgggattaattaacttccaaactgaaatgcagacatttttaggattatttgcaaaatattatagctggcttgttcttctgtgtgtgtgcctatgcatgtgtgagagggtacacaggtgtgtaagtgatgtgcatgtgtttgttgggggcaaagatagagggtacacaggtgtgtaagtgatgtgcatgtgtttgttggaggcagagatggagggtgcacaggtgtgtaagtgcatgtgcatgtgtttggggggcagagatagagggtgcacaggtgtgtaagtgcatgtgcatgtgtttggggggcagagatggagggtgcacaggtgtgtaagtgatgtgcatgtgtttgttggaggcagagatggagggtgcacaggtgtgtaagtgcatgtgcatgtgtttggggggcagagatagagggtacacaggtg

SEQ ID NO: 3782 - DNA, 1400 bp, mus musculus
tgtggtgggtattacttcatgctgtccctagactttctatgccttaagattattcttttccttgaatttaaggaaacataaagacaaaagaagaggggttgattttaaagggatgctgggagcctgttagcagtttatgccatattcctaaacacatacacacttattgaagctgttttaatgatcagaatctagtaaccaaatgaactgctcaagcactagttcttgcctcttcagggctgtttccaggactgtccatctatctcttccattttcatggaaagcatgatattcatgggcggcttgtaatctaagacatccagatacccaagccacacctgcatcagaaccaacaaaactggacaaatagactctctcatgcttcacaccaaatattggtttaaggatttgggacatgtggtcctccgtctgcttggggctcggcatgctgggagaggtggaggtgggggagtttgcatgcaaccccacggaaccaccagtcgggcattggactatgagaagccaggggattcaactctgtgggtgagggaggcacagtctggcatctccatggaactgtctgagtctggctctgactctcaggcagcacagatgatgctgggcaccacggaagagctggttctggggttcctgggttgctcagaggtcagggacaacaggttcttgctctcggctatcccagaaactgctgtatgtaaacctgaggatgggtggggaccatagggcaaactctgtcccacggcccagaggaaaggggtaggaggagagagctctggcaggttaccacagggaggagagagtctggcttgctcagtaagcagctaactcatcggggtacttggtttggctggaagctgtggctggagtacagagagggctcctgttgggaggctagatgcacaggactttagagggaaacctgctccattgctccagcacagtgattcctaatgagtagagatggtccatgggtatataaaaaagcagatcacaggccaattattactatttgacagagcaatttactttaagttgcctagaggtactagagacacaggcctcaaggataatttcttcatccctaccttgcccatatattccaagaaaaataagaaatgacacaagtcagtcaacatagacattgctctgtaaatattgcttctttgttcatttaccacactatgccatcttcccatgttcattttgccctgttgattcagaggcatggctgtctttagagaatccttaaagctgattacaatctgtgggtatttcctgactgattggatgtccattacttgagatcttgtttcatttttatgcctgatctttgggctatgagtatcattggtgaatataggtctcagcagaggagagtc

SEQ ID NO: 3783 - DNA, 1000 bp, mus musculus
agaaccggggtataaggtggtggtagagagtcgggccatttcgaaggttcctctatctctgagtagatgttagagacggccgatggctggggcggggtagatttctcgatggctcctttaggtagtagttttaatttctccttctcagcattctctcagaccgtcaagaccttggtacctggatgtaggagtgggagaaatggacgaacccaggcaggcgggaatcgcactaaatcttcccacactgtgatgtacggttgctgatctggatgggactccggtccttcctgaaagacaatggcctttacggccctaatggtggggagataaaacgttccttcgggaggccaccccactccaaaggtgggccagtccgaggtacagtaagactgccaggatttctttttaactattactgataagtttcatcctcttgccctaacgtccatccaatggtcctcagtcaaagataacggggttgagacagtctgttccatgacaaaaaccagaaacagagacaaaacgaagacagagacaagggaaaccagaacgtccaagcacaatcgtcttggacttgtacaaccagccaaacgctacctctgacggggtgggattccacgttcactcccgctccggcagaaagagcaccttatctccctcactctgccagaggacagccgggtcttcctgactgtctctgaccctgggcagttcctccagggtcgccctagaaatgtctccctagggttgcagcttttatgggctcaggacgtctccctccgcactcactgaatcctcacggatctcagcagcagctgccagaatactagaactggaaaaccgagacacaaattcagcggcgccgcactcagacacaccaaactcacacagacgtacctcccagggatattcttggggttctggtgcccccaaaatccaaccatttggagattagctgccacagtatgacgagattcacaaaaagagggaggcaggagaa

SEQ ID NO: 3784 - DNA, 1800 bp, mus musculus
agtagtaataattaggcaattttataaaagccaagaactttaatcctccacaggatgccatcagtgttcaattcaatgagaatgtaattgaccttccctgctacaaactaagcatctcccctgggcccggcttgttcgtatattagcagttcaaagatgacagtgcaggccatcatctggaacatcagacaatactttcttgtgagtccttaggcctgcataattgaaataacagttgttgggactgcatgggaagcactgggaacactgaacatgctaacatagttagcctcaaatcaaagacgtcaggtgattatcctaggagattttagtttgtcacataaaacaaaacaaaacaaacaaacaaaaaaacaacattcatgtagcctaggatatcacatagtcatgtgttgacttggcacacagctaagctgtttggatatatttctagtttggtctcggtgtccccacttctttttaaatcacttcttgtggagggaggggaagagggagccacatttaaatttaatggagatagcgttggccagaactttgaggaacatgaatgcgttcatcccacccccttccttagaagcagcctcccgtgtgaggtgggatttgagtcatattaatttgtcccagaccacaccaaaatttagctgttcacatctgaaacatcccacgatttctgtagctaggaggagtttgtttagccatgttacagcttcctatttctctcctctcccaagaaaggctggtgtccttataagggagacagcctccatttccaacagtgtggagagctaaataaatactctctcacagtcaatgcagaggtaacttttttttttttttttgatggattaaaatcactgaaaatcacggaaaatgagaaatacacactttaggacgtgaaatatggcgaggaaaactgaaaaaggtggaaaatttagaaatgtccactgtaggacatggaatatggcaagaaaactgaaaatcatggaaaatgagaaacatccacttgacgacttgaaaaatgacaaaatcactgaaaaaggtgaaaaatgagaaatgcacactgtaggacttggaatatggcgagaaaactgaaaatcacggaagtgaggggcttttgtctctctctcagtgggagctgccattttaatgggacctccagaggggcctgatttgatgatgtgaagtaggcctggaagaatctaggatttttttttaaatttcgattttggttaatttaaccatagtagctttcaaaaggactgtaatgttaaagtgaatccacagaaaatgtcgctgagaagcggctaccagataatttcagggactcctttctgaagtgctgtcctgtgaaaaccaaactcttgaagttctaataggcattatgagctccctgccctcaattgggggggggggtgtggtatgggggacttttgggatagcattggaaatgtaaatgaggaaaatacctaattaaaaaaagaaaagaaaaaagaaaaccgggagaagaattcattctcagaaatatgcatatgtatacacagacacaaacacctgccctgaaaccagatgaaacagaatcgctcttagctgactggtgaggccaagcctgaattttggatggctttgtggtaattctggggtttcccttctccctgagtcatagtcaccgcggtatgtgaagtactcttcccaggagatctctaatgccaaagctgcacaccacgcacttgacccacaaaaggatgccaaacccctgggcacacttcccaaacttttgagact

SEQ ID NO: 3785 - DNA, 1000 bp, mus musculus
cattgagagcaaaggcaattagccttcagaattggctggtattccttcctttccttctttttctaagtgaaccagcgaagccattttctagaaaatggcaaagagcagattcaggcctgcaatttccttgtctctgcccagatggatgttctgggacaggagccatgtcaccatgctctgtgctatgctgggcattctggtctctgagcctgattgtctattcatcattccagggttctgctgtgctgtgggtgagggcatctctggggtcatctgtctcttggattgtaaggctagtcgcactgcataaagggaattcaccacttgtgacactgaatgtctctaaatcctgtagctgcaaactacatggcttcaggaagggctacacagagcagacactgaaggcagcagcgtttccaaggatcccagcctggttcttattagccagttctgatcccatggtgacctgatctcttatttctatgagcagatggccttgaatgctgagagtctctctctttgtactgtggctctctcaaggatgtgacacacatttctccccacattccctgtcctttctaacttttcaagcaatttctaatatccagttcttttagcctaaccccagcatcttaaaggtctttcctatagtgagggggatttggttaatttagcctcccagctttgacaaacaaacacatctttaatacctattctacatggttgccaatcagtctacttctccgtattttgggcctgtcacgttctgtacctaacagtgacacatccctcatgtgaatgtttggccagaatccatccttttagactggattcttcttcacttgctaggggactttgcagccactgaattcctagttattccacacgcagcctattcagttgttgggatccagggcgctagcaatggcttcctgaagtgcaatctcaatatgttgctgagcttgaattttgagaattttattgagcattttgcatctct

SEQ ID NO: 3786 - DNA, 1000 bp, mus musculus
atattccttgatgttcccatggacttgatgtagcatgtgactgagtgatgatctgtcttagtgttgtgcaacccagatgaatgacagttctcaatgaaggctgattgattgatcaccagcagcctggagagcaattcccagtgacctagagggccatgtccttttctctgtactacccatcctttatatcgatgacttagatgaaaacatggaaagcatactgatcaaatttgcagatgctataaagcaaagagaggcacagccaatacagctaacctctaaaatgattttgacaggctggaacaatagccccaatctaacaagaagaaacataatagagatgaatggaaggtcctgcacttgggttcaaaagccaaattgcatatgaggtagggaggaaatggctatagagcagcatgtgaagagaaaccttagagattccactgaaagagacacagtgggtgttcaccacatgatggtaacagcaatgctgcctgtgcaggccaggcacactaatgtgatggctgtgtgcagggtaaggcaggcagcaaagttactgcaacaagtaaagatctgattgtacattcctgtagtcaggagtgctgaggggaataagcagacccagttttagtcaaggcaaagggttctaggtggaaggagacaccctaagaacatcaggattaatgaagaaagtgcaggcaatgagcattgtatacagggagctcaccatgagggaaacccaggagcagccccttgaaagtgctttttgcagctctagcaaaacttggctctcctgtgaggtttcaaggatgagtggatgattctagaaagatacgtcctctgggctaaatgatgctccaagggccctaggccagcagatcctaaaattcacttttgctttatttagtttccacagcaatgccacccatgcggcagagtaagaaatctgcatcaaataatcaaactatgtgatggctgtgtgcagggtaaggcagaatga

SEQ ID NO: 3787 - DNA, 1000 bp, mus musculus
tgtgattctgttagcctctgtcagcactcctgggagtctaactctctcctgagtttcagtggtcagagcactctctgcaggcaagctctcctcttgcatggaaggtacacaaaggtctggagctcagatccacctcttggctgaagatgaaggcctgaatgacttatgaatctgtctaagaagctctgttgctcctgcagcccaggcactctcatgagctgactggtctctgagagtactaagatacaagatggtgccctcacctgagtcccgggttcagagccctccctggaggccgactcccctctggtggggaaggtgctcagaggtctgggtctcagctatgcctcctgactcaggatgaagacttagttcccctgttctagagccatcagttgccaacagcatctcagcatgtggtaagcctatccatgctgggaatttggctggctctatcttcttctggtctgacatatgcagttatggtcacctaggaattcatgtgttcaggggctctatttcctctggaaaatgatgtttcactgtagaatgtctgcatgtctgctacctctggctctttttttttttttaagatattttctttatttacatttcaaatgctacctggaacgttccctataccctccccctgccctgctcccctacccacccactcccacttcttggtcatggtgttcccctgtactgtggcatataaagtttgcaagacctaggggcctctctttccaatgatggccgactaggccatcttctgctacatatgcagctagagacacaagctctgtgaatactggttagttcatactgctgttccacgtatggggttgcagaccccttcagctccttgggtacattctttagctcctccattgggggccctgtgttccatcctatagatgactgtgagcatccacttctgtgtttgccaggcactggcataacctcacatgagacagctacactcattctgcctcctgtt

SEQ ID NO: 3788 - DNA, 1000 bp, mus musculus
tgcaagaacttgatgaccctctgtctccaagtcctgggcattcctggggaagaggaaaagtgcaatgaatgaaaaaacagagcaaggaaggacagtcggttttggtcacatggtctgggaaagatgttgtattggcataatcttaactttgtcatttataaaatatatacagccagatgctcagcacaacccaggtttattccttgcacacattgtcttatgggtttgatggctctttttataatgcatatatgtgggtgagtgttcacatgtgtgggcatatggctacatttgcacttggatgtcagatgccatcctcagtaactctgtccaccttctttaagacagggtgtctcaattagtcatcagttaggtctggcccgtgagtcccagggaccttaccatccctcccaggcactgaaatgccaagtttgatctatgtacctggctttttacatggtgctaaggattgaactcgggtcttcaatatgagaagcagtaattttacccactaaactgtccatccttatcttctctaacagcaaatgatcaccccaacttaaaaactctggagagattcacacctgagtcctcatcagggcaccagtcccagcattttctccagaatgactacaggccttgagccatgtcacactgcctctaaaagctaatgtagagccccaaagattgagcacctcacctccacaggattctagaacatagcagttctcacaatctacagtagctcaatatgagtagaggtgggaggtgtttccccaaggcttctcattccatatgtgcttgcacaggttttccattgagagatcacgtccccaacttgacacacacacttgattcactgtgttcccgtcaaagcagccaatgtggaaagtattacgacagccaggcagccacctctgattagaagcagctttggcttcagatgggatctatgttaccagaacactgggcgtcttcaggggcttacctaactttttga

SEQ ID NO: 3789 - DNA, 1000 bp, mus musculus
cagtgcctgccctagagactcactgtaggcctgagttcagcagaatgactccctgagaaccctaaggaatggagagatctgctggactgtctttgtaagagcagggttgcactggaacagtacgggctcccctgcaaacctgttcactgactaggaaaagggaagccagcttcctccatggtcaagttctgatctctgtgccctttgatcatacacggacatgatgggaaatgtgttccctgcaacctgctagctggaatagatttacagcttcccccacccagctgcctgtaactatatttgctgctcagaaatgattttacaaggatccaaagagacaagtgacgggcagcacgtagtatgggcagagttttgataacagatgtgtcagctgtatattatgacagcttctaactcctaagatcccagattctgggtgatggtggctgctgggctggatgggagaaggcaagctcactctgaggcttgttgtagcttggtggtacttgatgatgagtggtaccaagaaaaatgtgtgcttgtctctgaagggaggagcttgaagtgtgtggttcgagtgttgctcttccccagggagatgacaaagagctctcttcacctggcagctcctaagagggaaagcactggtggcatcaaggcactggatactgatgtagattccctcttcggtggctgggataggctttaattctgattcctgtattgtgtgggcagctgcaaactgttgaagcacctggctgctggctcatgtgtaagtgtcccgtagctcatgtctaaagatcagaggatagtcagggatcagtcttcttcatgtcacatcactttacttctttgagacagggccttgtttgaagtgtatacaccaggctagctggcctatgagctcccaggaattctcccatctttttagaagagtgcagggattaaagatgtcagctatgtggtccagcttctatgtggatgctgagggtctacgctc

SEQ ID NO: 3790 - DNA, 1000 bp, mus musculus
tgtgtaaatgtaccacattttctgtatccattcctctgttgaggggcatctgggttctttccagcttctggctattataaataaggctgctatgaacatagtggagcatgtgtccttcttaccagttggggcttcttctggatatatgcccaggagaggtattgctggatcctccggtagtactatgtccaattttctgaggaaccgccagactgatttccagagtggttgtacaagcctgcaatcccaccaacaatggaggagtgttcctctttctccacatcctcgccagcatctgctgtcacctgaatttttgatcttagccattctcactggtgtgaggtggaatctcagggttgttttgatttgcatttccctgatgattaaggatgttgaacattttttcaggtgcttctctgccattcggtattcctcaggtgagaattctttgttcagttctgagccccattttttaagggggttatttgattttctgaggtccaccttcttgagttctttatatatgttggatattagtcccctatctgatttaggataggtaaagatcctttcccagtctgttggtggtctttttgtcttatagacagtgtcttttgccttgcagaaactttggagtttcattaggtcccatttgtcaattctcgatcttacagcacaagccattgctgttctgttcaggaatttttcccctgtgcccatatcttcaaggcttttccccactttctcctctataagtttcagtgtctctggttttatgtgaagttccttgatccacttagatttgaccttagtacaaggagataagtatggatcgattcgcattcttctacatgataacaaccagttgtgccagcaccaattgttgaaaatgctgtctttcttccactggatggttttggctcccttgtcgaagatcaagtgaccataggtgtgtgggttcatttctgggtcttcaattctattccattggtccacttgt

SEQ ID NO: 3791 - DNA, 1000 bp, mus musculus
ggggccgccagtctcttgagggttaggtgcatcttctgtgattgaacccaaaccttgcactcctctgctgtatgtgtgttgggggcctcgtatcagcaggtgtatgctgagtggttggtggtccagtgtctgagagatctcaggagtccaggttaattgagactgctggtcctcctatagggtcacccttctcctcagcttcttccagcttttccctaattcaaccacaggggtcaccagcttctgtccattggttgggtaaaaatatgttttaatagtcagcagtagcctcagaatgctggtaactttaaagttatctttcctatgtgaacactttcacatatgggcatagagaattgtttaagttacatatgtagaacattttgtgggtggtatctatcctcaatgtttttgtgaatagtcttcttaaattttcattaacattaaatggtagagtcttgatttattcacacagaatatgggagcaatgtcatgcaatgtgtccatggtagagtagttacctacacaaattctgaatgtgcaagctttttacatatttgattttatggcatatcttctctgaatcctgagttagtcttctctgtgtggatgaagctcagaaatatggaggtcaaagggtaaccttgaccaaggattcagttttagagggcaagaattccagttaaagatgacaatgtcagggtgagaaataccatttcactgacctggaggcctctttgtatgggtccggttatgctcaagacttaagatacactgactttagtggaaacagagacttatggaaaattacatcacttgctagtgtaggattgaagttgcaatgcctggcttgaattttggccttactccacccttttcctcctccctggctgctcctgtggccatgtggcccaatcccaaagccaatacacagagtggccttctgtgcacaggatggtagcttctggcagttggctgatgtatccattatgccacaagg

SEQ ID NO: 3792 - DNA, 1000 bp, mus musculus
atgtgcaaaagtcacactggttgaatatggtcctgcaatgatatataacgagctctgctcagcaccagagatattgctcacaaaccaaacaaaacatcatgctaaagttcaacatccacattaagtaattggtcaggcagtcaaatttttgcaggtctattataaaaatattacaaaccagcttttacttaagcacctcataatggagttttagcaggaaaatattgtgcatatattttgagccagatctagactgcattgaggaactgtgtcctcaagaaggcagatttccctccaatgatgaacttagtttttttttctttactatagacactctcagtaagagaacatgatagtcctattgtctatggttttcaaaatgaatgtcatgaatttttctgtagtgcagcaaagtcatgaaaatgccattatgatttagtttaggaagtagacaatgtccctccagtctgctttccttcctgttcatctttggatccaaatgaaacaatagtccagtgcctgcaagccaaatgtgtggaaacaatggtcaaggtgagtgaaaattcctgatgctgaaaataccacaaaggagaggaaagagaagaggccaagtgcacagacaacatggacaaggtcatccagccttggtacagtgatgtcatcctgaggtacagactggagccatcagaagatgtccatggtaacacctgactatgcagacatccccatagtgagtatggaagctggcacttttcacagagctgtgaagactttaagtgcagcctttccttgggggtgtttgtttgaccatactctctgacatccagcagtgtggcctgtttagtttgcacagctatttgttgatcatggagaaaaattagaacttacgttggaaggtaacatgtaggaagccagggtcagtgtactgtctcttttgctgttctcagttggcacttggtcaaagtcagctgagctttggaccacagaggaaagctctggt

SEQ ID NO: 3793 - DNA, 1800 bp, mus musculus
tgtggtttattattttcttcactaaagtgtttgtaaaaccctctccagatctttaaccacttaaaaaaacaatcttttcctctttctattatgtgagtctggtttgaccttttagttgagaaataattaaaatttacttctgtgtgtgtgtgtgtttattcatgccctatgttgtctaattttaaagataaaaagataagcaggatatgagctatgtctgtatttaaacctttaaggtgacttttctattcaaccatgaaacattttaggttctaagatgattcttaatgctgtctaggtcactgtctgcatgtacaccatggtcacaagtcactgcctcctaagtcctttgcactgacattgtggagacccagctcaggaggtttcaaacagaaacaaggaccttaatagcagctgggttagaggttgtgcctatgatattttgggtaaagaaaaatgcgtctgccttctgcccttgtcctaagaacttgcctaaactaaatttaaaagcatttaaagacaacataatattgagtatgtggtactgtcattattgataactcttatataagtctacagtaaaaagataaagtggaacagaaagaaatacacaatgtccagttggaaagaaaaggagcaccagaaaacttaactgggaagccaaagcttatgctaaaagagaggcttctattgttaagattagtcccattaagtaggggcttctttctcttctttggaacaacaagaactgtgccccaagtgtgaggctctgcccaactaagcttccaagtgtgtgtgtgtgtgtgtgtgtgtgtgtgtgtgtgtgagagagagagagagagagagagagagagaggagaggagagtttcatttcttccagaaaacagcagcatctggtacaaatgtgatttaaaggtgccaaggtccatcccaagccaccagttggctatgttgttcacatggtgctggctttggaagcatgcaagaagaaagagtgaggtggtcatggactcttcttctggggtttcgaagagaaattggaaccaggtaaattatggcagtgttaaagtcactgtgagaagaggggcctgggaagtcattgtggtgaagctataaaaggaaagcctgaatttcaagggagattccaagctactgaagatacctgaaacatctgccaaggaatggtgcatatgtagttgagccagtcaatgtgtgttataggcagcaaagccaaagggtataagctatctgaacccttaggaactgaagtctcaaacatctgacatgaatgtgcagaatttggtgtttgctctgctgaattttggtcttgattgagtcatcattttcttaatatttcccctttcttctattttggaaagggaatgcatattttgtggcactgtacattggaagattttaatttgccttttcattttacagggtattgcagttaagagactttggatttttacatagtgttgcatctgtggggatttttaaggttatagcaaatgcattatgatattgtcatgagcctatggaggtcagagagtggaataaggtggtttgaataagaaatcttctcccataggctcagttatttgaacattggttccttattcagtgctgctgtttggggactctttaggagatacagccttgctggagaaagaacccttttccagttcagcttatctgctttgtatttgtggttaaagttgtgctctctcagcttcttaccctggcagactactgccatgcctcccttgcatctgtgatcacctttggaactataagac

SEQ ID NO: 3794 - DNA, 1000 bp, mus musculus
gatctgtaaatccatcagaggcccttatcttctgtgcccctctgccaaggactttctttcctagagttctaaaatcattattgtttatcaattgtctgcctgtttgagatatatttgctagcttgtttattttaatctgtctttttattatttatgtggaataattgctgtgtcttgatgtttttctcagatctgcagtactcaaaggatatatccaaacttaatataactggagatttaatatccttacctcaaaatagtaggcagcaggagttgaaaataatcagcaacccaaccaagaaaccaaatgttacagctaatcttatttgttaatttggctttatgtagaatctgctaagacccaaacagctgggcacacctgtaaaaaattcttctttactggatcatttgaagtagggagactacattctcttggcagcatgggagaaggaagcttttgctttttgcctgcttgaccacactcatgctggcaaggccatctgtggtgttgctggggaattccttagctgtacctacgtttgtgagattccagtgaagatgaaggaacagcagtcctccagcactctactaccacagtgggaatgctgagacatctagtcttgtaggtggaacaacaacttgattcttgacctttatgtagggagatatccactattggactactgggagtagagcctgtaaggagctttaatacatcacaagtataagctctggtcctctagagaaccctgattaatatactaaccaaacatgatccaaccaatcaaccagtaagcgagcaactaaccaatcaacaaacagttgtcggagggttgtgagtgaaggttccacaggttactgagaaactgaccatttcaggatcaaaaagtcagaaagcagcattgcttggaatatattgaatatttatttggaccaagtggtacagctgttttctttttaattattattaaaatatatatgtggaaatgatgtaaatttc

SEQ ID NO: 3795 - DNA, 1400 bp, mus musculus
ttgttttttggtttttggtttttggtgtttcaagacagggtttctctgtgtagccctggctgtccgggaactcactttgtagaccaggctggcctcaaactcagaaatccacttgcctctgcctcccgagtgctgggattaaaggcatgtgccaccacaccaagcttcccatcctttttttttatgcacccaaattatgacctcttctttttaaccacctatcagatcctattgtgctgctcaaacatttttggatgtgtgactttccactggagcacagatgacttattagggagcttataagtgactactcttagaggaaactgactcttccttgcctagacactatcaagtgctaacagcttcttacctggacgtgagacttcatgttcccctctctctgctatgctgggacttttgttggcttggttttgtataggtcttatccatgttgttacaaccactgtgcatagatgtcggagaccatccagtgagaaagtgagcccttcacaatctctctaacaggcctaatggccttgtactaagagctggttatcacccccttcctccctattccgttcctggcacctgaggctgtaaaagctgaattacagtccctcttccctatctcttcctgagttcccatgccatccaaggacatgagttacgcctgagcccagcctgacccccaaggctgtcaaggaggatcgatgttccagagataagatgcagagtgcccgctgcctggcacatgacttcggcccccatgtcagcagatgcccactttttgttctttgtataattctccctcgacccctcccatattccctgtgatgtatgctttaaaaagaaggcacctcagcataatagacgagacctcgataggtacccttcctggtctcctgctcttctttttcttcctcccatctccttccaggtttgcggcccccctcgcacccacgaataactgaatcccgcgggacgggatacataaatatgtccaactgctctgatgtatctataaaacagtttctatgtagatatccagtacctttggatgatagtgacaatttgcattcttgtttcagcattttaggagagcttcaagcattatgtcttgggaagacccacatgtggcattagaggtaaggtttcctgaaatagtggtgatccttcaattagaagaaatatctgccaggtttcaggaagcacagtgaactatgaggcacataagcctggtagaactaatgataactggaagaataatattggatttcatgtcaatgtatttgtccaaaacactaattgatttctgtaagctgaactctaggaatatggggtgagatcaagaccaatgaatcttctttattaaacagaatgaaaacaactactgaacaaga

SEQ ID NO: 3796 - DNA, 1000 bp, mus musculus
gatctaaacaggtttccaagttgttcttttggattttgggggtttgttttgttttgttttgttttgttttttgcttttctagatgcggtatctctgtgtagccctggctgtctggctgtcctggaattcactctgtagaccaggctggccttgaactcagaaatccgcctgtctctgcctcccaagtgatgggattaaaggcatgtgccagcacttgcccagccaaatttttctttcagaagatcacaatccattcctctgctttgtgtcatttgggagtagtcttgagtttccccacattgccaaccttctcctatactctcagcagcccacaagccttcagaaagtcctgcttctcatcagtgtgggactagaagataaagagaagcatcgtcggtggcgcttcaggactacacgctgttggatgctgactttgtcaccttttcaatgctgtaacaaaacagcatggtcaaagcaatttttataaaagaacacgtttaatttgaggctcacgattccatccatagggttagatacagtccgtggctgacatgatgggcagctgggtagcatgtgatcaggcatgcaaagctctggagcagtagctgagagctcatgtctcaatttaaaaacatgaggaagagagagctatctaggaatctaaagggcttttgaaacctcaaagcctacccctaatgatctacctccttcaacaagagccacacctcctaagccctccaaaaataattccaccatctaggaccaagtatcccaatacaagagcatataggggagacggggtcaactatttcactcaaaccaacacgggtatgctgtcagttctttctctgttagcagcaaggtgtgcttgggcattctctcctggtagctcctaaccaggctggtttaggtcattatggatgagaacacttgctctatttcaagctttggtgaatctgttatgcactctcattcttacagagacactgaaacttcatta

SEQ ID NO: 3797 - DNA, 1200 bp, mus musculus
caagggttatatgggaacaaaaatcaaattgacctcaggattttaaaggcaacctgcatcaaatgaaaagttagttatcctaataggaaaatctttgtaaagaaaataaatgtgcccaaccaactggtagaaaaatgttcacaaaataggaacagctgactaggggtatgactcagaataaaataattatccccaaaacttaagacttagagttcaagtctccagcactcagaaaaagctaaacaagcaaaccaacctgctaccaatcccagtgatgggggtggatatacaagggatccctaagataaactgactggtggggctagcagtactggtgcacttgaaagaacctagtggggaaacccccactcaactcctgattaggcgtgcatccaagaatcacgaacaagcagaccgtcttgatgtaaatacacgaggtagtttaatggcagagctccaggtcgaaacgtatctcacgcaggagacagtggattagaccacgagtcttcgaagctaggggtttttatggaaaaggggctggggctgggggaggaattggcatggtttcacatgattggctcatttaaacatcagcagactgtacatgcagataacatttaactaaggtcagaagggcaggagatagggaggcaccgggccagtccggacacatcattctctttatctttatgtctaagcagcctcaggaatgtcttaatgatgggcctgcctgggaatgtcctggcctgttctgctatgttcttagccccaggttttaaagctcacaaacaagtctttgggctatttgacataaattacaagaatcacagctctcaagttttcttttctttcacactctggttcactaagagccccgggttcagtaacagtagatagcaatctcaagtgacaacagtacctcaagctttagcctacacatacatgtgcacatatgtgcacaggaatgtgcacacataaatgtgagcatcatgtacacatgcatctcctacacaaataaatacatatgtaaagaaatagaaaaatccagttcaccttttgaagaaggttttgaagaagaattgtacagaaatgtaagaaataagaaagaagcctcaggagcaataaaagatgacattgaaatgacttctttctgaaccctttcattgttaaaaattcaaggttgtctgcatacccttttgg

SEQ ID NO: 3798 - DNA, 1600 bp, mus musculus
cacattccacagtctccgttccatcacgcacaagccaatttctaacttcttcagtttgataatggaatccagaacggggcagagtggggctgcgtatatacaacaggaaagaacttgtccacagttcagtccagacagcaagaaagcccaccacagcacgcatcaactcccagagctgtgctccacaagtgtcctgctgtccctccaccctcagcccgcccccatgtccccgagttcctccatagccagaaacagaaaggacagaagtggtgatgagaccagcagtggcaccgtgtcctctgtgtccctgtccatacttcctaacagctcactgggccccagggccatctcctccagctctaggcctggcctgaaacagcagttaagtttggaagacacccagcatgtggcccgcgcagtacaccttaaaatagtttaaaatgcccagtttaggattgccgtgtgtccttaggtgactacggtctcgcctggtgcgcctgtgcattcattcttgtcacaggctcactgggaacattccatgaggctgacgggaaagagagacatcagggtgcctcaccctgtgtcacagacagggatgcagagaagagtcctgacagtcaaagaccggagaggcgacctgacaccacccctgcccctaagccctgctctgagccacgctggcctttagacaccactgcagacacagacagaactcttgaccaaaatgacagaagacagtgctgaggctcacacttctgcgtgtgtggcatctatcccaggcctggcacaggagagcacagagcagcaggagaaggacaaagtgccaccatgtgggcaccaggagcaaacccagagggcctcctgccgagagcagcccatccatgcacaacacggtgtacattccagtctttagttctccaccctcttaacccaccccagccccacccctagttagccttctccatggagaataaggaagcagacccttccttgtcaatggaacaagcttctaccaatagagaattctagaaataaattagcttaaggtacagagctgtggcctggatccagagggcatgaaacctaagccggctttgcctgcaactgaacaggcacggggtgcagggccatcagatcaggtagattccatgttcttaacatggccaaccataatgggcttggcctccaaggcacaaaattgatgaagatgtggatggggccctcggtgactctgtccatgggttctagctgctgagtaagaaatgcagtctctggttccctaggaacaggaaggacgcaatggccaggtatcagtgtgtcagtgtgatactatcccatgtcaacctcagtgccagcatcagcatcagcgtggatgaaggacatcgccctcacagtcaaggcaccctcaagtcctacagagactgccctgaagacagaatgccacacgctgactacggcaccgaaagccaaccaggggctgaagagatggctcagtggagtaaagtgcttgccatgccagcgtgagggtctgcgtgggggtcaccagcatccacttaaaacccaggctcagcagctcactataataatacaatcccatggc

SEQ ID NO: 3799 - DNA, 1000 bp, mus musculus
gaggatggcttagaagttaagagcatatattgctgttgtagaggacccaggttcagcttccagcacccatggcacacagctcacaaccacctatatctctagctccaggagatccaacactttcttctggactcagagggtacctgcacatacatatacacacacatacatacacatatgtgtgtgtacagacatatacacacatgtatacacatacacacacaatttaaaaaataagtatttttaaaatggaagaaagttttaaatagatggtctcccaaagagggtatgcaaatgcccaaccaacaagctcaagaaaagataacaacattagcctttagagaattgcaaagccaaaccacagtgagcagccacttcacacccatgaggtctgaggatgacttctgtcaaaacaaaacaacacaggcactggcaacaacgtggaaaaactgggcccttcacacactgctggtgggcatggaccatgattcagtcactgtggagaaatggtttggcaagtcctacaagatataaacatagactcactagctgaccgggcaattccagtcctagaagagatgggagcatctccacatagttttcatatatgtgtgtgtgtgtgtgtgtgtgtgtgtgtgtgtgtgtgtgtgtgtgtgtgtaattggttcacagcagtattactcacaatagcaaaaaacaaaataaaacaaagaccacaaaacgcgcacgtgagtgcacgcacacacacaccaaagccaggagcaatccacatgtccataaactgctgcggggcttaacatcatgaggcttagtcaccgatgggatgtttattagtcataaaaaatggatgaatattaatatatgctacagcctgaatgaacgtcaaaagcattatgctaaaaataaaccaagcacaaaaggtcccatattgtctgtttctatttatatgaaatgtctagactagacgaatccctagactaggtgaagccctaaagacagt

SEQ ID NO: 3800 - DNA, 1000 bp, mus musculus
tatgggattggctcattcaaacattaacagtaagattacatgtcagccaaagggcatcaggaccttgttcctgtgggctgggggcttatctttgttcacatagcaaccagttgatgtatgactttaccccagcgccaaggggcagtagacagaggggaggttctggccagatggtgtcgactcagacaagatagccttgcctgcgtccttgcattctttttcatctttacagaagagtcctgccctggcatctgggctcctagacaactcttttacatgaatcacaagttacaaaatctcattttccttcattcccttcttcttctactaaataattctaatcctagaattttaaaaacctgtgtctccctttctcggtgaattttataattagggggttgcagtatttacctttgcatggtcctggggggctgtttttaagaacatgcctgttctctggatacttagaggggtccctttctccttggtttgacccatcatgatcactaccccgttgtaattgtgattaagtcccaggcagaggaagggttccaacaggcatgtcctgttgtttcacatccccatttaccgccaaaaaaaaaaaaaccaacttggtgtccctccacactcctgtcgaaaacttctgctctgaccctgaccagggcaaacatagaattctgcggctctaagattagctcggtagaactgccccgaacacccatacatgctccctatcccgctcaggacacaccgctcttcagggggtgggtcattaagatctgtatgatcggggaggtccctggtaagagatcctgccactaacttacagatgtcaggtgtgagatcaggccgccaagtccaaggggggtgcactgtggtggtcgcccatacagtgtttccctcttcaccaagcacctcccaagtctgctgaattggagtgtgagggttaaagtctggcagggttgcccctgtgcagcaggcgcagcttaaaaggattagt

SEQ ID NO: 3801 - DNA, 1600 bp, mus musculus
tttttcaattcatgaagatgagcatctcggctggtcttcagtagacactggaatcccgaagacatagaaagccagtgaagaaatgagcttgccagtgagagcaagggtaagcaggcaaagagcaaaagcttcccttttccatgttctttctataggctgccatgggaaggcatagccagattaaaggtggaccttcccacctcaaaggatctagattacaggttggtcttcccacctcagaaaacctggattataagtgggacttcccacttcaaaagaaaaaaagttctcatagatgttcccagcagcttgggttttacttcattccagatgaagtcaagttgacaaccaaaagttgccagtacaggtggctgggacattttacatccccacccacaatttatgagaaattcagtcactgtgaacctttgtcagtgtttggtgtgtcactgtttttattttaaccattttgacagataagtaatgatagttcactatggggtttatttgattaaaaacaaagagaaggggctagagagatggctcagtggttaacagcatttgatgctctttcagaggacaggagttcagttcccaacacccccatcaggcagctcccaaccaagtgtaaggccagctccaggaaaccaatcccctctttaccttccatgggcactgcacttgaaagacccccgaagggagaccctcactcaagcctcgggatatggcgcggacccaaatgtgacatggaaaccgaaatgccgtgcacacaaagctatttaatgaagcaggggggggggaaccagcgcgctggggccgagactcgtacacctctgcatagggtagaggagtctcgaccccgactcaaatttttcacaagcttttaaaggcaaaaaccacaaactgggagggggaatggggagggaataggggaagtttaacaaccacaagtttactcaaccaaagggtcatgccctacgtttggcaatgcacctggcctgttggaacattctgtggttgttccaggaaatgtttttcttaagaacattccgggaactgtttccagatgggaggggttggactctgaggtgaaaagttcatgttctcacaagaggccagtaattttccattttcacactcaattgcgtgcatctacacacacacacacaaatctttacataattaaatatcgaggaaaatttaaatgaaacattcactgatgtaaaatgcccagggaatcagtttttatacattcatgctagaggtgtacagtgcatgtgtgtctgctgcctgtggaggtcagaagagagcataaaccccatccccctcatctggaactggagttgccatggttgtgagcaggtgctgggaatcaaacctgggtcctctgcaagaaaaacaaggactttcattgatccatctctctggtcctggagagcttcttggtttttcttttctttcctcttcttttcttttcttttcttttcttttcttttcttttcttttcttctcttttcttttcttttttgtttgtttgtttgagacaaggtttctttgtgtagccctcacttttctggaactcactttgtagaccaggctg

SEQ ID NO: 3802 - DNA, 1600 bp, mus musculus
tgtttggagtttagctttacttttttcagactgtgattatgccctgggtcataatcacagtaagtaagccagtaagtgtcatttctccatagtctctacttcacttcttcccccaagttccttccttgagtcctctctacctgttcttcaacattaactttcacttcaaaagtacactctcatctgagtcatctgaatgttgtcatcataggagaatcccttgtagggacaaaaaggaagtgttccttgctgtgagcactctggagtgtcaaatgggaaaccagggccatgactgcttgtgggaagaagacagtgcagtagttactttgctattgccatggacatacactgacaagatgagtaattgtacatttacagttaaaataaatgtctaagaacaggcagagatggatgaaaaggtggatggatgacccgtccagcaggtccagttactcaagggtctcgaagggaccttctcctaagaaccaaatggggggagagagagacagacagcaagtgcaaggaacgacacgtaaacagtctgagaagcatcaaggtgtcgctgtattcagaaaggctcaaggcttaaatgcacaagcaaaaggggaagtacttttcagcaggaggggtgaggcagtagaaatgcacaaacaaaaggggaagtacaagtacttctcagcaggaggggtcgggcagtggaaatttttcttttggcagctacacagggaagcaggaacttggtgttattagggtgtggtcaggacttctggcggtgacttagggctggaacattctgtggttgttctcggaaaggtgcgtcggtgacccgcttttgacccccttttattctcggggggggggagcccaattcagagatcaggacaatagcgttgtcttaatagctccctatgtctccctcattctaatatttttataaagacatattgtataataaatttgtaaccacgtttttaacaaccgcctaaacgtctgtttgctcactgggtcattctctaaaaccacgaaggacacaaggacaagttatgaggcttgaattaacggtcccagtctgttgggtataacctgggctagtcaggggatttaggaacaaagcaagtttcgtcggtagaggtagagatctgatccccagtgtgcaaatattaggagccatgtacaggattgactctcaggcccacagattttttacccagagtaaccctgacctgctcccgtgctgtttttcatgggggaaggaccctagggcactcaaccttcatgcaatcagacatgcctctcagagactgtctaacagcttccagactattctctatgcagtgtttagcctacaactctcacgggcgacggcttcaagttccaattttttcaatgtgtctagccttggatgactgtttagtttccaatgtggcgagaatgtatattaccatgttagaagcacagactacagcaatctataaacgattcgtggcatgagactgatggctgaatttagggggaggggaaagatcttacttaagcattttatggaaattgagtctctttccctgagacgagggtgatgaagcagtatccatgtctgact

SEQ ID NO: 3803 - DNA, 1000 bp, mus musculus
aggagccctcctttcttccatgccccagctgtatcctgtgttcttgaatgtcacttaaactttcctggctccctttgcccagcaccttgtctgtgagacttgttctgatgagagaagggtcctgactttgccctgtccatgcttcttggttagctgagcaaggaccataacccaccctctgtcctccagagcacactcacagatgcccctttgcaggccatctacaagatgaagatgcctgaggacgagtccatgccctagaagtgaacagatgagatcttcaggaagatggacacaaacaatgaaggtaggaaacatggcaggagtgagcaggtggggttagaggagagaattgggagagggagtaggggtggggagagggaagtaaatgagcctatgaaactgttgattgcacagaggtgtttgggatacactctcttccctacgcatgcctgcactttccaagcccacttgattctgctctgattgagggacaagaattcagtgtctagtacacctagcctgcatcctgcacccttcctagggctctatgaccatgggcatgccagtagaccctctgacctgcaggcttcatccgcgttgtctgagttagggtttccattgccttgatgaatcaccgtggccacaagcaacttggggaggaaagggtttattcactcacagtttccatataacagttcatcatcaaaaggagtgagggcaggactcaaacaggacaggaacctgaaggcaggagctgatacagagaccatgaaagggttgctacttcctggcttgctccccatggcttgctcagcctgcttccttatagaattcaggatcactagcccagggttgtaccacctacactgggctgggctctgctccatcaatcactagttaagaaaataccctctggtcaggcatggtggcacatgtctttaatcggagctcataggagacaggaggctctctgtgagttcaaggctaacctggttaa

SEQ ID NO: 3804 - DNA, 1000 bp, mus musculus
agaagctatgaggagacagagaaactgaaccaccaggcaaatgctcggtggggacattggaggacttttactgtgaaagaccacaggcttcctcaatgagctccatctgagtacagcaccctgtgaggagggaagccaccgacctgaaaagcttctcttgcaggtcacacctagtgcagtggcattaaaaaccgtgttctgtgctggcagagagcctggggtcactgtgatctggaagcatccctgggtaggtccagtgatgtctttactccagtacttcaaagaggaaatgaggggagggaaggaaggatgtagccaggcagacatcaggacagggaccgcagaggctcctgttgctgaggggcaggtctagtacaggggcccaagcaccaagggcttgccagaaacaggggtggggtttcaggaggaaggccccttctctcatggcagcaggtaacctgggaagtccatgcctactgcttgggaataggagtgtgagggttagggaccctcaggcagtggctcacacttcataccatgcacgttgcaaagtttacagacacacatacaccccaacaccccttcaccaacacagagatgtgttacctcactgactactcagaggctcccatccctcctggctccagtgatagcccaggaggaaaagctgttaaagcaggaatcctcagagcaccacacaggactccggaagatatcccccctgggagctcgctattcttacacacaggaatacgagtgctttgctcattcattcatccagccacctttaccaagtatgcatggacttggcctgaagatatgctgagcgaatgaccctaatcttgggcagatggagaagatgctgactggtggacgggaaagatggatgctcagaggaagcctcactgtgctcagaggtgagtcactatgacacagagagagcaggaacatgtggggaaattaggtagggtgggagcaggtcattatctactaccgcaga

SEQ ID NO: 3805 - DNA, 1400 bp, mus musculus
tttattggcccaattttgtctgtgatcagtcagctgtgggttggagtagtctctgagaaccatctctacctctggttctcttgggtatcccccacttcccacagcacatcagtgcattctatgatttttctcagggtgaagcctggcctagcaccctaaaactgtcttcaggtaactgggagtgtccctaattgtacaagcttaggggacaggatgcttaataggggttggagtattcttccaattcgaaggtcatgggtttgaatttccattcggcttgtaccatggtcaactccctatgcaaaacacgtgcctttaccccttatccctggcttcttaaggctgtgagaaggagcacagacagaacatggtccctatcattgcatccccaactaactgtccctacatcttgtccctctaaagtgccctggaggatttcactgtcttgtagggggcaagctaccaacactgtctcactggcactttcctgaggttctggtgggggattcagggggttctgaggctaacgttgggattggggagcaaaagggtgggctcccttccagccgggaagctagtatccactccacgccctttgggcaatgttgctagaggtcatggcgggtgcggggtgggagccgggcatcgcagcttaggagagggcgcgccctcgaacccaagcaggtcaggaaggcagaggtaatgcagcagcccacagccactgacaggccctgagcgccgtagccctccttgctgaggcctccgcttcctggtggcgcggtagcggcgggcgacctgattggcggccaggcctgcgccccggcccgccccgccgggcgggcctccgcgccctctccagccgggccctcccctttccgcgggaggcgtccgggacagtggcttggtggcgcgcagttccccctgactgtgcgcccccgcgtctgggctcctttgcagaggactcggtagctgcagctcccggagcacagcgggcagagctgcgggctgcgcgcgcccctgctgccaccgggcgtcccgcggtggctcccgcgccccgcggcgacttccgcgcccgcgctcccctttgttcaagtccccgagcggcggcggggtcggagcccgcgccctgggcgactgaggcggccgcagtccgcgccccggcgccctggcgatgccggaccagatctccgtgtcggaattcgtggccgagacccttgaggattataaggcgcccacggcctcttgcttcaccacgggcacggcccagtgccggaacaccgcggcggccatcgaggaggtgagcggtagcatagcccgcgccctgcgggaggctagggtcgcggggatcgcgctgcgccctggccacccgctaggcttccgcgcctggtgcccgataccca

SEQ ID NO: 3806 - DNA, 1000 bp, mus musculus
tgtgaggaagtgcaaggtggtccaatcaccaccctcccaaccagcatgttcattcctctataaataagtttccaagactacttgagcagcttgcctaaccctatcatgggtgaagaccccattctgtcttggcagatggcagaccaatggctttctcagtaaggatttcatgtcacctctcattctgccttccaaaagctaagtggtgccatgcaattagttttctagtaatggttatggagtccatagaaagacccagtctaaaaaagacaattgaaatttatggaggtcctactctgttctgccccaatttagagcttcccagaagctgagtgcaagaggtgagcatcaagcagcagattctggagctggtgagctggctcagtggttaagagtgccgacagttcttccaaagttcctgagttcaaatcccagcaaccacattgtggctcacaaccatcggtaacaaaatctgatgctctcttctggagtgtctgaagacaactacagtgtacttacatataataaataaataaataaataaataaataaataaataaataaataaataaataaatattaagaagcagatgctttagcgataagtgcaaatcgttctataatggaagcttctagaacagattgagattgagatgcattgtaagttcagtgaaatgagtgctctcaccttgtctgactcagtatttgtccaaaaaccaatcacttcacatttcagtgaggatggagacaggcagagaaatgggtggtaggcgtctcactgtgcaccaagatctattagtattattcttattaataatagttcttttttctacagtccagtctatatccccctcctggtgagcacagagttactgcccacagagggtagggacagggtgctgagcagtggaagctggggtggtgagtcctctctggggctggatgggaagtataagccatatgtgagcacctgtgaggtctctcgtttgctcctcacttg

SEQ ID NO: 3807 - DNA, 1200 bp, mus musculus
atcttcacagtagagctggtctctaccactaaagcatgctggacagtgccacttttaacttggagatgataggagatcaatgcttcaagtatcagggaatgacacccagttcaaatgacatttctgcactgccaccactgcagacacaaatgaacccctactcctttgctggtctccccacttttctcctaggcctaggaacaagcaccgaaatgtctttaaactgtgaagcagtgactggagaaaaggtttattgtaagagaacttgctgctcttctggaggttccaagtttcattcccagcacccacaaccaagcaattcacagctgcctacaattctggctgcataagctctgagggcatctgcactccaagggtcacacacagatacaaaccaataaaaagtaaatcctaaagaggaaatcagaccatgggagtctgagccccaaaccctctaacagctttgcaccactccacagccaacatgcaaattctctccccaaggtaaagcccagtgctatctggacctaagccagtcctccacacaggcccctctgctctccctcacctctgaccacaggctttctgtctgccctgatactcacatctctgtccttttccaggactcctctatgcctaggtttttgcaagcaggcagcctctacattccagactgctcaaaggtcacctctgcagagatgcctgtcttgacttcagtttcctcccctccaaaaccacatccaatccccaagttatgcaaatccttgattcatcactacctggcacataacatgacataatcacctgtctatcagtgattatcaactagggaggagccttttacaaatataaaagctccaggcctcacccaaatcttgtgaaatcagaattcaggagagcagaaccaggttcttccagtccacagacaccccctcccccaccaggcaactctgaacatagccaggactcagggcagcctacaacagtactttcaaaccctggtgcaaacactgctcctgaaagtgctgttaaaatgcacactctatttccacagatctgccatggaacctgaggctctgcatgttccacaccacactgactggtgctttcaggtgaagcattttgcagttgcaagggcctatgcttatcaacaggacttcctgcaagtatgtaaaacaaagtcctgaatcacacaacaga

SEQ ID NO: 3808 - DNA, 1000 bp, mus musculus
tgggtatcgggcaccaggcgcggaagcctagcgggtggccagggcgcagcgcgatccccaggacctagcctcctgcccggcgcgggctacgctaccgctcacctcctcgatggccgccatggtgttccggcactgggccgtgcccgtggtgaagctagaggccgtgggcgccttgtagtcctcaagggtctcggccacgaattccgacacggagatctggtccggcatctccagggcgccgggacgcggactgccgccgcctcagtcgcccacggcgtgggctcctaccccgccgccgccgcttggggactcggacaaaggggagcgcgggggcggaagtcgccgcagggcgcgggagcctctgcgggacgcccggtggctgcaggggcgcgtgcagcccacagctctgcccgctgttctccgcgagctgcggctgccgcgtcctctacgatcgagccctgatgctagcgggaacagccagctgaaactgggcgccaacaggccgcttgccccggcgccttctgcggagaggggcgggacgcgctggggagggggcggtggccggccaggaggggcggggcaaaggcctggccgccaatcgggacgctcgccgcgacccagcagcccggaagcggagcccgcaggacagagggcgatgtgtgttctaggcatgttcgtgcctgtgggccgccgcattgtgtttcccttctctacgtgctgtggttcgagggcgcgccctctcctgggctgcagtgccggactcccacctcgcacccgccatgacctctagcgatattacccatgttctgtgtgtgcaccttctcacagccttaagaagccaggggtaaaggcaggtattttgcatagggagttgaccagggtacaagccgaatgggaattcaaacccatgaccttcgacttggaagaatactccaacccctagtaagcatcgtgttccctaagcttgtacaattagggacactcccagttacctgaagac

SEQ ID NO: 3809 - DNA, 1000 bp, mus musculus
gacattgtctttgctcccaactcacttaaaagagaaaagtgctgttggccagaaggtgttttagatattggacagaaatagtccctcagggccaaacatggcatgtgccttggctaatgtcacccagcaatcttgcaagccgtccagcggctcacatggacggggtacacctgagaggcaggccggcacttaaagaaagggaaactaggcgaacgagagggaaatggagccaagaccatgttctgatcaaggctcaactatttaatggcaaaggcacttataaggggggggggagaggcccattcccgctgattcatctttggagcctggaaccagctgcaggtgatgacgtgcaggatagggcatagtctccagaatagctctggggcctctcagcaggtagcagtatcttgaagagaaacagagacagtggctgaacaattgagtgatctagggaggaaggctctaccctaggtaatctccttagtggcagcaaggtcaaggtctggttcagccagcttcaggctgagggaaggttacaacttcctccctgttattaatattaaaaaaactggactgaggcataaaatttatttatgctccatagtcctgcctgggaatgatggtgactgtaagccgcacctgttttaggaaatcgtagatcttcccaaaccatccaattccgtcttgaaggctacgtgcagctagtttgtgttatatttcacacaaacatggctgtgtggtgtgttatcaacagccaaggccttttggcatgtacccctgtcttagattgggatggttctgagatctgggtgcccgtcattgagtgtccagccctcatttgcacaccttattcccaattcagaccaaagccacaatatgtacttagaatgcttcttgatgaagattaataactgccacctgcactgttggaggcgaggctgtacacctgctgcagtcacaatgacctgcttgagaaacaagggtgggacattgaaaa

SEQ ID NO: 3810 - DNA, 1000 bp, mus musculus
tcctgcttgtttgaatgtacaccatgggtgtgcagtgttgtgggccagcagagggcattggatctcctggaattgaagttgcaggtgattgtggacctcccagtgtgggtgctgggactctagctcagatctagaggcagaagggcaagagctcttcacactcagtcatctcttcagcccctcattactcaccctttatttcccccccctacagccacctttctcctcctcctcctcctcctcctcctcctcctcttcttcttcttcttctttttttcaagacagggtttctctgtgtagctctggctgtcctggaactcactttgtagaccaggctggccttgaactcagaaatctgcctgcctctgcctcccaagtgctgggattaaaggcatgcgacaccaccacctggcttctcttctttcttttcttctcttctcttctcttctcttctcttctcttctcttctcttctcttctcttctcttctcttctcttctcttctcttctcttttcttttcttttcttttcttttttttttgacagagtttctctgtgtcaccttggctgccctggaattcactttgtaggccaggctggcctcaaactcatagagatccacctgcctctgcctccttaaggctggaaacaaaggcatgttccaacatgcgcagcttcccctaataaatcctctctctttttgtaaagctaactttaaaaaaaattcttctctcatatattgcatcccaatctcagtttctctgagtttttgatcttagccattctgactgggtgggctggaatcaagagcctgctgacaggcgcctgatatagctgtctcctgtgaggctctgccagtgcctggcaaatacagaagtggatgctcacagtcatgtattggatggagcacaaggtccccaatgaaggagtcagagaaataccgagggagctgaaggggactgaagccccatagaaggaacatcaatatgaactaagcagta

SEQ ID NO: 3811 - DNA, 1000 bp, mus musculus
gagatggaagttgttgggtagaaatttagaagtcctcatttgcaatagtagtttctgccttctcaccatccctcagcagcccaagaaagtacttcaggctccagcttagcaaggcttaagcaactgctactaatatgaagaggtttatttttaaagcaaaatctcccttgtagctattaaaatcaatcatatttgagctggcatgtagcaaagttggtcaagggcttgcctaactttcatgacactctgggtagggtactcagtgctactatgtaactaggcatggttgcacacatctatagtcccagaactcagaggtggaggcaggaggatcataaatttaaggtcatcgtcatcctctgaacagcaagcatgaagtttgggtccactttgggctatatacacccaatcctggaaacaaacaaacaaacaaacaaacaaataacacttgtaaaaattcaaataagccaggcagtagtggtgcacaccttgaatcccagaacttgggaggcagaggcaggtggatttctgagttggaggccagcctggtcttcagagtgagttccaggatagccagagctatacagagaaactctgtctcaacccccgactccaaaaaatttctccagatggttccaaccccctcagcagcctcccattgctttttaataatcatatacctctctctctctctctctctctctctctctctctctctctctctctctctctctctctctctttctctctctcttcctgtcttcctttttgggatatttttttcactccatagaattccctagggactctttatggctaatctgcattccacagcaccagtgcatggcagctgaattaccaagtcactattgaaggatatctggacagcacttatggccattacacacaatcattgtgaacacttacaaaaaggtgtatctgtgaacacgagtttccagtctctgggataactgcctgggagcacgatggttggacctca

SEQ ID NO: 3812 - DNA, 1000 bp, mus musculus
ttgttctgctaatttgaatccctcctaccttatgtgtgcttggatggcatagggccccttcttagcctcttaaattttacatcactggagcagaggctatgacatttcaaaggttagtgccaggggcggaggcttgcatatctcagtccttccacccttctgttttcaacacctcctgatgtttgcatccttccaggatgatagagcttgagaaccagagctgcatgcaatcacttgctctgtgatctcatcctcttctctgcatctccaaattctgtcagtgccaagaagctgcctcacatgttgccagtctggaaggttcttcctggagccagggagatgactcaatgatcaatgagagatgactcagcgattaagatctactgccccttcaaaaatttgggttcagttcccagcattcccaactggggatcgcaaccaggggatcacactctggcttctggcttctatgggaaagtgcactcatgaatgtacctgcgggtgagcacacacacacacacacacacacacacacacacgcatgcacacacataatcaaaaattaaataaaaaatcaaagtgcatagtggcataaaatttaattccagcactttgggaggcagaagtaggcagagttgtacctatggcaacacaggagtggagatgcctaggctggacatgagaaaagacacaacattctgaacaggtggagaggggaagttttgctggactattctgtgtgttggagtttatagcccatccttggataatacttctgaaataacgtggggctgcttttgatggaatgaatcctgaagtgaccacccacatggcagttcacaactgtctgtaactctagctaaaggagatcagacattctaacacagacattcatgcatgtgaaataccagtgcactacaatgaaaatgaatattttgtttaaaaaaaaaagaaagaaaaatatagtggaaaaatgaagaaaaaatatagacgagctctc

SEQ ID NO: 3813 - DNA, 1400 bp, mus musculus
agttgttatagttgtctctgtttagagattgttcctctggtgattttgttacgctatatcagcagaccagggagactagctctcttccctgagtttcagtggtcagagcagtctctgcaggcaagctctcctctttcagggaggtgcacagttatctggtgtttggacctcctcctagccgaagatgaaggcccaaaacaggatctttcccagaagctgtgttgctttggcctgcagactgcccactgcggagtcccagaatcaaggtggcccccgtggaacgtgaggcagaagcctcacaggctgtgaggacacctgtgctctgaccaggatggtggcaagttgtctggagccgaaaatggcgccgcctcagaggctctgtggctctcgcccagtccagaagctgctggcctctgtgttccacactctcacccacagaccgcccgctgcggagtcccggaaccaaggtggcccccacggaacgtgaggctgaagcctctcgggccaggtggacccctgtgctctcaccaggaaggtggccggttgtctggagccggaaatggcaccacctcagaggctctgtggctctcgcccggtccagaagctgctggcctctgtgttccacactctcacccgcagactgtccaccgcggagtcccggaaccaaggtggcccccgcggaacgtgaggcagaagcctctcgggccgggtggacccctgtgctctcaccaggaaggtggccggttgtctggagctggaaatggcgctgcctccagtacaatgcaaacttatctcacatggtagctagttcatgtcctaagggcattagcaaaaagtctctttccactaactccaggcattgcttcaagccattatttttaaaagcttcattaagcaattcataagcttgctgtatactttcttcttcaggtccacaaattacaatatcgtccatatagtgacaaatttttaaggaggggaaaccatccctaaccggttgcaaagcttttcctatatataactgacatatgctatttgccattccttggggtaatacctgccattggtaccttttatcaggctccatatgattaatagaaggcaaggtaaatgcaaatctaggtttatctttcttatttaatgaaatagaaaagaaacaatccttaatatctactactataattctccaatccttaggtagagctgagagtaggaggagtcctttttgtacaggacccataacttgcatttgtgcattaatggctcttaggtcatgtaacaatctccaattacgtgacttcttctttacaacaaaaatagagggtattccagggtgattgtgtgggtcccacatgtcccaggtctaattgttcttgtactaattctttagctgcttttaa

SEQ ID NO: 3814 - DNA, 1200 bp, mus musculus
tagctctcctggaggcactgagacagcagcaaagatatgtgacgggctcagtggtacacaccccgttacccctctgtcattcattaagcaaccgagccagccttagtgatgtctgggggaaaaaacctgaccaaaaaaagcaatgcttatacagttacagaaaagtcactgtgtgctcccctgaagaaatacatacctagccctggccatgaaactaacccaggcttcattgatcagacagccctactttcatctttttagggggtggggaatgagggtccctggatcacacagccacctcccacttgtttaaagcacttcacattctagcagggattagatctgacagacaacagccttggagatcaggacatgtgatttcacagtaatgggaattgggggagggagctaacagctccagggtctgttatgctcttattgtccttagcacactgaattgtaaattaaggaaagagcaaacaagtagctgggaagctctgtggaaatatttaaccagagcttggtactgcgagtaaaaagctttgctaacagcacagttgtgccgtcactgggaaaggcccttgggagctccaatgtcccattaaccacagctcagtgctgtctaggaacatgcatggtacagttcagcccaccacgcagcaatatcgtcagtcagactgccaaacctcaaggactgctagacatcgaccctggagggaaggtggtgggagaggtgggtacctaatccctaggaagtcctggactcaggagagactgggtgcatcctctgtgaagttgaacttcaacagaccatctgcacttggatggtggagagcctgttccatgccaggtggaacagaaggtggcagggggaaatcagcttcaactatactcttccttacggtgaccagcagaatattgttcctcgtcctcatcctcatcctcgtcttccttgtccttgttctcgtcttcgtcctctccctcatcctcctccatccgctgtaggtgaaactcaaacagccttagcctccacttgagtgcagccctctgcagaatggccatcagctgcaggagatgcacctggagccacacaagctgcactgagtctgcacggacactagagggcgcaggctggcagattccctagccctcagcacacacccctttcaatttctaaactaggcaagaaagcatagtagg

SEQ ID NO: 3815 - DNA, 1400 bp, mus musculus
gttgtaaagaagaagtcacgtaattggagattgttacatgacctaagagccattaatgcacaaatgcaagttatgggtcctgtacaaagaggactcctcctactctcagctctacctaaggattggagaattatagtagtagatattaaggattgtttcttttctatttcattaaataagaaagataaacctagatttgcatttaccttgccttctattaatcatatggagcctgataaaaggtaccaatggcaggtattaccccaaggaatggcaaatagcatatgtcagttatatgtaggaaaagctttgcaaccggttagggatggtttcccctccttaaaaatttgtcactatatggacgatattgtaatttgtggacctgaagaagaaagtatacagcaagcttatgaattgcttaatgaagcttttaaaaataatggcttgaagcaatgcctggagtcagtggaaagagactttttgctaatgcccttaggacatgaactagctaccatgtgagataagtttgcattgtactggaggcagcgccatttccggctccagacaaccggccaccttcctggtgagagcacaggggtccacccggcccgagaggcttctgcctcacgttccgcgggggccaccttggttccaggactccgcggtggacagtctgcgggtgagagtgtggaacacagaggccagcagcttctggaccgggcgagagccacagagcttctgaggtggcgccatttccagctccagacaaccggccaccttcctggtgagagcacaggggtccacccggcccgagaggcttcagcctcacgttccgtgggggccaccttggttccgggactccgcggtgggcggtctgtgggtgagagtgtgggacacagaggccagcagcttctggactgggcgagagccacagagcctctgaggcggcgccattttcggctccagacaacctgccaccatcctggtcagagcacaggtgtccgcacagcctgtgaggcttctgcctcacgttccacgggggccaccttgattctgggactccgcagtgggcagtctgcaggccaaagcaacacagcttctgggaaagatcctgttttgggccttcatcttcggccaggaggaggtccaaacaccagataactgtgcacctccctgaaagaggagagcttgcctgcagagactgctctgaccactgaaactcagtgaagagagctagtctccctggtctgctgatatagcgtaacaaaatcaccagaggaacaatctctaaacagagacaactataacaactaactccagagatcaccagatggcgaaaggtaaacgtaagaatcttactaacagaaaccaggactactcaccatcatcagaacccagca

SEQ ID NO: 3816 - DNA, 1200 bp, mus musculus
taagaatttcatgaattcattgtttttaattgctgagtagtacttcattgtgtagatacattgtgtagatacattttctgtatccattcctctgttaagggacatctgggttctttccagcttctggctattataaataaggctactatgaacatagtggaggatgtgtccttattacaagttggaacatcttctgagtgtatatccaggagaggaattgctagaccttctggtagtaccatgtccaattttctgaggaaccaccaaactgatttcgagagtggcttactgtgaggagccgccctcacagtcactgttacaagatggcgctgacatccgttgctcatagtataatgtgcgcaggtgtcagggtatcgttccattacctgagccctgcctttctcgtgacattaactgactgatagtgggcagccaatcccagtggtgcacgtctccaaccattttttcgcagcctataaaagggaagggttttctgctctccgggtctcctctcctgaagctgatcatctatctctcgagatgtattaaagctgtactgcagaaggatccgagtggcctgcgtgtgttttgctggcgagacggtagcgtgggtcatctggttgccggaatcccgggaaattaacatcgccggtgttggggagaacccccagagacggggcagattcagaactgaagggaaaaggtgagttcggagagatgtatctgatcatgaacctcttatcccttttgatttcggtcttcaccctaagaaggggccatagaagctctagtcttggttgctgtccatcgaggccggtgctgaaatttgctatccattgatgctggtgctgaaatttgctatccatcgaggctggtgctgaaattttctgtccatcttattttgtccatcgaggctggtgttgaaatttgaggtgtggtcagtccgacatagataagcggcagcaccgaggtatctagtaagcctcccgtagataagggagcggagcaccgtgtttactttcggctttgcttaaggagtaccataagtcgggcatagatcagccgcaggtactcattctatcatgggctcttcacagtcagtgatcaccgcattacaggcagtgctaaagcaactcgatctgcaggtcacttcccgtacgctgcagaattttgttaaggaggtggatcgcgttgctccct

SEQ ID NO: 3817 - DNA, 1000 bp, mus musculus
agctgggttgtttgaatgctatacaatgtcccttgctaggtttattaaagttcataaagatacatcatgtaagtgtatgcaaatgtcaaagaataaataaaaatgttagctaaaaacaaacaaaaaaaaaccaaaaaacaaaacacttacagatgcccattgtcacatgctggcttccttaatttagagatagcccagtgcagaccctaaccacatgtctaagaaagaagcagtactttgtatagaaaatgagtggcccaatcaactctttcatgatgagggtgagcaaggcaggaaggatgctgtgtgctcctgcatggtcttcactttctcctgggtaggtgtgaaaatacttgaagaatgtcagacatctggaataccccttcgaggtactctgccttgagggtgcaggagttctattgtgtgtttagagcagatcggagattgctgccaaacttcccgctaccatactcctcttcctaagtccatctcccacatcattcatacctggacactaatgtgaccccactggactccatgctctgcatgcacgtttcctgcccttcctggtcctggactgtggtgggctgcatgcactggcatcatgcctgcctcgaggcatcctgagcattgctgctgaagaccaaaattagctgggatgggtccatttgacagtcaccagggccaaactggcacctgcaagctgagtcactgacttttaactgtttattaagtggtgacagtgacagctaaatagtgtagaggaaggaccccttctctgcgtgttccggaacgtaaggctttagagaaaaggcagaggcattaccagaacgggaggctgtgtgggggaggggcacagggcaaacacagaccaaattgctcttgtatcccttccatctgtgcagatggttccttgggagtatatccagtgaggagcatccctctacagctctggctttacgctgtcccatcactaaaagttctgagcagcactcacagt

SEQ ID NO: 3818 - DNA, 1000 bp, mus musculus
tgaagaggtgttagtgagtctgccctcagtactgtcagcccttgccttataatgctgccgcctttctgacactctctaatgtctttggtggccctaggatatgacgttctgagttacagagtctctgtccccctctcaaacctcacagtgaggtacagaactctccatgtttatcttcataacaggtctgtcttctaaagcggagacctgggactactctgtccctttaaccagagtgttattaatgtaaaccctgttagtaagcttaaaggatcaatataagagtttcatattaatgaagccagtgctgaagccaatgctgagaaatccgaaaagcactggtattcacatggtggccattgttcctcctacagaagtgaagccagttagttctagaccagcttgtggttcgaatcatggtaatggtgccatggggaaacggttctaccgacacctggtgctcagccttcaccaggctaaatagctcagttaattaccagatcaaaatgggctagattttctttgtaaagcagctcagcagtttaactgggttgtgggaaaggactctctatgacattaaatgactttcctaaaagccaatttctccaccaactgctcgtattagaatcaatttcaggactcgttcacaatgagcggtttattagcttcccaaatgcgtttactacatgccagatgtccactcgtgcacaccagtctgctgttgtctctcactgacccgtttctggatgctacggccctggatctatcaccgaggaaacacgtcacagaacagactgtagttgacatgctggatcccgaggagagaggagtcacctaccaggtgtgggcaaaagcatggggctcaagggcaaggtcatcgtgaggacagatataaatcattctgagatggattcagaagtgtattgtttatccttagactgctcggtgctgctcaagcctttaaacttttgatttgatgagaaatgattagcaatggata

SEQ ID NO: 3819 - DNA, 1200 bp, mus musculus
aagctttagccatcttctgtctgtcagaatgcacaacttggtcttctccgatatcagccacacccctggctggtcttggctttgacagtcacctctgtacttttccttgcttgctttttagtgttgacagtatcctctcctctttttgcagctttggatgggaaagagacttcaatatcaacatagccttgaccagtgggattattagtcaagcactcctagtcttggatgtagatgatgagatggcacaggacaggaatggcagaggtagggccggtctgaggggaagaggtcacacagaaatcaacaagctgtcagtgaaggtaaattttattccactgagttaaggcttgctcaggactgtgcaaacattacttcttttccagaaagataagagaagaagacccaccttccttggaggatacagactctttcaatttgttgaaggctggaagagaacaatggcacagccaatgatctttcccaagttgagactgaactctaatcttttctgacctcctcctcccagtttccaggttttgagacttaactggggttcccagtttcccaggcctcagacttagacaggaaatgaacctctagcttccctgggtgtagggtataggtgatctgttgcaggacctccaagcctccgaagtcatggaagccttgccttagaatgcatcacactccgtttgtgtatgttcccctttgtttcccgccctgcatatctctctccatcctgcaggattatgtggaaagcccagggctgctcatgaggtttctagccttttgcatcttaggcggtactgcacacagccccagctcgttcctctctccaggctcgaatgcacttttctatttagtctgttgcagttctgagacttttaggtcattgtgtcagcatggatttgcttcattagaaatgcccccaaatagtctctaaatttgctgtaccaattcgtgttcctagtagtgacatcagagagcggccatgactgtagctcacagtttctttgatttgtgtttgttctgtgcttctggagcagactctcactgttgtgcttcacatttttagggcatgagaaattgtgaactgagactctggctgcatcttgctgatatttgagtttccctgtctgtttatgctttctagttctggtgtttatcttgctggttgtggcacttcctcgaggttcc

SEQ ID NO: 3820 - DNA, 1000 bp, mus musculus
cacgcatatgcacacacacatgtacacatacatgcacacacacgtatgtgtgacagtcacatgctcacctctgttcccacaccaggtcatgtcacctaggatctctcctatgcttcaaactcaatcagaacagatgttttcctttcccaaaatggtctcattgttcatgctttgaaggtgagtgttttgtctagtggaaaccactgctttctttcaaggtaaccccgggcacattgccgttgtctgcagttttatttatttgctttggttttcattagctgctgctgtttaagatattcttgacatctgatttgtactatttcagcagatcttagctagccaaaagaaaaataattcatgtatagagtagtccaaagaaaatgtgcagagctccagctctgggcacttggaccaggataacaggggaagagctgtttagtctgtgctggggtttgggtctaacaggtacgtaatgatgctgagaagggaggcaggcactggtgatagggaagggctagcagtggggattcaaaacgaaatgatgtagttgcttttacaggaagccagccaatgtgtatgggacagaccacacaggaaaagcaaacagtgggtgatggtcatccgaagaggcaggcgttagaaatgcccatgcagggctgtgctggtgctcaaggatgaggccctagcatgcagctcagccttctcctctactccttgctagaaccctgaagagcttctgcctggatggaagattgtaaaactttgtgcttcagagtctcccgtggcaattagaaaccccataggaccctgagaaggtatgggggaagaaaggacattctgacaaactctcttggcaaggccctgttggcattcaccactgagcacactgcttttccttctcatcaatatttatgcatcgctttcggtgttgtctacaatgacatcaatagcatgttgatgtatgacctacactaatgctatacactaatatagtttaggt

SEQ ID NO: 3821 - DNA, 1400 bp, mus musculus
ccatcaaggctagtctaattacaatttcaatctcatattcaattcaaagggtttttctttcctcatgttgtcttgtgccctgtgtcctgccagcatctgggtactttcattttgagcctcctctcacttcactctggataaggaaggaccagccaaagcactcaggtggcttttgcttactggcctggtatctgtgatgcttttggtcagtcgacgatggtggtccatcacggagtattgagcaggcactgtgtgtacaacctctgagatctcctccactcctttgactttctatctgttcttagtttgctctggttgggatgagggctgagctgcttctactcctttagtaattttgtaactcaaggccagcacatttccttctgaaatctggtgaaaggaagacaattatgttgagtgaagtctgactttgttgagagtgtgtggtatgggcatctgtggtgacagaaacagtcttaagaagaccctggggtctcagaaaagagcagtgtcacatttggtggcctgtgatgagaggagcagggaggaagcctaggtgcttctgagaacttttggtccttggccacaagacatttgatcacttcacctgttccaagttcatgtgatgttcatgtaggttctcaggtagacagagcacatggtgcaactttgccatttttaaagtcaacatggaggaagtagtagctatagttaaagacttgcatgaatagttatacaaagaatagatgcaggattcaggacaaacactgcaagacaagcacccacttctgacttatttatgctggagttgtcaattcttattttcttccattacctcagatccatgcctagctgctgtctgttggcttcataggctgtcttctcacaggagaaagctgagcatgtatccctgggcctgtctgtctcaccagaggatacttccaattcccagcttctctgctggtaaaattttttctaagatgggacgctttccactaaggttgggggaacataaggattacccaacacagtcctgaaagctctagacagctcaagtgcttgacaaatacagcagtggattctcacagccattcattggactgagcacagggtccccaatggagaaaggacccaaggagctgaaggggtttgcagcctcagaggaggaacaacagtatgaaccaatcagacccccagagctcccagggactaaaccaccaaccaaagagtaaacatggagggacccatggctccagctgcatatatagcagaggatggccttgtgggacattaatgggaggagaggcccttcatcctgtgtaggctcaatgctccagtgtaagggaattccaggacaaggaagcaggagtgggtaggttagtgagcagggggaggggatg

SEQ ID NO: 3822 - DNA, 1000 bp, mus musculus
tgggattccatcatatactgagaaccagctgagatatccagtctcatggattgaataactattagattcttggacttgtccttagtagacagccattgttggacttgctgaaccacaacctgtaggctactatagtaaatcccatatatatatatatatatacgtgtacgtgtgcgtgtgcgtgtgcgtgtgtgtatgtgtttcattctatcagtctggtcttctagagaaccctgcttaatacacactctaactatgtgtatgttgaatggccctgtcagttaatactcagtggagagtcaaggagagcttgaggtctgtagcctgcaatccactttacctccaaggagaaggaaagtgtctagagtcaagctttgcatctgggcctcctacctgccaatggacattgctgctattggcagttaagagcatagccttgaggatgagctagtctggatttgaaacctggattctgacctggggaggtgtagtcatcatgctaagactccttggatgcaagagtggatgggagtgaagggcacaggattgtggaactcactggcctgctgcatgtggcgctccatgctgaatacatggtggttttcagtctgacatcactacgtatgctgtccatgcagcagttctttcatggctgggaaacgccttgagaaaagatggctggagtcaacgtgagcatgaatggattccccagtggcagcaaatgcaggctactcagagctggagagtggagtggatggtaggaaactcctggacagatggcttccaagctcttctgtttccctctcatcctgattggagtctgcttggttgcctttctctgcagggctctatgttgctgtgtgtatagataaagaaagatgatccctggtcccagatttttacaccctttggacttccatactggtcagagaatctaaggtatccctgaaagtctatggccctcctgggttcaggcatcaaagcagtagactttaagttc

SEQ ID NO: 3823 - DNA, 1000 bp, mus musculus
cttctgcctacctcttgccccataacagggaactgtgctcagtgacttaatctgcgtcctggaaattggagggataggtcagaaaggtgcagaagggcagagcagagtttcggagttaaaggtgggtgggtgactactgttcacggcctgagaggtcacaaagagaggaatttgacatagaaacgcctgagattttgacttttaaaactgtaaccttcattccttccagggaagccagtaggctgaccccagagcctcacctctccttttgctcccccagactcaatgccccaatctgactcccagctctgtaactgaatctaaggcctgctgcagtctccctttcctctctgatcccatccccaacagatccggactatctttttctccaacttctctgtccccaactcatcctagcaaccaggcctctaagccagcaggtactccctggaaacacagcagctgagcagtacagggaaacaagtaacacaaatgcggacctaatccacctgtctttcccttgaaactcaatccccaactctctctcagaactctgagacagagcacctgacgcagccttccctgcccctgctcacatcccctgtggaccccacagaactttccctcctaatctccctctggccatcctttgttttatctcaatccctaactccagcaggctctccctgcaaacccacagaccactcctgccaggaaaacaggtaggctgactgccgatccgttctatcttctcccagtcctgccgatccaatcctccagcttcacccccagctcgattctatcgattcttagagcaaacctgaagtgaactctcgtcactctctacctctatcccaagataagtagctcatggcggaacactttgctctcctcaccactgtgaaccccttacaacccctagccttaggactaaccctcaattcccacttcccagaaacgcatttttcctggaacctacagtggccacacctaccatgta

SEQ ID NO: 3824 - DNA, 1400 bp, mus musculus
cagaatttactcccagacaagctgaaaacaagcaatgggctaacattttaacgagagcaggaaatatacaaaagtcttttgctattagatgggacagcccaggccaatgcaatgatttgagaagtccaaagagagttttgtttagaaaatgcttactctacaaagttccacagatactaaaggtcttctctgaccatagaatatgcaaatgtctattttaaatcacttcacttattataatgggcagacgtttccagacaaagtcaactaataatacattttccccttttggagtgacagggaagcaagccttggtcactggccaatatagccgtgtaaatgcaactaggtcttgataacccttattttcttacaagtatctccacatgactttgtagtgacactttgccctagaaattcacatttctctttcgcatgtggtgttttctaggatgagagagaaagaagtaccaacctgaacgcttcaaggtactcaacatctcccataggggggtcgaggccacctgtccaggcaatgtttacattgtagccttctcccagacctactccaacctggggagagaaaaacacgccactgtgggtaaggatggggaagaaaggaaagaaacaaaaggagggggaacgagcacatgggagctcttgaagtaaacatcaaacacagcgtcaaatcaacccaactccgcttgacaaccagtgctctgggttatgcacttgttctgtgctggttcttggtcctgtgggacgagtgggtaatctggtgtaatttaaaacaccagcaaaggacaagaaaattaggggtaatcacgcaatgcaattacctgcgagatacaagtaaaagcagggctctaaagaaataaaccgaacctcattcggggctccactgccagggaaaaagttcccttcatcatagcgatggagtgaaatgtacaggatgctggggtcagcataaaaggcctgctgtgtaccgtttccatggtgaacatcctacagggaaaagaaaacagatgacaaattccgtcacatctgactctggagacagctctcgtgatttcttgttccctctcttcctaccccacccttcttctcattttctgtcttctcaccctgtctttctctttctccctttcaggctacttctacaccaccccctctacttcctgaactttcaggcaaattaccctttaatgctcttattttttttttttaaactggcttctaaaaatcaggaaaccacagcgagcatgccctggagactccagatgagcagtcactgagaaagcccagtccttcggtacaattagatatttatacaccggggctttgtactcttgcttcagtgatggaatcttgcatcctgttttatggaggaattttatgac

SEQ ID NO: 3825 - DNA, 1000 bp, mus musculus
aaccttcttacttctgccagctggtttatctgggttattgctctcactgcatttaaataggtcacttggtctgaccgtggatggggtttacttcctgaccgaggacaacctaacccacagcttccagtaagtatcatcccagttccccagtaaccattaacttgcctgtagctccttagaaggtctgggtggggctttatgagccccacttccatggtagtattgatgggaccacactgtaaggcttgtacaagtcaccactgccactgtgagttcatggatgcagcagaagacatcttgtcatagcaccctttcccatcctccggctcttaaatgttttcagcctcctcttctgtgatgttccctgagcactgaaggaggtaatacaaatgtcacatttaggtcttagcagtgaaccatcattctcagtatcaccagttagaagtgtgtgcattaaccacagccaactgcaaaaagcacttctctgaccaaggctgggcacagcaccaatctgtaggtaaaaacgtaagtgtttagaagccagttttccatgtccatatagcacaatgacagtagtaggttccatccagggcctgtgaccttcctggccatgtgtggggttttaatgggattagcagtacaggtgtgaattccctcgtgtggagcgcgtgcctggagtcctacaaggaagcaattggttacccctttaataggcattgccactattccaccaatgagcacatctttcctggcaggttaatactatactttcagggctcacagttttctaacaccattaatgaatttcccattagtctgtatagcatctttgagcactataaaagctatcatcagacagacaagtttccagctcagctcctgcttgatttctccatgttctgtgaccaaagtatgtggtatctttaggttgtatcttgttctagttgcaacctagaaaaagacatctacttatatgggtgtatgtgtggggtggggggtt

SEQ ID NO: 3826 - DNA, 1000 bp, mus musculus
ggagatagtgaatggatatgcaacaaggagattactgggctctgtgagaaagctctatcttaattgtaatccttataggcttcctataatggctatcccagtttctgttccaagaaatggcactgaaggacagtcttacttctacctcctcgccaacccccagtagcctgtaaacgtttgacaatgacctatctgacaggtgtgaggtcattgtggtttgctttgcctttccctggtggttaatgatgctgaacacccttttatgcacaatcagccagtgaccagggtcataagaacctgtgtcagctggagagtttactcctatatactttgattttgattcctcttgaggcatgttggctcacttggtgagacagcttgcatgaacaatgaatagcagctgtagttaggaaaggatggggtctcagcacaactaataaaagcttatcgtcctttacaattactcgttagcagaggggattaattagtgaatttcctaaacactgttttgtcggagcccactccagacaagtgtagtttgggtggatgtgtgatgctgttggactagaaaccagatctggtgtttagtttccagcatgttactgactgcatgattgtaggtaccatttgaactttcccctgcctccttagaggtagtgctttctgcattctacctcaagtacattctaactgaaatggaagtaactgcctcttttgaacttacattggtgcatacatttttgcacagtaatttaggacacaagtatgaggctttccttaatttatctttcacaaagtggtaggtacctataggggttgccaagaattctctagaattgagaaagtgtatagaacagaacttcggtcaaataataatgctttagtaactaggaggacaatccagagacagactctcccaatctacctacaaaatttcagtcattgggctgttacttaggaggtaggcagcccagagacaggaccagatgacttctcatca

SEQ ID NO: 3827 - DNA, 1200 bp, mus musculus
cttcccctaggagtcagctaaatattttgtaatcacaacatagcacttctagtcccttccatgagtgacaatgtttatgtggaattttcttttctctctttcttttcttttttcttttattttttattggatattttatgcatttacatttcaaatgttatcctctatcccagttcccactctgaaacccccctatcccattccgccaccccctgcttctatgagggtgctcattccatctacccactcctacctcactgccctggcattaccctgcactggggaatcgagccttcacaagaccaatggcctctcctcctattgatgccaaacaatgccattttctgctatgtatgtggctggagccatgagttcctccatgtgtactctttgttgatggtttagtccctgggagctggagggggcgagtctggatggttgatattgttgttcttcctatgggttgcaaaccccttcagctccttcagttctttctctaacttctccattgggtccctgcgctcagtccaatggttggctgtgagcatctgcctctgtatttgtcaggctctggcagaacctctcaggagatggttatagcagggtcccctcagcaagcacttcttggcagttgcaatagtgtctatcttggtgtttgtatatgtgatggatccccaggtggggcaatctctgcatgtcctttccttcggtctctgctccatactttgtccccatatttcctttagacaagagccattctgggttaaaaatttggatatgagttggtgatcccacccctcaatggggggccttgcctaatctaaggatgtggtctctacaggttctccctcccctttgttgggcatttcagctgatctcatccctgttgggtcctgggagccttttgctttcctggcatctgggacttgctggtggctacccctagttccctgtcccccactgccacctttattcagattcctgatcctctgtatcattattttttcaatcatttaaaatgaggattttataattaagatagcttttctcccacaagccactgttgtctagggaattttaaggatatttcagttctacagaaggcaggtgttcattccgcagcctctgaagggagctctgagtctggctcctctcactgtttctgtccaagtcagttttcatagctcctgtatggaacag

SEQ ID NO: 3828 - DNA, 1200 bp, mus musculus
ggaacgccagggccaaaaagggagagtgggcgggtaggggagtgggggtgggtgggtatgggggacttttggtatagcattggaaatgtaaatgagctaaatacctagtaaaaaatggaaaaaaaataactttaaaatacaagaacaaatacaatggaagaatgatcagaggaggtttatagagattttttagacaaagagcaaatcttgagcaaaacatggagaacctcatgtgaatttggaaatggccaatgagttggtacctcaacagcatagaactaggtaactaactgataagaaacaaaccacacagggagtctctttgtcattaataatagttcttgatgcgcggatcttagaccctcaccagcaaatgtacttagaaagttattagagatcttccttctgagtccagcagaggctgctaagtgccccatagtgctctccactctgcaggatctcaggatcacctcgggatcacaggtgagtggaactcaaagtcagctccaaagaattgcgaagggtattgtgccaggaggaaacagggacaaagtaatcccaccccaccagaggctgggatccattctggttgggaccagccccttcatcttctgtgtgaacctggcctagggtgtctatggcaccagaggactctccatgctgcaggacccctagcacacccagaacctcctgatcacctgagagcatatgggcaatagaagcaacagagcttcttggttagggtccctttgggccttcatcctcagctaggaggcagagttgagacccagacccttgggcacaatccttgccagaggagagttggcctacagggagagttctgatcccagaagtagattagagctccagactgctggacacctgcactgaaagaggagaacttgcctgcagagagtgctttgaccactgcacctcaggagagaattcgactcccaggagtgctgacagaggctaaaagaatcacaggaatatcaaatccaaccagagacagcctgaacattaacaccagagatttccagatggtgaaaggcaaacataagaatctaactaacagaaaccaagaacactgggcatcatcagaacccagtatgcccaccaaaacaggtcctggatacccaacacacccaaaaagcaagacgtggatttaaaatcatatctcatgatggtggtagaagattt

SEQ ID NO: 3829 - DNA, 1000 bp, mus musculus
ctggagactcttcttcacgatagttttattgggacaccattccatataaatcaggagcatctggtcctttactgaggtgaattatgccccccatgccccccgccgatctgaaaggatgtgctgagagataattcatgcctttccaagttaagggactttcgtagtaaatagtgcgctttcagaggtggatttaccagcagataaacctgtaaaaattctactgtcaagtcaaagatgaatttcagagaatgtgtaaactttgatagaggtaaacataatattttatttgatcgatgagaaactccactccaatgcttccgagcaaacttcctcgcctatttgtaactttgtgttatgtgttggaatttacgataattctttgaatgtactaagccttttccattactacgcacatgcaatctaactcactgcaatcctgcctgttttttctaattgctgcatcatggtgtatgtgcgcaggcacttgagcaactaggtcctattgcctttgctgacttacttattccctctctttgaaggtgaaagtgtggttccagaacaggagaatgaagtggaagcgggtcaaagggggacagcaaggagctgctgcccgagaaaaggaactggtgaatgtgaaaaagggaacgcttcttccgtcagagctgtcaggaatcggtgcagccaccctccagcagacaggggactcactagcaaacgaggacagccgcgatagtgaccacagctctgagcacgcacacttatgatacctacaaagaccagctccattctcaggaaagcaccattgtgatggcaaaccttaccgaacatcgtttacatggcagatgtctgtggcagtgtggcttagtataattaaatgcaggcatctcgagtctgtgtctcatgatggatagacggtttacactaagtgccttttattgaagatgcttccacagtgaaattggagaaagcgaacgtattccaaatacacttgttcctatat

SEQ ID NO: 3830 - DNA, 1800 bp, mus musculus
attatactgagagaagtaacaaattcaaactgaatatttaggaataaaatcttagggagggggcgttctattgatgtgataagcaaatgcagtttgggaggaatgtactgattggcttactcttcatttacccttccatgactgagggtaggtaaagctggaactcaagcagggcacggatctggacactaaaactactgaagtagaggccatggaagacatatgcttactggctcaatcccatgacctgttcagactttgctataccatccagaaacacctgcccagggaaggctcacccacagtgggctgggctccactgtagtaatcataaattaagaaaatgcatggtttgtgaattgcatcttgggtgttccaagcttctggactaatatccacttatcagtgagtacataccatgtgtgtttttttgtgactgggttacctcactcaggatgatatcctccagatccatccatttgcctaagaatttcataaattcattttttaatagctgagtagtactccattgtgtaaattttatgtatccattcctctgttgaggaacatctgggttctttccagcttctggctattataaatcaggctattatgaacatagtggagcatgtgtccttattacatgttgcagcatctgagtatattctcagaagtgatactgctgggacctccagtagtactatgtccaattttttgaagaaccaccaatgaaactcaagaaggaagaccaaagtgtggatatgttgatccttattagagggggaacaaaatacccatggaagaagttacagagacaaagtgtggagcgaagactgaaggaatgaccagccaaagattgccccacctggggatccatcccatatacaatcaccaaacacagaaactactgtggatgccaacaagcacttgctgacagaagcctgatatagcggtctactgagaggctctgccagtgcctgacaaatacagaagtggatgctcacagccatccattgtttggaacacagggtccccaatgaaggagctaaagaagggacacaaggaacagttttgcagccccattggaggaacaacaatatgaatcaaccagtaaccccagagattctaggatctaaaccaccaaccaaagagtacacatggtgggactcatggctccaactgcatatgtagcagaggatggcctagttggtcatcaatgggaagagaagcccttggtcctgtgaaagccctatgccccagtgtaggggaatggcaaggccagaaagtgggagtgggtggcttggagagcagggggaggttggaggggctttaatgcagttacttgggcactttagtgtactcacaaagcaagaacacttaagacaatcttattatttgttttgtaatttgaatattcccacttagcatagacattcagaaaaatttacataaaataaccagtaataagactttactgctattcgggtaacatgtgattcagctcagtaggtttaatgtatgatttctaaggatggattttaacaactataaccttgtttcttggttataaggaacatttaaaatgaaattgaaaactgtaagacagggatcaatcagaatatgctttcagacccctcaaaaaattcacattggtgtctgtctgtcctcatctgcatgaacagtcttgttcctgtttatttcgatagacaaagtttttttcccatgaattatgattaaatgtataagtgatcaaatctctacaaatattccataagtatgtttcggtaccttgattattaa

SEQ ID NO: 3831 - DNA, 1600 bp, mus musculus
tgtttagctctgtacccaattttttaatagtgttatttggttctctggagtctaactttttgagttctttgtatatattggatattagccctctattggatgtagtattaacaaagatctcttcccaatctgttggttgctgtttgtcctattggcagtgtcctttgccttatagaagaagtattgtagttttataaggtcccacttgtcaattattggtcttacagcataagacattggttttctgttcaggaaactttccctgtgcccttctgctggaggctcttcccactttatcttctaatattttcagtgtttctacttttatgtggaggtctctacttggacttgagctttgtacaggaaataagaatggatcaggttaacacattttatttctagggctcatttttaaaaattttactatttttttaaattaaacattccatcagtttatatctcagatgatattccacttccctgttagccctctacaaatcccccttctcacaagcccttttgcctgtatgagggttctctctcaccaacccacactctctgtcctcactcttccagcattctagccaggaccaaaggtctcccctctcattgctgtcaggcaaggccatcctctgctatgtatatctctggagtcatggatccttcgaggtacactccttgcttagtgatatagtctttgggagaactgagtggccaggccagcctatgttgttcttcctatggggttgaaatcccctccgctctacaagtccttctgccaactcccccaccaggtatcccaagctcagactaaaagttgcctcattttcaaattggcttttttttcttgatatttagcctttttttttttttttgctctttctatagcatatattctagccatatctaagctgtatgtttgataaattctgttgaaaaggaagcctgctaaatagggaatgataaaataaaagcaaagtattttgtatttgcaaattttattatctagtaggcacatattgttatttagaaatcaatatgcatagtgactctgaccagtaattctctagttatcagagatggaggatgggaaggcagggttgtgttaagagagaattaagatgtaagaacaagtcacattgggaaagggaattaacatattcctgttcaaataattgttttcatactgtcacatatccttcacgtattctgtcataagcaattcaagaataaaaatcatatgtacacacacacacacacacacacacacacacacacacacacacacacatacacacacacatctacagattctattctgttttactgttgtttctttgattttgttttttttttcctgcttctatagagtaacaaataaatgaagagatcagaacccttgttaaaaaaaaagcctagagtttaatctctgtactgctaattttttaaatactgcttgccattctctacttttgctggtataaattctactaggaaaggcaaagaaaaaaaagagaagaagaagaacatgtgtgatctcagtcttcaaacaacttataaagataagttacccatagaaataatttaataactacatgaa

SEQ ID NO: 3832 - DNA, 1000 bp, mus musculus
caattattccaaaatacaagtgtgaatacatgtttaaaacagtttttatttatcatattattaatttacatttcaaatgatttcccccttcccagttacccctccaccaacccccacattccatcccccctatttcccctcccctctacctctatgagtgtgctcctacacctgttcacccattcctgccacaccctcaagcttacccctacactaaggcaacaaccctcccttccctcccactgatgtcagataaggccatcctctgctacatatgtatctggaatcctggctcccctctatgtatgctctatggttggcactttagtccctggaagctctgggtggtccagttagttgatattgttcctcttatggagttgcaatccctttcagctccttcagtccttcccctaactctcccacttggccctgggctcagtccaatggttggctatatctgcatctctgttggtcaggttctgctagaacctctgagagaatggccatagcaagctcttgtcagcaaatgctttttggcatcagcaatagtgtgggagtttggtgtgtgcatatgggatggatccctaggtgggacagtctctggataacctttccttttccttcagatctatttttcatgatctcatgccttttgaagaaaattatagctcaattacatgataataagcaatctctattaggccaataaatcaaagtcaccataggagttatagacactagaggaatagcctgccaaatgaactgagaaacaatggtatgtggaacatggaagaaaaacaggggtgattcaggcctaattcagaggaagatggtactaaaaatactgggagaccagttgggggttcttctctgaggaagcctattttctccaactctctttatttctttcctgtagtttcctgtagttcttagttctactggacttctgttttccacgataacatgtttgttagagtcatcttttttcaagtctact

SEQ ID NO: 3833 - DNA, 1000 bp, mus musculus
tcctctgctgtatatctgttggggacctcatatcagcaaactctgaccttgtcaatgggatcatttcttgttaacctcccttaaataaaaatcaaagaaaaaattctaaggtgtttgcttgaaattgttaatatgtgcccattgacttgtatattattgtgtaggccaccactgagtataatcaagaatgaaacattattgacaatggaggtctttagtttgagaaagcttggttctgagtttaactggatggatcacacaagatccctgcaagctagatgtaggatcgattgcatgcaaaatacaaactgtggacctttctgggatccttcagaaggacaaaaagatgtcagtggacaaaatgggttacagacttaagatttccaggtttggtggctctgcacttcaccgcattaagtaacgatagctaagatgtccccgttggagggtgcgaagtagatcatggtttgggcaagaatttctgccaaggaaagcaagaacccaaggggaaaagactttaaaatagccacagcactttttccctaccgtgtaaagtaagtcagcctatcctgatgacctcgccgctcacactatgctcaaagtacctctgacattgataaggtatggagaagaaactggatcatgcaaacaacacagtgggtaggcaatgtgcggcagcatcgcctttcttcccatgctgtaaatgaactgcgttttcccactagccaaagcgtgatgaagcctctgcaccaggagtttcagtaacactggcgctttaacacataaactgaaacttgatttggggaaatgaactcgctctatagaatgccttggaaaaacaattttcaaaatgtatgtacttataattgtaaatttaaatcagttttatttaatgctactgcttgttcaaaaaatttgaagaagcaaaattgatccatttgtaaataagtatttgggcacatgggttagtgatcattttgaccacaagaagtgttatgct

SEQ ID NO: 3834 - DNA, 1200 bp, mus musculus
ggcaaaaaacaagtggatcaaagacctcaacataaaaccagatatattaaatctaatagaagagaaagtgggaaataggcttaaattcattggtacaggagaaaacttcctgaacagatgaccaatggctcaggctctaagatcaacaattaataaatggaacctcatgaaactgaaatgcttctgaaaggcaaaggacactgtcaatgtgacaaaacagcaacctacagattgagtaaagatcttcaccaaaccttgatctggcagagggctaatatccaaaatatataaagaattcaagaagttgggcaccaacagcccaaataactcaatttaaaagtggggtacagaggtaaacagaattctcctgtgaatttcattgctgttaatagctgagtagtactctattgtgtaaatatatccattcctctgttgaaggacatctgggttctttccagcttcttgctgttataaataaggttgctatgaacatagtggaacatgtgtacttattagaagttggagcatcttctgggtataagcccaggagaggtattgctagatcttcaggtaaaagtggatgctcctggttccaggactccaccgaaagagagtagtctgcacaggtgagagtgtgcactacagaagctaacagcttctgggacaggcgggagccacagagattctgaggcagcaccctttttgggctccagacatccgggcaccttcccggccagagaacaggtatccgcatggcccgggagggctttccctcagcatcagcgggagttatcttggttccgggactctgcgaaaagtagtctgcacaggtgagagtgtggactacagaagctaacagcttctgtgacaggccaaagcaacacagcttctaggaaaggtcctgttttgggccttcatcttcggccagaagggaggtccaaatgccagatatctgtgcaccttccctgtaagaggagagcttgctgcagagagtgctctgaccactgaaactcagaggagagaactagtctcccaggtctgctgatagaggctaacagaatcaccagaggaacaatctctaaacagagacaactataacaactaactccagagattaccagatggtgaaaggtaaacgtaagaatcttactaacagaaaccaagaacactcaccatcatcagaacccagcactctcactt

SEQ ID NO: 3835 - DNA, 1400 bp, mus musculus
gtgggggtgggtgggtatgggggacttttggtatagcattggaaatgtaaatgagctaaatacctaataaaaaatggaaagaaaaaaaaaacttatggacattacataatgacatgcataaatacctttacacatgtatcgtcctatacccttgttaatcttgtttaatatagaaaaccagaaccaggaagctccctctaatggagagcatgggatttcaagtaaggcttcttgagaaaaactaggctctagagactgttgtgcaaggtttcttgttattagtaacacacatcagatgtattagaaattaggatgaggatactcaggatgtaggaagaaaatagccactggaggcagggcacacagggaaggaaaacaattgaaaacaatataatgtcaggtgtatgaaatgatgaaaaaaatccattattttatatggtaccttaaaaattaatgaaaaacagataagcttggtagaaaacaaatttgatagacaaaactcccttcttcttttgagccattttaactattttctaccatgcttttccatttgttttaccgttgcaaagaagagggagatacttaactaaatcctaatgatgcattttaggcaaaataaaaatttcaccactgaaaaccatcgaagcatatttgtgatagctgacgaagtggtatcatacaaatgtctgtgttttggttacactgggtttaattttaaattgaagcctggaagactagtagaatcagagaaagagaaaaacgcttgtttttgataagatgtcattgtttaccttagagcatgaaaaatagagcaagcagttaccaagtatagaggaataaaaaataataagtgtcctgctgcctggaaatgagaggctgtgatggagcacacagctgccagctcagccatcagggacttcagcagctgaccagaagcttaagtcaatggaaaaaaaatttaactagacaatactttgatgctttgaggcctgtatctaaagacagcttctgccattgaatctgatgcagtgacaactggccatgctaatttgcactgataatagatctgaaattatttcactagcatacacattagcaatccacctgaatacacttaaaactgttccacaaacacacacttactgtacccacatagaattttgtgtgttgatttagaataaacaataaatgtgcgtatgcacgcacatttaaaccaagagagataaagatagatggtgtataaatcgatggtatagtgtttgccctgcatatatgagccttgactttgggtccccaaacttttaaaagacacataaatgattagagacaagcttttcatttaaaagcacagagtcagccttcccacctgcatcctctccttttcctcatctctgggtggg

SEQ ID NO: 3836 - DNA, 1000 bp, mus musculus
aatctgtgggttctctcagtgaaatagaccacgagaatggtcttttatccagtaggtaaaagatataggtaacgtgggacgaggacattctatttttttattggatatttgctttatttacatttcaaatgttatcccctttcctgcatcccggctcctctgcttctatgagtgtgctcccccactcaagcatccccacctccccacccttgaattcccctatactgaagcattgagccttcacagaaccaagggtctctccccccactgatgcctgaaaagcccatcctcggctacatatgcagctggagccatgggtccctccatgtgtactcaatggttggtgttttagaccctgggagctctggggtgtctggttggttgatattattgttattatcttcctatgggattccaaagcccttcagctccttcagtgctttctctaactcagaagaggacattcttataagttagccagttatgactgttgaaattttccccatgtatatcctttttattaaaaataaaaagactctgagcacggcagccagaacagcattgttggagttggaataaggatggaagggagggagggagattggttattgtccagacaatatatcaaagaaggaattgccatgaagtttgggagaaaaatgtttaaaacatccaaagatttttaagagcagagattcaaatcatggctaacaggggccatgctgagtttgttgtttggcatcgttgccaagagtcggccaaactctgatgccagaaacagcaggaaagaaaaggcaacagatcccacaattgccaaaaatatccctatcttagaagaatgagagcttcaaagggtagacacaatcaggctgcaaccaaactgtaacagatattccaagttggggatatgacaagcatatcagaaaagtagtgctgttattaacaaaatcccatagcaacctgagaaatctcctccaagaatttgattggctagaatatt

SEQ ID NO: 3837 - DNA, 1400 bp, mus musculus
ctcattcccccctttgaatctgggtttatttgtgatactgtcagtttaatgcttctaaaattgagactatataaagacttttagaaaaacagtttagtcctcctattatcctacatatttcgacaacctttgcaattactagtagtaagctctgcctaatattttggtgtgatactctgcattttctcccatcagttgttggatggtctttctggtctctctgataactattacgctaggctccagtcctagcatactttgccagcatgacaaactgtcgatttgaggtttgtttgctgagttggtatcccaatccctccacttgagagtatgcctacttgcaaaggatagtaagttcaggctctttgtcccccattactagagatcttcattagtgtcaccctcgtagattccatggagtttccattgtactaaatttctaccttgctcctgaaatgctcctgatgccagtcatctttccctgtgttctctctcctcacctccacctgagccctcctttccccatcactacccaccccagtccacccacaatatgtattctgattcgccttcctaggaagatagttgcttcctcccttgagctctcgttgttacttaccttctgtggattgtagtatgattatcttttactttatagctaatgttcacttgtaagtgagtacataacatgtttgttgttctgggtctgggttaactctagttccatccatttgccagcaaaaattcatgatgtcacttttttttaaacagcagaataacactccattgtgctaatgtactacattttctttatccattcttcagttgagtgatatctaggttgtttctagtttctggctagtatgaataaatctgcaatgaacatagttaaacaagggtcattgttgtaggatagaacatccttagggtatatgcccaggagtggtatatggctaggttgtgaggtagatcgatttcaaattttctgagaagctgccatattgattttcaaagtagctgtgcaactttgcactcccaccagcaatagaagagtgttcctcttgttccacatccttggtagcatgagctatcacttgtaattttgatcttaaccattctgatatgtgtaagatttccatcaaagtgattttgataccactcctgggcatataccctaaggatgttccatcctacaacaatgacccttgttcaactatgttcatttacatttctctgacagctaagaatgctgcacatttctttaggtgtctcttagccattttgtttgattgatggcgtcttttgccttacaagtcaatggcctttctctacacaaaggacaaacaggctgagaaagaaattagggaaacaacacccttctcaatagtcacaaataatat

SEQ ID NO: 3838 - DNA, 1000 bp, mus musculus
agagagaaagttcccagttgccatctctgactaaagattcggagcaaaccatgaaattcactgtgggagtatcacagagccctgggaggatggccctaggaacaatcaactgttctgcaatgtctctgacagcaaaagagggacagaccacgcccatgtgtgcctgtctctttactcctcctatagagaaaacgtagacacttgtttgccttcctgtccaaatcctcatgcacatttcatagtcaatgctatttatttattcatacatcattcatgtctaccctaggaagtaataaaaatgaaaacaacttgtgtcatgtaacattaagtaatattcttattaacattttactttgtcaaatgatattcaagtatttggaaatttcagtatctataccttaaattctggacacggtagccagtgcctaataggggatattcaaagtggtcagtacaacacggagaaatgtttgatttgtctctctgctcattcttcaattattatacccatgataactgctaagtttaatttgatatttttgttttgctttgtttgattttgttgttcttgttgatactataaagcttgcttgagaaacatcttgctgccatataaacttgaatatcctgaggggagcagatttgaccaaatctaagagtctgtgcttctagagaatgcatgggctgaaagagctcttctacatctctaacacaataatatttgaaatacacttaggtaatattgtcaagaacacggagttgcagattttagttcacttcggttgctacagtgcagctgactactaattcccatcatggacactacaggtttttcatcttttgagtggacgtttgctgtgcagtttagtatgtccctgtgcctgaaattattttactctttattaatctgatcttagtaccagtactaacatttctctcctgtacaacttactatgtctttctttgtcccatgatttactgattcactgtatcatatcta

SEQ ID NO: 3839 - DNA, 1000 bp, mus musculus
ggaaaaatttcctagagattgtatactgcagggtcaaaaatggagaaggacctgagggaaaggacatccagtgacaggtagagattggaatccagctcaaggggaggccccaaggcctgacactattactaatgatatggtgtgattgcaaacaggagcatagcttcatggctgccctccaaaagatccaaagagcagattcatggaaggagttacagagacaaagtttggagctgtgacaaaagaatggaccatctagagactgccatatccagggatccaccccataatcagcctccaaacgctgacaccattgcatacactagcaagattttgctgaaaggacccagatatagctctctcttgtgagactatgccggggcctagcaaacacagaagtttgctcacattcagctattggatggatcacagggcccccaatggaggagctagagaaagtacccaaggagctaaagggatctgcaaccctagaggtggaacaacattatgaactaaccagtacccaggagctcttgactctaaccgcatatgtatcaaaagatggcctagtcggccatcactggaaagagaggcccattggacacacaaactttatatgcctcagtacaggggaactccagggacaaaaaaaaaaaatgggaatgggtgggtagggaagtgggggggggagggtatgggggacttttgggatagcattgaaattataattgagggaaataggtaataaaaaagaagaagaagaaaaaaaagagtcagatgcagacatttgcacccaaccaatggacagaagctggggactcctgtggttgaattagagaaaagctggaagaagatgaagaggagggcaaccttataggaagaccagcagtctcaactaaccagggcttctgagattgttgagacactgagcaaccaactaggcagcatataccagtgaatatgaggcccctaacacatatacagcagaagattaccctgt

SEQ ID NO: 3840 - DNA, 1000 bp, mus musculus
gcaacaaaatgttgggtcctgcttatgtagctgctacatccaatcctttaaaaaaatttttcattagttatcccttatttacatttccaatgctatcccaaaagtcctccataccctcccaaccccccactcccctacccacccactcccacttcttggccctggagttcccctgtactgaggcatataaagtttgcatgaccaatgggcttctctttccattgatggtcgactaggccatcttctgatacatttgcagttagagagaagagctccagggggtactggttagttcatattgttccacctatagggttgcagatccctttagctccttgggtactttctctagctcctccattggggaccctgtattccatccaatagctgactgtgaggatccacttttgtgtttgctaggccctggcatagtctcacaagagacagctatatgagggtcctttcagcaaaatcttgctagtgtatgcaaaggtgctagtgtttggaggctgattatgctacatccactcctgtagtgacctgagtgacatgctgaaaagcctggatgcagtcccatggcataaagttcacagaaacagtctcctgaaaccatagcatcctataataatgaatgctccagatctgtccttgctttagtaggtaaatggatctgtgtgctttccctcagtattgtttcagtacaggtgtctccaagcaatgacttgccaaatacctaagcagaaccgaaactttgcttcctggccttcaccaatgtgctaggtcattcttgagctgaacgtgggctttgaattcagtaagaatgttgccttttaagtgacattaaggagctaaagagatctgcaaccctgtaggtacaacaacattatgaactaaccagtaccccggagctcttgactctagctgcatatgtatcaaaagatggcttaattggccatcactggaaagagaggcccattggacacgaaaactttatatgccc

SEQ ID NO: 3841 - DNA, 1000 bp, mus musculus
acagagaagctgctgatctgttgccctggctgcagtagatatcctgggagggctttagactattgggtctttagagaagtagtcaagctgttgtcctgtatgaaccttttctctggaggggggagctatgaagtgtggtttctgtttccctctgtgtctcagcaccccagggaggctttcagtctgttgggtcagtggccttgcatgccacagagtccatgggaggtcttcaaagtgtggtctctgttgcccagttgcctctgtacagaagtcctcctaagataccttcaagctgtggtgtagccacagctacaccaggggagcagccaagctggagatctgttgctaagttgccctatgtgcagtggctctcctgggttgtcttagactgtggtatcagatgtcctgagtgcagcagatctcctgggatgcctcaggatatggtatcttcaggggaggagattagctaacagtctgtcccagcagaaaggaccaagcagaaggggagtggtattctgcaggtgagggtcttgtggagtgatgggttccaagtcaactgggctgccagcggcagctgtgggtcttcggaacagttcttaccaaatgctctgagtgcagcgaatcttccaggttgcctcaggatatggtgtcttcagaggagcagactagctagcaatctgtcccagcagaaaggaccaggaagaaggggctttttttattccatcttaatctacttcttgctgtaacagaacacctgaggccagtcagtgttattaaaacactaagcttacagatcaacatgctaaaaagttcaagaacattacattaacatctgatttgcatcctatggggttttcttgctgcatcttaacagtgtgagacagggtaagcatggtagctctagatctgtctttcttatcctgaagagccactaatgtgctacccaggactgtgtatgtctttaatctcagcacttgggaagcagaactccatagctcct

SEQ ID NO: 3842 - DNA, 1400 bp, mus musculus
tgttgctacttcataactgtaattttcttactgttatgaatcataatgtagatatctgtgttttctgatggtcttgggtgacactcagagggtcacttgacccccaaaggagtagggacccacagtctgaaaaccactgctgtaaagactaagggatgtgtgtgtgtgtgcatgcgtgcatgcatgtgaatgtgtgtgtgtttcccttttctcataagggccgtttccagaatctgccctttgggaaatagggcttgctaccagcttcctggaaagcaagggtttccgcggctactcgttctgcatagggaaggaaatcctgtgtttctggtgcttcccggggctaataagcaagtacttctaattccattgaaagtcaacatttttggttcatctggccatagagcatatgaagactgactggtaaatgtgtgccgattcgggtggaccatagaaggtactgacaatggcagctgttggcctcatctctgacttctccgatccccagtttcttcttgatgccctgctggctaaggaaggtgcccgaccttccctcgtcagttctgtaattcagagcctgtgggaaggatgcaggtgattttactgagaatggctgcaaacacctgtattcggacatttgtatttggaggactgggttatgggctgatttgaataatactataagtttacttgttctcactctttcttacattatttgatttgaggaaaaacattattactggctggaaggaagaaagacataaaagacttaaaggacagaaattttgttgaagactgaaggattacttcaaataatcagccacaacgagatgaaggacatgtttgatgactgcacactgagtctctacccgtgtgacgtcagctctggaacactgcactgatctcttccgggggctgttttctcatcatgacgccttgtcagcttcctcttagaacagtctgttctgtctttccaaagaggtttcagcaccccttaaagttttctaatttcactcaaagtgaaaactaaagaccttgcaagtcggtgctagctctaggtcacagggcgccactcagtgccatctctggctttgcctctttctcttcccttgcccaccttctgcctcctagctgtaaactactgtcttaggtttctattgctatgaagagacaccatgaccatggcaactctcatagaagaaagcattttattagggttgacttgcagttcagaagtttagtccattatcattataggaggaagcatggcagcatgcaggcagacatggtgttgtagtggtaacagaattctacacctggatctgtaggctgcagaaagagagagtgacactgggcctggcttgagcatttgaaacatccaagccagcccccagtgacat

SEQ ID NO: 3843 - DNA, 1000 bp, mus musculus
ttattttctgtgggcttctgtctcacttgctaagaaccagtatccattagttttactaatattcatgtaaaacgcaccaagatatttatctgaaaatcagcatttcaacttaaaaaagcgttatgtgtgctcacaccctttgtgcactcctacaagtccataggatgagtgagaagggagaggcccgaccacagtgaatgtgtagaggcaagagagcagctttgtggagttggttatctcttcctccttttacgtgagttccagaatctaacaggtttggctaatggctttcatagcaagggccattaccggctgggtccccttgctacccccagtgttctggttttagtaagcatggttatattgacatcctgtgcgtctctgactttggttcttgccacttcagatttactactggaagacccagagctcctctaaaagaaacaggcgccacattgagaagaagatcctcaccttccagggcaccaagactcacggcatgctgccagggctgcagccatacagtcactatgccctcaacgtccgagtggtcaacgggaaaggggagggcccagccagcacggacagaggcttccatacaccggagggaggtaaggaatgggtgcatccctgggatcaaggagcgtgtggaacatcctgaaagggtttgcactacagcaggccctccatggagagaatcctctagaagcaaactgcatgattagaaatgatcacagcacacacgaaaactggagaaatgtcacccacacatgactggaagccacacataaaacttcagagtgcagaaagctgtctccagataaccttttcccccttaaaaatttccttttcacttagggtatctgaaacattgctaatgtagtgtgggagtcaccagctttctgagccaagtcacattccgtatcttctttaagtgtcaatagctccctctggaaagtgtgagcgatgggaggaagaagtaagaaaatacccacaaagg

SEQ ID NO: 3844 - DNA, 1800 bp, mus musculus
aagggctcctaacaccagaaaaaattcaaggccaaatataccttgtaaagccatttcccactttacttctgatagactgtcttgaatttcgttagaaagttcaagaccagacttaccttgtgaagctgtactcactggtactcccgttccccagctgaaaagttctgaattcatgcagttgaatccttctcaacagtctgtgttgtgggaacacttcataaccgtgacccgcagttctggttctggaatgagggatcttccttgtgccggtgatggtaaactctcgtcccgagttttttctcgtcccggaattcggcaccaattgttaatagcgttctcacgcccggccaggaagaacacagcaaaccagaatcttctgcggcaaaactttattgcttacatcttcaggagcaagagtgtaagaagcaagagagcgagaaaacgaaaccccgtccctattaaggagaattatccttcgcctcggacgtgtcactccctgattggctgcagcccatcggccgagttgacgtcacggggaaggcagagcacatggagtggagaaccaccctcggcacatgcgcagattatttgtttaccacttagaacacagctgtcagcgccatcttgtaacggcgaatgtgggcgcggctcccaacacctgagtgctacagggacagttctcttggtcttatgatcctgggccctactctaccgcttactgcaggtggtgagggttgaggctgggggcagtaccttcctggtgcccatgccaccgcatgacagatgcatagttgggccagctcttcaagcctcatgcccttgtggctagctcatctgagttcccactaccaaggacagctctactatgctgcccaggagagaaactctccagagtgccatagccagtgatgtgcagggtcagttctgcacatcccttggacatcaatgtgctctcaggtggcagaccagaccgggaatgtctgaatggtctttagagatgacatacatcatggacatcgacagtgacccctgcttctctatggcaatggacccagacgtgaccctcagtggcagcacaggctgggacttcaccttaacctcaggtggcaggataggttacttacagctagtcctcccatcctccagttccacctctcttcatgatgctcagattgttctgcttttcttattttatcatctgtccaccacatacttgcacaacatagtggctctggttgtgggtaggccatgaggcaggtgggcctctggaccatttgctagtgggttagcctttttcttctgattttttttttcatgtaggcaattgatggctataggcttcctttgggggaatattttaatgtgtttaagattttttttttaaattttcgcgaagttacaagaatattttcatttatttcttgaattttctttgagtcattcatcccttagtaataaattgtttaattaccatctgcatatgtacttactagagttttgtttgattttaagtttattgcatagtggtttgaattggatatgcagaattattcaatctttctgtatttgtaaagagttgctttgtgccccagtatacgatatactttagagaagctcccatatactgctgaatagaatatgtgttctttaatgtttatttgaaatacttgatagatatctattatgtccatttaatgtcagatgccatctaattctgaaagtcctatttatttcttgtccagttgacctatctattagagaaagtggcatgttgaaattacctatgattgttgagtttgt

SEQ ID NO: 3845 - DNA, 1000 bp, mus musculus
cttttttttttcagtgtgctttttcatttttattcctcccctcttccattagcccactccaggactccctcacagacctacccagagatgtgttgccaaggtgaatctagagtatgtcaagttaacgatcagcctcactcatcacagcattcgaggctgagtgaccttggaaaatattctcctgatttctaattcagggatatttctagtgcatcataattgcttaaacatttagctcatattttcaacatgtgtctcatgacgttgctacgagaatcagtgagagccagaatcactgctgtatctttagggacagcttgccatgctggacattgtggcagttctttgggctctccacaggataggtcacagctgcttcaccccttctcagcttacatggttctttctgacactgggaacacaacttctgttccaatccaatcgcacggggaacctgagacagcattaattggggaagcagaaaacccagactgaccagggtcacaagtcccttccggtcggccccagaaccatgtcaccttgggctcagagaatgcggacaccaccaaggttcccagagcactctccacaggatcttaggacctcctctggtgagtggaacacaacctctgccaggaggcaggttcgaacaccagatatctgggcaccttccctgcaagaggagagcttgcctgcagagagtgctctgaccactgaaactcaggagagagctagtctcccaggtctgctaatagagactaacagaatcacaagaggaccaagctctaaaaagagacaactataacaactgacttcagagattaccagatgacgagaggcaaatgtaagaatcttactaacagaagccaagaccactaaccaccatcagaactcagcactcccaactcacccagtcctgggcacaccaacacacccaaaaagctagacccgggtataaaagcatatctcatgatgatagtagaggatatcaaaaaggact

SEQ ID NO: 3846 - DNA, 1000 bp, mus musculus
ataataagataaacaaaaaccaaaacatcagatttggtcaagtccagcatgcagacagaaaagggcccaagagaaagcatagtaatgagagacccacttgtttgcacattcaggaataccccctaaaacactaaactgaaaaccgtaatacatatgcagaggagctgatgcagacccatgcatgctctctcagtctctgtgacttcataagagcattgatcatggtgatttagaggtcttattttgtggatatcctccattccctcaggcttttatcctcttccatgaggttccctggtccctggggaaagcatattgtacatataacttttttttttaattgcaggttccttagggaactattgaactcttctatcaattgcagatgaaaaagaaatcaattttggtccaaatgacaataactgtatcatcattttaaagcttttaaaactattgattcaatgattgcaagattgtttttatctttgacttaggttcctataaaaatgtaaactacaaaatgatattttccaatagtgcagataagctctagataaatttgaatgttcaaatattgctgagtagtggctgtgcatgcctttattcccagcacttgggagacacaggtaggcagatttctgtgggttcaaggtcaacctaaactgcaggtagaattacaggccagccagggaaacactacagtttgtgagggaacaggaacaacaaacttgagataaagctactgtgtatgcccttgtaatgtgctgcaaagcatcggctagtgctgctgccagtgtggaaggccattgcacccttagcagggagtgggaatgccagagggagcttctaagaggacgagtggcttatgcccaatacttgccaagcttggaattgaatgaggattacttcattttatttattcaagaaattaagttatgatttacacttgtgtgttattctatccaaatacaatttctagttctttaaaggttcatattca

SEQ ID NO: 3847 - DNA, 1800 bp, mus musculus
taattttattaatgtgtcactagatcattaggaagatataagctaacaagtgcaatggtaccaacattgaaaagataatgactattaagtttctagaaacagacaaaagaaactcagtgagcatagactagtaggaaaaaatgcaaacaaattgacaaaagtattgttaccaaactgctgttaattgagaatacatagaaaaattttaacaccagacagggaaaaaaacaaacaaacaaacaaaaaaacaaaaaaaaaaaccctcacatgttctttatgaagcaagattggccacctcagaaccttcagaattaaaatccaaaactcactcaacacagtgtgttcttaatgatgaaaaggcaagaataataaaatgtgggtatgttgcagaaaaaaaacctgcaggtggataactcatctgattcagcacccttattgcctacaacctgtgtttgaaatgctggtcatctagaagttctggtgttcctttacggtgcagagcctagagaaggtttaaaaaaatgtagctcaaggggacaccccaaggcctgacactattactggggctatggacatttcaagactgccctctgaaatactgaacaagcagctgaaagagtcagagggagatatttacccccaaccaacggacagaagctgctgacccctgtggttgaattagggaaaagctggaagaagctgaggaggagggtgaccctgtaggaggaccagcagtctcaattaacctgaaccactgaggtctctcaaatactggatcatcaaccaggcagcatacaccagctgatatgaggcccccaacacatatacatcagagaactgctgggtctggatcagagaagatacccctaaccctcaagagactcgaggtcccagggagtggagaggtctggtggggtaggggctgggagtgggaacattctcgtggagatggggtggagggagaggaggtatgggatatggaacagtcagagagtggaccaggagggggataaaggctggagtgtaaaaaaaaaagattaaataaagttgaaagaaagaaagaaagaaagaaagaaagaaagaaagaaagaaagaaagaaagaaagaaagaaagaaagaaagaaagaaatgcagtgggctagaaaatatcaacaatctttatgcctgcgggaggatcagtgtgtcaatcactgatgggcataccccaccccacatatacacagccactctcatgaagaataacagctctcggggcacatggatactatcctagcatgcaaacaggctgaggtacaaggggtccacattttaggtcacctgggactacactgcatggtggatgagttgaaggataaaatagtctccagagaaaatccttgtcaaaaactagattgtgagaggtgtcaagaaaggaaaagaaaaatgaccttgtgtgtgtttacttgccactgctatcctctctttagagcctctttttactatgatctattacgtcatacaattgggacacatttttccctttcatacaggttctactgtagatgacattttggattttattaaaattacccacctcatagtttgtaatgcttcttgaatgtctttcctttctcactctgtaccatcccttatacatattgccttaaatgaatgtttatctctatggaaaatgttaggtaagtttcatctaaatttcatcacaaacagcacccacaagtcagtgactttgaaaatcatgttatttgtcacttatataagatgtataaccagagtgatgtactctctgaggctggtgtcttt

SEQ ID NO: 3848 - DNA, 1400 bp, mus musculus
attttttttcaaaaatagctagcatttagttttatcaggctttttttctgatgtagttgctaggagattaagagatcattttgtgggctaatgtgcaaatatcagaggttatatctgatttttattatagctaaattatgtgtttttctaaggctcaaagccttatcaatcaactattattaaacacttgatatttaataatttcgcatggtatttcatttctcaatttttgaatgatgccagaaacatgagacaattgaacccaagtctgtcttcgtaagagacagttttgggtcttttttgctttggctctttctgtataggtgtttccatagtatatgtagatagaattgtttctttctagatgatgcatggtaagattctctcttataccctctcttcattgaaactctgttaactgttcttatactataatcccatggccaaactatcaattcaagcgctaaatctgctcctacaatcctatctgcatttttgtggcagtggttgactgttctacccttccacagtggttctcaaccttcctaatgctgtggtcctttcatactatccctcacgttgtggtgactactaactataaaattatttttgttgttacttcactataattttgctactgatttgtaatataaatatatcatgcttaggatatctggtatatgacttccatgaaaaggtcctctgacctcccaagagttgttgacctacaggttgaggaccactgacctaatacattagctccttggtttcctttaggacattatcactgtccttacaggtccatcttaaatagcatcctctcaagaaaactgttcatctttcttcaggaaatatacccatttgtcactttgagctctgtcaccctctcaagtattgacagctcgtttcatggctgcactatgaagtcacattaggcttatgctcttcattgggcttattgcctattgccaatgttgacttctacatactttttaaaaataattacacaaactgggagtgaagcatggctcacgtcataagtctaactatgtctactgctgatctaaagtcctaagtttttgccctcaagtatacttactttccatttattttacttgtcccatctaaatattctattttgttcatctttgtttctctgagtctggtagcaaagtcttaaaaatgggtaagagtctatgggtaagagtctataaaaaattaaatttaaattaatttaatataacctatgtagaatatataaaatacaatagaagcataaaattttccttataaattcctttccaaatactcagtaaggttgaaggtataggaacacaagaatatagcctcttcttcctaggaacctattatttaggaggagctagaccaataattacaag

SEQ ID NO: 3849 - DNA, 1000 bp, mus musculus
tgtgtctacttccctttttatgtctagtatgggtttgttcatttccatctcctgtttgatgtgttttcctgtttttctataaggacttgcaagtctttagcagtgttctcctgtatttctttaagtgagttattaaaacccttcttgatgtcttctaccatcatcatgagatatgcctttaaatccgggtctaggttttcaggtgtgttgaggtgccctggactggctgaggtgggagtgctgggttctgatgatggtgagtggtcttggtttctgttagtaagattcttaagtctgccttttgccatttggtaaactctggagtcagttgttatagttgtctctggttagagcttgttcctcccatgattctgtcattctctaccagcagacctgggagactagctctctcctgagtttcagtggtcagagcactctctgcaggcatgctctcctcttacagggaaggtgtagggatatctggtgttcagacttgcctcctggcaaaagatgaaggcccaaaacaggacctgtcccagaagctgttagcttctgtagtccacactctcacctgtgcagactagtctagctggagtccgggaaccaagatgtctctcgcagacgctcaggcaaaaccctgccggccgggcagacacctatcctctggcagggagggtgtcaggatatctggaccccaaaaagggggctgcctcagaagctctgtggctctcacctgtcccagaaactgttagcttctgtagtccactctctcacctgtgcagactagtctcggtggagtctggaaaccaagatgtttcctgtagatgctctggcaattccacaaagggtttctaagaacagagttgctactttgctgaacattctatatttatacctttttttaactggcaataaattgtttgactttagcatggacatgaatattggcaggatactgtactttttattgtgtctcatacagaacaattgctgaagctca

SEQ ID NO: 3850 - DNA, 1000 bp, mus musculus
caatagtccatctctaatggctgagctttccagaaaggttcattaacatatctcaaagggccacttgcaagctatggagaagcattgtccattcctgaattctgtacttaagatcagcataataaatttcgctaatgcctaaattctctctctgtgcctgagagacagagcattcaggagagattccagattgacatctggtgatttaaagttcctctatagttatataggataaaaatctggcttacattttcttttccctacatagcaactcctaatgattcatctgttgctggctgttaaagctgttggcagggctagtgagtacatagagtcggctgaagaactagcatgtattaattgtttaagaatgagagtagaaggcccaggccctgcttctgattccagctctggtttgggtcagtcagtttatctatcttccacctgtaaaatgaaaaaaggaatacagatgaacattttagagaagcaatgaggtagaagaattctctcataattaacacagaatatcatagatatagaaagggcagtgaaaaagtttaaaaccaatttgttatgaggatcatttgctataaatgtgattaaaattattctgtttgacagtcaggcattggttgttagatgtagctggtctttgtgcaatggctagaagaataccattcctgtataaattttgtagaaaaataatagcaacatgtgagaggaaaataaatagagatatactctctccactctgacacccctgcaaccatcatgaggtcatcttctcagttctgctttgtgcctcatagtctctctctgtggcactgccttcagaacacatgtctcataaatcattcaggtgagaggcattaatcataataagccataagaccaagtgaaattctgaagaaggccctgggacattacttttcagataatgtctactgtctttgatgtgtcttgtgtcgcctggacagtttcctggttacagactgttaga

SEQ ID NO: 3851 - DNA, 1800 bp, mus musculus
aggaaaggtttggaaatagaggatgaatttaacaggaatattacataggtactgaatatgcactaattttgtctgaattttaacagtctctttctgaagctaaaaatttcaataccaaaatatatggaaaatgaaattatgttaggtacataatgatgctaactatttggggatatgagcatttgtatgaggacatccctttctgatgacaacaactctctggaatttttgggtcataaaaagcttatgatgtaagatgccttttcttcctgtgtataattgataccttatccctgtagtatattatccagacatatggttaagtctttcctatggctaattgaatttcagtaactttgctcatttcaagggatcatgcaaaaagcaagcaagaggggtaaatcaatatatattattaattttaattcactatattagataaaacaagaattaagaaattacagatgcataaaatttacaagctacattaggataattaaaactttatgaatgggacaggatggaagtgttccttcaggcaaatataagcttggtaatcttttagccactattctttttttttttttttttccattttttattaggtattttgctcatttacatttgcaatgctataccaaaagtcccccatagccacccaccccctctcccctacccacccactccccttttatggccctggcgttcccctgtactggggcatataaagtttgcgtgtccaatgggcctctctttccagtgatggccgactaggccatcttttgatgcatatgcagctagagtcaagagctccggggtactggttagttcataatgttgttccacctatagggttgcagatccctttagctccttggctactttctctagctcctccattgggagccctgtgatccatccattagctgactgtgggcatccacttctgtgtttgctaggccccggcatagtctcacaagagacagctacatctgggtcctttcgataaaatcttgctagtgtatgcaatggtgtcagcgtttggatgctgattatggggtggatccctggataaggcagtctctacatggtccaccctttaatctcagctccaaactttgtctctgtaactccttccaagggtgttttgtttccacttctaaggaggggcatagtgtccacacttcagtcttcatttttcttgagtttcatgtgtttaggaaattgtatcttatatcttgggtatcctaggttttgggctaatatccacttatcagtgagtacatattgtgtgagttcctttgtgaatgtgttacctcactcaggatgatgccctccaggtccatccatttggctaggaatttcataaattcattctttttaatagctgagtagtactccattgtgtagatgtaccacattttctgtatccattcctctgttgaggggcatctgggttctttccagcttctggctattataaataatgctgctatgaacatagtggagcatgtgtccttcttaccagttggggcatcttctggatatatgcccaggagaggtattgctggatcctccggtagtactatgtccaattttctgaggaaccgccagacggatttccagagtggttgtacaagcctgcaatcccaccaacaatggaggagtgttcctctttctccacatcctcgccagcatctgctgtcacctgaatttttgatcttagacattctgactggtgtgaggtggaatcttagggttgttttgatttgcatttccctgatgattaaggatgttgag

SEQ ID NO: 3852 - DNA, 1000 bp, mus musculus
agtatgcttatcatgtattttctacatcagattaaagcaagctgagcagtccagctgtgcgtcccttatgcctctacactgcgattgtgtttgatcatcagccctactcctgctgctgtcactttctaccacaatcgcttgtgctcttgaattgtgaaatggaataaaaccttccttctttatgatgctttacacgatattttgttgcaataagatatgaaactggtgtggtaggaatataaattatttctagttgcttatcatgaacattttgtcccccttaaaacaactctactcttacccttacaggtagagataaaatattctgtatgtagtaaattatttttatctctttaatttttcttctgcagctaaagatcagtatgaagaaagattagtttaattgcctattacattgtgcctttagaatattctttgaataccccattgctttttagatcaactatagctaaacattttaagaaaaattcttcacacttgttttggacttagtggggaaggggaagacacatattcatgctgatcttggttggctagtgaaataatttgtacctgaatctgagtcttaaatacaacttacagtagctctcctaatgtatacccccaagactttgacaaaagtttacattttcttgattcaaatataaatccagataagagcatgactgctttagaattaaagcaaaatttatttccatagtgtgataatgaatagtgcttcattttctcagacccatctcattcaacgttttgctcaaacaaatatttggacaataaatgtttacaaacactgacagtttttctttttcaggaacattttaaataaaaatattcaaaataggaatgatcagatgtcaactcctaagacagatagatatgtccactattgcttatacaaattttgtttctcagttacctagaagtttcaagttaatggtaagcactctggacagggactgatgatctaattccacactta

SEQ ID NO: 3853 - DNA, 1400 bp, mus musculus
agatgctccctggaacaccacacaattgacactccttaaaagacaggtgtgtactccgttattttaggagtctggctgtggctactggctactggcaagagtttattttatcttgattctatttagaggcagcctcatttattcttgatatggtgattttataacaaaaatctgacaattgaaaaaaatgtaagaagtagatacctcctgtttactgccacctgagttcaaaattcatcaacatgttcctgtctccatatttcattgttaagcaagcaaatccaattcaagaaaataaagtcacttctttgtaggaggtatgtagggggtggttttgatactaagatcctgttctccaattggttcttgatctgtcagtaaagaaaaccatgggccaattactgggcttaaggtacaggtggaacttctggatcccaggaggaaatgggggatacaagggactagaaaggaagtcaccatgctttgtagagaagagaatcaggcaaccatgtaaaatctgaaaagggggtagcccaacaggccatgcctacaggcaggtggtcaggggagtttagcaactgaagtttagggaaggtgagagaaaagaaattggtaagagcacttttccacttgggagatattaatacccagcaattgtgtcttaaggcaagaccataaggaataactgtgtgtctgtgtcttttatccgaggattcaagggaagctgaaagagagctgggagggggctggtagcatggtcatcccctggagctgaggatgggtagaatgtaaaactactcgcaacagggtggggagggtccacagtttgctgctgtctggatgtggtggtgtttctgtaattttaaaatcaggagacagacagtttgtggtcagcctggaagattggcttaaaaaaacaaacaaataaactaaaaattaatttggggatgtattctataatatatataattctttaaaattctttgttgctgaagtagtttatcataactaattagttaataatatctgtgttggtaatcaaactcagggattcatatatttgttctaaacctaaggtatattcctggacaaatcagttcttacacacatttttaagaaatttccatcttgaagtgggtgaggtgagtcttgagaaaatatttgtgatattattttgtttttattcccaccaattctgggactactaagagccaccactgagatgtccatctgatttacctctatggagatcagtttagtgtgctgtgacctgtcactgatacagggagttgctatactctcagtgacatttcatatcattctcaaaatctgagagggttaatggtagccttgaatgtctaacaaatagccaaatcaactggtaagagacttaggtgctg

SEQ ID NO: 3854 - DNA, 1000 bp, mus musculus
aataaaataaaataaaaatttgactgatgttgggaaaacatattttgggaagaagacagaaaaaaaaaaaaaaaagacaaccatgactgaaagtgttcggtcattcctgccattccacacacatgaatgcaggccagcatgtggagatccccagctcccgttacacacaagtaaacaaatacacacacacaaagacataaagacaaacagacacactgcactatatcagcaccctttctgatttttttccactttatgagtaataaaatccactgtatcatgactgcacatctacttattgcttcaactcaagacttcctcatagttaagctcactgtgaataaatctttggttgtctaatcaacctggaagttgcccttatctactagccatatgttctcatgtgagagcacacctgaaagtttattagaaactgccccacctggggatacatctcataaacaaccaccaaacccagacactattgcgggtgccaacaagagcttgctgataggagcctgatgtagctatctcctgagagactctgccagtgcctgactaatacagaagtggatgctcacagtcatcagttagacagagcacaggttccccaataaaggagctagaaaaaggacccaaggagctgaagggatttgcagccccctttgaactaatgtgaactaaccagtaacccctgggactaaaccaccagtcaaagaaaacacacagagggattcatagctctagctgcatatgtagcagaaggcctagtcgatcatcaatggaaggagaggctcttggtcctgtgaaggttctatgccccagtataggggaatgcttggggcaggaagcaggagttggtacactgggaagcagtgggaggaggagaggataggggatttttggaggggaaactaggaaaggggataacacttgaaatgtaaatgtagaaaacatctaattaaaaaaaaaaagaaaagaaaaaaaaaacacgtttatc

SEQ ID NO: 3855 - DNA, 1000 bp, mus musculus
gtgttatttcattttttttttttttgtatctactgaggatagctttacaacagactacatgatcaagtttgttgaaggttctgtgaggtgctgagaagacagtatattcttttgtatttacgtgaaatgttgtgtagacatctgttaagtcatttgatttgcgatatccgtaatttcattatttctctttttggcccctgtctcaacgacctgttcaatggtgagactgggatgttgaagtctcccactactaatatgtcaggcttgatgtgtgatttaaggtttaataatgattcttacatgaatgtgggtatccttgcatttggagaatagatgttcaaagttggtgcaccattttagtggatttttttcttcaatgactatggaatatgactccccatctcctttaataacattttcttaaaagtctatttcactaaatattagagtggtgactcaatttttgggaggtctatttgcttggacaacctttttctggatccctactctgaaataatatttatttttgtttctgaagtgctttccttctgtgcagcagaatggtggaccctgttttcagagcccttctcttagccagtgtcatttgaatagagaattgacttcattgatgttgagagatagggatgaccaatgattatttgttcctattattttcatgtggtggtggtggtggtggtggtggtggtggtgtgtgtgtgcacgagtgtgtgtgcatgtgtgtgtttgtgtgcgcgtgtgcgcacatggaaaggggggaaagtttttggtgatgtaatgctatttcctgtgtttgcttgggtgtagttagcctgcttgggtcatagttttccatctatcatcttttgtagggcagggttttagatagatatttttaaattaggttttatcatgaaatatcttgttttcttcatctatacggattgaatattttgctgcatatagtagtttggggaggtatctgtggtctcttaacgtctgc

SEQ ID NO: 3856 - DNA, 1200 bp, mus musculus
attctgttgctgatgctcgcatgtattgttcctgatttcattcctagggtttctatctccactgttgcctcagtttggcttttctttattgtgtctacttccttttttaggtctagtatggttttattcatttccatcatctgtttggatgtattttcctgtttttttttttttgttttgttttttttttgtttttgtttttgtttttgttttgtttttttgacttctacctgtttgttagtgttttcatgtttttctttaaggaaacatgtaactctttagcagtgttcttctgtatttctttaagtgagtattaaagtccttcttgatgtcctctaccattatcatgagatatgcttttaaatccgtgtctagctttttgggtgtgttggggtgcccaggactggctgaggtgggagtgctgggtttagatgatggtgagtggtcttggtttctgttagtaagagtcatatgtttgcttttcgccatctggtaatctctggagttagttgttatagttgtctctggttagagcttgttcctcttgtgattttgttagcttcttccagcagacctgcgagaatagctctctcctgagtttcagtggttagagcactctgcagtcaagctctactcttgcagggaaggtgcacagatatctgttgttcatacctgcctcctggcagaagatgaaggcccaaaacagtgcctgtcccagaagctgttagcttctgtagtccatactctcacttgcgcagactagtcttggtgggatcagggaaccaagattgctcccctaggtgctccaggtggacacctctcctctggtagggaagatacctggatgtttggagcctgaaacagggtctgcctcagaagctctgtggctcccgcctttcccagaagctgttagcttctgtagtccacaccctcacctgttcagactagtcttggtgggatctgggaaccaagatggctcctccaggtgctctggcaaagctctcctgggcggggtggacacctttcctctggcagggaaggtgcctgggtatctgaagccccaaatgaggtctgcctcagaagctgtgtggcttctgcctatcccagaaactgttagtttctgtaatacacactcttacctgcacagactagtctcagagggaccctggaacaaagatggctcccccaggtgctctggcc

SEQ ID NO: 3857 - DNA, 1000 bp, mus musculus
ttaggattgctgttttcattgcctgtttatcttatctctattttattagagtgaaacataaggccaatttcatgggtagtacattatgtaattggaacttaccaccacctcatccacaggtgaatgccattaacgtccttttcactgaagatagctttgctttgcctttcaaggtacctatacatttgttatttattatctatttaaatgagtgattctctatcacttatctagttcatctggagatctaacacaaaattatcttttaactctatcctatgcttatacatatacatcaaaaaagaagtaattggcaatactgctgagttaaaagaggagaatggcatatttactcttattggaaaatacttaatggtaatgattgtgcacatggaatttttacacattcctttttttttttggtattacacttcatttcgttggctcatagagttcagcagcagggctgtttaacagtgggctttccattgcacatggttgtttttagagatacatatgtgcaatggtgtactcagattagcataaagtgtacttttgttgaacctggccttaatcttaaaaccctagagatggaaagtagagttactcaaaactgaaaagcttagggctgttgactgtttcaattcacctgcagcaaatacaggaagtgggataccctgtttgctgagaaacactgtgccaagtatatagcatttaatggctttggcaagaagaatgattttcatcagctgtaacaaacaagttcctcatctctaaccctaccatctgtcctcctggttcccacccagaactctgtatatggctcaactgaacaggtttcagactgcctaaggtcactacacaatcaacctcagcagatggcatcgcagagaacatctaaactgtagcagtggccaagtacagaggctgatcctcttcgctgaagaagaatgccctttgcgcaaaccatcctgatgttccgattctactgaatgctgca

SEQ ID NO: 3858 - DNA, 1400 bp, mus musculus
aaccaagacaaaaaagaaaaacatagtatgtatttactgatatgtatatcttaaccaaaaagctcacagtgcctatgattcaacacacaaaccatatggaacttaggaggaagagcaaggtgtggatgctttagtagtgcattgagggagaaacagatgatcacaagtggtggaatgagggtggatctgggagggagagaggagggaaaggaaatagaggacagtattaagtactggaggagatgtgagagaggtacagagggtcaggaaatggaataaaaatatgtagcagtgggggaagaaggaggtaaggaactagtgatagctactgtagagtcccagatgccagggaaggaagaggttcccaggacccaacaggaattaccttggcaaaaaaagcacagagaaggggagatagaccctgtagagaccacctccagtagataagcatggcaccctggtagagggatggggccaaccacccatctaaaaattttcagcccagaaatgttcctgtccaaagggaagacagggacaaaaaatggaacagattctgaaggaagagccatctagggaccaccccactgtggaatccttcctgtctgcagacaccaaacacactgttgctattgacctgaggtgcttgctgacaggaacctggtgttgatgttccttgtaaggttttgctagcaagtgaccaatgtagatgtggatgctcaaagctaaccatcagactgagctcagagaccctgggggggggggagctagaggaatgacttgaggagcgcagggggattgcaaccccataggaagaaaaatgttgggtggacagaccacccagtgctcccagggagtagagtaccaaccaaggaatgtatagggagagatctacggctccaaaatcgtatgtggcagaagatatgatttttgccttgtctgacatcaatgggaggagaagtccttggacttgtggggagtttgttgccctaactaagggggatgctggagtgggtgggccaaagaggatgggtggatgggtaaacagcctcactgacataaagaggatgggggagatgaagaatgtgggatggagcatttgtgcaggcctgagcaggaagtaggatcatttgatatgcaaataaatagagtgattgaaaaaaatcaaagaataaattcataaaaaagaaaaaagaaaatgaagtatttgtctataacctaaaataggagagagaaagacagagagaaagagagaggggggggggaagaaagaaagaaagaaagaaagaaagaaagaaagaaagagagaaagaaagaaagaaagaaagaaaggagggagatagggaaggagggagggtgggagggagggacggagggaaggacggagggagggagggaggaag

SEQ ID NO: 3859 - DNA, 1600 bp, mus musculus
tacaattctttaaggggtttttgtgttttctctttaaggtcttctacctgtttagctgtgttctcctgtatttctttaagtgagttatttaagtccttcttgatgtcctctaccatcatcatgagatgtgcttttaaatccaggtctagcttttcaggtgtgttggggttccctggactgggcgaagtgggagtgctgggttctgatgatggtgagtgatcttggtttctgtaagtaagattcttacgtttacctttcaccatctggtaatctctggtgttatagttgtctctgtttagagattgttatagattgttaaacaactctgtttagagttgttatagttgtctctgtttagagattgttcctctggtgattttgttaccctctatcagcagacctgggagactagctctctcctctgagtttcagtggtcagagcagtctctgcaggcaagctctcctctttcagggacggtgtacagttatatggcgattggacctcctcctggccaaagatgaaggcccaaaagaggatctttcccagaacctgtgtcgctttggcctgtcacagaagccgttgtttcagtagtccacactctcacctgtgtagactactttccgaggattcctgaaaccaagatgtatcccgtggatcctgaggcaaaggcctcccagaggcttgtcctctggccaagaaggtggccagatgtctggagcccaaaaacggcaccgccccagaagctctgtggctctcacgtgtcccagaagctgctagcctctgtagtccacactctcacctgtgcagactgccctccgaggggtcccggaaccaaggtggcttctgcggaacctgatgcaaaagcctcccgggccaggtggacacctgtcctatggccccgaaggtggtcggatgtctggagccgaaaatggctccacctcataagctctgtggctcttgcctgtcccagaagctgctagcctctgtagtccacactctcacctgtgcagactgccctctgcggagtcccagaaccatggtggcttccgcggaacctgaggcagaagcctcctaggccgtgcggacacctgtcctctcttctttcaattttttattgatttatttcttttacgttctagtcattgcccccacctctcggtccccgctcccatagttcttcaccccatttatcctcacccttgcgtccaaaaaagtgcttccctgctccagaccttccccctccctaaggtctcaagttttaaactttaatgctgattggaagaaagtatctccagatttctgtggcaatgatccaccacaacttttcatgcctctgtctattagtgttgttgctttctgcaatgtcttttaatgagcttttttaaaataacaaccaataacccattttaccaccaatgttctaaactatttcaatcttgtaacttataaaaactctttactactctaaagtagagagatacaatttattcatcacagaagatttgtgcttaatgtgtataattaaagatgaaactcttcggtaggcataaaatgcatgggtagaactaccaaaacaaaattcattattatatagaagta

SEQ ID NO: 3860 - DNA, 1400 bp, mus musculus
tcctgaaacactgaaatgaagtattgaggatatttgatgggtcaatttaactaaaaacgttaatagtttgttgttgtttgtttgtttttgtttttttaaaaatattccttctttttatttaatatctctctttttttttttacactccagattttatttccctcctggtccaccctttgactgttccacattccatacttcctgtatgccccaccctgtctctacgagtatgtccctaccctccatcccccacccctttagacctctaaattcccctggacctcttgtctcttgagggttaggtgcatcttctctgtctgaactcagactcagcagtcctttgttgtatatgtgttggggggcctcatatcagctggtgtatgctgcctgcttggtggtccattgtctgagagatctcaggggtccaggttatttgagactggtggttctcatatagggtcactctcctcagcttcttccagcttttccctaattcaaccactggggccagcagcttgtgttcattggttgggtgcagctgcttgatgggtcttttgtagggcagtgaacacaccctagctcagtaatagtgtcaggccttggggcctctctttgagctggatctcactttgggcctgttgctggacctttttttcctcaggttcttctccatttttgtccctgaagttctttcagacagggaccgctatgggtcagagttgtgactgtgggatggcaacctcatccttcacttgatgccctgtctttctgttggaagtgggctctacaagttccctctccctactgtcagacatttcatctaaggtccttccctttgagtcccgatattctttcacctcccaggtctctggtgcattctgcagggtcctcccaacctcctacttcccaagtttgctcgttgatttttagttaaaatggttccagggattttgagtcaagaaaagagagtgtgtttcctccagggaattaatgtctatcttcctactagttaaggacaaggaagacttgcacactcaatttacagtctccacagtactccatctctcaattgcctgttgtcttcctagccatgtaatactctcccctcctctttgattatgcaagtagaagctttgtagaaaagaataccccttcagatactattaaaatatttcagaaagaaatacaattagctaagcacttacattttattagtaatatcaagcaaaattaataagtaaattcaagtaaaatggttatgtgtcaaagtctatagtttttgcattgacatttcacataatctgactttgcttagaagagaaatcactcggctgttaaaattacttctaaaaagctgtcaaaattagaaaacctgctgtcaaaaatatgatgagaaaagt

SEQ ID NO: 3861 - DNA, 1400 bp, mus musculus
tcagaatggctaagtccaggaacctcaggtgacagcacatgttggcaaggatgtggagaaagaggaacactcttccatttctggtgggattgcaaactggtacaaccactctggaaatcaatatgttggtttctgagaaaattggaaattattctacctgatgtcccagttataccactcttggccatatacccaaaagatatctcaccataccacaagaatacattctccaccttattacaaataaacagccttattgcatataaggctggaaacagcctacctgttcctcacctgaagaatggatacagaaaatgcagttcatttacaccacagaatactattcagctattaagaatgagggcattatgagttttacagacaaatggatagaactagaaaatatcatcctgagtgaggtaactcagacccaaaatggcatgtattgtactcactaataagtgggtattagtcaaaatactaccagtatttttcccatctgaataaaactacagggacaaaagatggagtagagactaagggaaaggagggccagtgactagctcaaattgggatccatctcaaggagaggttccaaggcctgacactattactgatggtgcctatagacaagagcccaccaattctgtcctccgagagctgcaacaagcagctgactgagactcgtgaagacatttacacccaaccaatggacagaagccggggagtcctgtggttgatttcaggaaaggctggaagaagctgaggcagagggctgccccttaggagacaagcagtctcaactaacctgaacaccagagaactctgttattgagccaccgaccaggcagcatacactagctgatccaaggccctgacacacatacagcagaggactgcctgatctggcctcagagagagaagatgcacataacccttgagagacctgaggctccaaagagtgggaagatctggagggttgtggggcagctggggcgtggggagagacatctttttggagacaggggagaggaagaattggatgaggaactgtgaggaattggttggaccgggctggggctatttactggactgtaatttaaaagaaaaagaatcacatgtagggaagagataattattagaagtagttttgttatttaatgaacagctaataaaaatatctattaaatctaatcacatcaaacatctttgttcctggtataacataaataattatctatgatagtgcttactttagaaaaataattgccaaaagatgacttacaatgatgaatcattcttaaaattggaagcttaaggatatttttttaaaaaaaatcatattaacaaaataccagaaggaagcattcatccaattaatttcctgtgtcattgtaagt

SEQ ID NO: 3862 - DNA, 1200 bp, mus musculus
gttctctggaagagaaggagtataacacactgcttctctatctacgcagctctgatgccttcatcatctccaaatttctaatactgtttaaatgaagtgtagtgatgatgtgtgtggtggattttgtttgttgtttttaatgatcagatagaaactaggtaagtctttttggaatgtttagaatgttgtcatttcttctcctttaatcttatcttaccagtatttttgtgaaaatatacttactgtaagggaaatcttatttaaagggagtgttacagagtccaaaattcttaacattgagcagcatgtttttgccatgtgtacagattttaagctaaaaacaaaacaaaaaataagttcctttgtgttttagtgacacctgccaaacaggaaaacttctgagtctcccctccacccctcccattcctgccaattttccaacacaccaaggtcttcaggcaggctctgctcacaaaccatatccagaagagaagccatactctgacatgatgttcaaagccttttgacaaacttctctaagcctcccaccaccactttcctgagttaattgtgtgcaggctccttcacacccccagcagaaactccctctgagttgtattcttagcaaatccccatatgcatcctgatgctttgagcacttcactgcgtcatccatacttttttggtttgggttcattcttggcttctccagtccactttaccttttacctgctgttccatgggctaggaatttccccccacccccgctcctgtcagcctcttggatagatgccaaggtgctgactcacagtgggcaggcactctgatggaaaactccttttcatggaaattttgaatccttttaaatgtgttttaatttcaaactttgttggatggctgagaatgtattactttttctcctgcttcgcagtattcttctaggtcaaaagaaaattgttttttaaattatgattaacatgaaaaaagaagtgtaccttagttacatgaaagtatcaagaaatttgtagacctcatgatgatgcacatgtttatctaattacatcctgtcatgtgaggtcatgaaagtccagtgctgaggtccaatgatatcaaaaggcagaacttaaataacctgtgctaacaatatgttttcatggatttgtgtcactttacaaatatctttaaattgtaatttttcct

SEQ ID NO: 3863 - DNA, 1000 bp, mus musculus
aagaaaaatcagtggaactttaaatcactgcactatgagacataagcaagaaccagaaacccaaatgttacattttctctctcgtgttgaacccaggatgcatctgtactcacattgatgacatgagtacagaagaggaatatttgaaaaaggactatgggtagaaacaagggcagacgttcccctggaaaagcacatagctcttctattgtctatggatcaaaaactatagtggctgaagaacactgaattaaagcttgatcctgtgaaactgtcccctttaagattccagtgcaaacaattgtatttaccaccaagtacaggctactaattcaggaggtcttacttttgagattactatacattattttttttcatttttattagatactttctttatttacattttaaatgttgtcctctttcctagtttcacttctaaccctccaccaatcccatcccctttccccctgcttatcaacccacccactcccacttccctgtcctgtcattcccctacactggagcatagagccttcacaggacctctcctcccattcatgtccaacaagaccatcctctgctactatgcagctggagccatgggtccctccatgtgtactctttagatggttgtttagtccctgggagttctggtggtactggttggttcatattgttcttcctatggggctgcaaaccacttcagctccttgggttctttctcttgctcctccattggggaccctgtgctcagtccaatggttggctgtgagcatccactatactttataataatctataactatgacatgtagcaaaaatccacagtaaagttaaaatacaacatcaccacatcccaaccaccaaaaagtgatatccaaaaaacatgacaagaataggcagcatttctcacacaaaactgaaaccttaagaacacttagagcattggacaaatcaatgacaagagtacatacaactccttttttataaagtgctc

SEQ ID NO: 3864 - DNA, 1200 bp, mus musculus
tgtgttttcctgtatttctttaaaggatttgtttcctctttaaggacttctacctgtttacctgtgttttcctgtatttctttcagtgagttatgtatatcctccttaaaggaccctattatcttcatgagatagaattttaggacagattcttgattttcaggtgtgttggtgtattcagagcttgctatggtgggagaactgggttctgatgatgcccacatatattgacttctgttgcttatggtcttgtgcttgcctttcaccatctagtcatccctggtatttgctggtctggtgactctgtctggagtctgcctcttttgtccctgggttgcttcaggtctcctggtacgccggtgaccctgactgcagcagacttcctgtggggccttccaactggggggtgggggggaggttcagaggggcagagaagctgctgatctgttgccctggctgcagtagatatctgggaggtcaacctgttgtcttgtgtaaagctgttctccagagggtcctatagactatggtttctgtttccctgtgtgcagtagggagactttccatctgttgggtcagttaccctatatgccacagagtccccaggaggtcttgagactgtggtgttggttgcccacttgctctgtgcatggaggaactcctaggatgccttcaagctatggtgtcttcagggaagcatacaagctggtgatcagttgctaagtttctcagttgaccagtatgcagcagatctcctgggatgcctcaaactgtagtgtcagttacctggagtgcagtggatctcctaggatgtctctggctgtggtgtcagattctcaaatgctctgagtgtagtggatcttctgggatgtcttaggatatggtgtcttctggggagcagacaagctagcagtctgtcctagcagaaaggacttggcagaaggggagtgggcaagggtttgcggtaatgatgggtccctgtgtcaactgggttccagcagcagctgtgggacttcaagaggattcttagcaaattctctaagttcagtggatcttctgagatgtctcaagatatgctgtcttctggggagcaaactagctagcagtctgtcccagaagaaaagactgggttgaaggcagcttatattatgtttcactgtgcacagggattaagttcaccatcacaggaaagttttcacc

SEQ ID NO: 3865 - DNA, 1000 bp, mus musculus
cgccatagattgctaacttgttcacacacgaacctatcctctgagaagaagcctggctccagtagattcactgtggccatttgcaaaccagcacagctggagaaaatcccctaagtctgtcctccatataaccctgtgcttgcacagtggtgggcagcaaggagggggagccaagtgatgaaaatgtcaataactcttccaattgcaaaatcataatctttacaataataatacccagttagtggagctttgagaaaactaatatttccataatatttttgtgagctttagtcaaatagtaaaactagtatggaaaatcaacctatgaaaatatataaatattcaaggcccttgtcagtggccagagtccttctatgtcattctgaaaagccctcccataaaggcctaagtgatgttgcttctacatgattctgttgagtccttgccttgctaacacataaatttcttggcaccatttgctctcacaaactaagctcatcctacatttaccaaacaaaacaaaacttgaagccatgcctgttgcttttgcagctggcatgaagtttttcttccttgtgcttttcggtttgtggtatatttagtcattgcttgaatgtctttgtcaaagcttgacattctgtgtgatatcttttctagccgaaaacacaaatctaggcttgatttgagaattaatcagattgaggtgtaatcagattgaactgataatgaacagcagaaaaaaatgaagtgaccttggacattggtcagctttttttttttaagtcaaataaccttccaactaaggaaaccttaaatgtgtgaaagtaaaggcttaaaggaataagcaaagacctctgatggtgtctagagaccttataaaccatttatgtcccaccctaccccctgccctgctgcttagcctctctcccaaatccagtatgaaaaacagcagctggttgctgaactacatgttctcaattgggaatgaaggcatctggct

SEQ ID NO: 3866 - DNA, 1000 bp, mus musculus
tctctctctctctctttctctgtgtgtgtgtgttccagcatgtagtctgctttagagaagcttctatgtgcatctgcacatagatgacaaaagtggactcagaagcttgtacttatacgtacatttgtgtacacataacaataataataaaaaaggagctaccactgtgaggctagaagaggcatgggatgtgtcttacatagggtttctcttgctgtaatgaaacatcatgcccaaaagccggctggaaaggaaggggtttatttgacttaaaataaaatttcccatcacagtttattatcaaaggaagtcaggacaggaactcaaacagggcaggaacctggaggcaggagctgatgcagaggccatggaggggcactgcttactggcttgctcctcctggcttgttcagcctgctttcttacagaacccaactggtcgcttgcctgtcaaccactaattaagaaactgtcctacagctggattctgtcgagatgttttttctcaattaaggttccctcccttcagataactatggctgtgtgtcaagttgacataagactagccagcaaggaggggtttgaggaagagcaggtatgaggggctggctaaagggggaagggaagtgatgcaattaattctatttcaattcaaactacatttacagggtaatcaaattccatatatatcaaaagaaaaaataggaccaagctcttatgtgacattctctctccttcttctctttgctccaacattggtttctaggtgtaaaaaagtcacagaataaggataacagcttgtttttttggctaagtatgtgcctcttctatgtggatacagagaaggtctatttgtactgggcagttaggttagctctgcaaccttcagagttgacgttaaaaccctttcctactctgctcctgggaagctgtgtgtgggcagtctcctcagcagctcaagattgcatctgttgagccagtgcaacatttatgttgctatg

SEQ ID NO: 3867 - DNA, 1000 bp, mus musculus
ccagatatttaacttccatcgtaaccagagcactgcacccagtatttgtgtcagtacacacctggggtgtattagagctggaactctgcttttgtgctctagttagcacatacttcctagaggagtgagggatgcttcactcactgttgacatccagtcaacactgaatgactgactgactgactggctgactgactgactgaatatttgcctttgtgcaaacatggaaaaagaagggaaaaaataggaccattgttgagctctatcccgggctggctattaatcacaggaagtgagtgccaccaggtgtcagacctctcaccatcctcagagatgctctctcaggctctaggagttagctgtggggagaccacaacagaatgatttcgcttctgcccgctgataatggaacaagtgcttcagagtgaaataacactgggcacctcaagtcaattccttcttacacaagtagcctcagaagcatgagcactggagtgaggtggttgtagttgccacggagaccaggatagcaacaagaggccagggttgggaggccagacttgtgtaattgtgccagtggttaataggactttttttttttttataaaaaagatatatgcatatatgtatgtatgtatttaatctgcatacacacccgcatgccagaagaaggcatcagatcccattacagatgattgtgagccaccatgtgattgctgagaactgaactcaggacctctaaaagagcagccagtgctcctaacccctgagttatctcttcagcccaacaggaatattttttaaagaatttattttcatttcatgtgcatttatgttttgcctgcatgtatgtctgagtaagagtgtcagattccctagaactggagtcagacaatcgtgagctaccatgctggtgctgggaattgaacctgggtccattcggaagagcagctggggctcttaaccactaagccccatattaggaggaatcttaatgcca

SEQ ID NO: 3868 - DNA, 1600 bp, mus musculus
acgctaagaatcattaactgttcaatataggacaaagagaacaacaatgtgaacaaagatattctgagtaagggtagctctaatgtcctcagtgtttgtctgccttcagagttacttttgtattttgtccaagtgcagagtggtttgcagtcgtattcctaaatcagacctttgagaaatggtatattcaattgttgtatgcagattattttagttttagttgtgcacaaaaagcttaatgacaatcctccattggctcatacacaaaatggaaatgaggagcaggagtttgaagatggaatctctttggaaatcctgcattttaagcagatgttctcttacagcctcctgtcaatgaatgccttgaaatagaagctcttggtttatgtacttttccaaggcaatcaatagttctttcttcccataaatagtaaaattggttattaggaagtgtaggcacacttgtcctcataaaagggaaatgggttgagcttgttgcactaatgatttaatcagcaacagcaacagcaaataacccttattaaacttaatacagcaggccctgcagcctgcgtgacattccttcttcctgacagaaccacttgttcagccttcatagctatcttctctcatgtggtgtcattctagggaggtgaatcaccttcctccgccaggcagtgaatcatggttggtctatcaaacagacaaaaccattcctttgccatgaccaactgtaattggtttgagcccgaccagctgccatacactcatctggtcagtgaactctggagagcagtctctacgatgctctggaaagatttcctttctagtagaagacaaataagaagaaagggctccctgcaaactctaggtgctttctttggagagggtgtgaagctgctgcctgcagctgctccctgtagctgttactgtcacctgagctggattaagaagttgcactcaccccatgccaagggtggcagaagggacgggtgattctttttttttttttccattttttattaggtatttagctcatttacatttccaatgctataccaaaagtcccccatacccacccacccccactcccctacccacccactccccctttttggccctggcgttctcctgtactggggcatataaagtttgcgtgtccaatgggcctctctttccagtgatggccgactaggccatcttttgatacatatgcagctagggtcaagagctccggggtactggttagttcataatgttgttccacctatagggttgcagatccctttagctccttgggtactttctctagctcctccattgggagccctgtgatccatccattagctgactgtgagcatccacttctgtgtttgctaggccccggcatagtctcacaagagacagctacatctgggtcctttcgataaaatcttgctagtatatgcgatggtatcagcgtttggatgctgattatggggtggatccctggatatggcagtctctacatggtccatcctttcatctcagctccaaactttgtctctgtaactccttccatggatgttttgatcccaattctaaggaggggcatagtgtc

SEQ ID NO: 3869 - DNA, 1400 bp, mus musculus
tcatgattaaaaaaaatgggaaagaagtatagagtgaggactgacattttgcattaaggatgttgtttaacaaattttcacaagctggccctgacttgcagaaatgaaatgaaactggcataattatccacctaaaaactacccacccccatcttataaacagaaccactgttcttttcaggagcactcagtaatgtcattgaaaagtaccaatagccccgtagaactagttttagggagtcaggtccctgagggctctgtatttaatggaattaagtctatgttgatggcacaaggggtaggagggtgtaacaatgaatttatagtttccccactccactttgtgccatggtgaacacatatgtcaacatgggaatctttccagggagcaaggaggagtcattcaaaattagcaggaaagggtgttttcacctcgtcaatcaagtttgggaagcattttgttaatgacacatttttctccctcataaaataatgacatgctgacaaaatagctttttttctttttataagtactacaaaattctgcatttttaaataacttggtaagacatagtatttcaaactgtatagtcatcaaaagtaggttttagaaatgcacacgttcgggtggcatctccagtgtcctgcctgtgccttctgtgtcagggctgctttagcatctatgttttcttcaagatcattcacatctttctaacattaactttccccctttccccttgggtaccttctctccctgttttgctgtgtttgtttgtttgttcgttcatttttcagagaccttttaaggcttggcctctggctgtggatgagcaggttcagcctacagcatgactttccccatgactcccctttcaccttggttttatttctttcagcatcctctttggtttttctccgcagggtggaggatgtagggacgagtgcagtgatgctttggtggtttctgttagtcccatggttggtcttcaggccgcttcttctgcaaggcattaatattatctacctgggacctagaatgtggctgtggtttttatgttatcaatgaagacacatgctccctgcttagcaaagtatgccaaacaataacacaaccttttagcatacagctaaatgtatataacattttaaaaatactcatattgtggtaaaatatatgcattttaccatgatatgagtttctgtcttgaccatttaggtcaattacatcattcattgcactcaccgttctgtacaatcactttgtttacttaaaatgtaagcaataaattctcattctgctctcctacctccttttgtctgtgactgcaaatgcaattgcctgtatctgtatatttcctctgaatagatgaacttgtatttaccattctgactctgcctca

SEQ ID NO: 3870 - DNA, 1000 bp, mus musculus
ccaccagtcacactcttcctccctatcacttttgtgtctttctgtgttttgtttttgccttgtgactcaatggctttaaccagggccacttgggtggggacaggcgtgaagctgttcactagaacttgagtaactaaccagcggttatgtcactgggtgtgacccatgagccctttccccatctatgactgaatgtttactggctcattctagtgtcctatgcgggcaaccccagtaatcaagaactagtgagcgccatgaccaggtaatgtgcattagacagttgtctcagttagggttttattgccacagcaactcttataagggaaaacagttaaatggggccagcttagatagtccaaagggttagttcattattgtcatggcaggaaaacatgggacatagggccagacatggtgctggagaaggtgctgagagttctacctcttgacctgtaggtagcagaaagagaagaccacaataggtgtgtcttaatcatggtttctattcctgcataaacatcatgaccaagaagcagttggagaggaaagggtttattctgcttacacttctatactgctgttcatcaccaaggaagtcaagcaggtcaggaagctggagctgatgcagaggccatggagggatgttctttactggctggcttcccctggcttgctcagcctgctctcttatagaacccaagcctatcatcccagagatggtcccacccacaaggggcctttcccccttgatcactaattgagaaaatgccccacagatggatctcatggaggcatttcctcaactgaagctcctttctctgtgataactccagcctgtgtcaagttgacacacaaaaccagccagtacaaggtgtaatttggttttttggttttttggtttttcgagacaaggtttctctgtgtagccctggctgtcctggaactcactttgtaaaccaggctggcctcgaactcagaaatctgcctgcctctgcct

SEQ ID NO: 3871 - DNA, 1600 bp, mus musculus
tgcttgacacaaatatgctatttgtccttcttcatatgccctaagactaattatgacccctttaattgaaggtgacaggttttgtagatgggaaaaagatgtgtgtgtttgtgtgtgtgtgtgtgtgtgtgtgtgtgtgtgtgtgtgtgtatttaatgagccaacttaccttgtcacaaattcacagtcatttttctagatgtaagacttaaggattatgcctctggttaataaataataatgtaacgaaaaggagaagggaagaaaagctctatttacatacatacactatttgtctttctttgagatggtaatagattattgttatcaacaagacctcagataacattctaatgacttctatttctgtttacaatggaacattcctagcagaaaagaactgtcttttttctgccctattccatccccattcaggcccctacccatggctggctgggtggagacgctggcttcctgtcatctcacctgagcccgggaagacacagaatggaattctatgcagccctctgtgggcccccgttcctactgtctaccactgctttttggtttctcttaaattataacagttgaccgactaacaggttcccagaaacaggttcagatattggcaggcaaacccaacctctttgtccttccaaagtacataagtgctaaactgtgctccggctgagagagttagtgttccagcaaggctaaaacccgagtctcctgctccccagcagcttgctgccatctctcccccaagggatagtgtgtgaggacgcccttggcatcatttcttcggcccggattaagcacaggtgactgagagtcggccttatcttcacaaggcattagtcactctataaaagttaaatttattatgaaacgtcttgtttgtcttagcatatatcttctctgggaagttggaaacaaaggcatgtcctctaaggctcctcagggggcaagcacatcctcctttggaatttaaccttaatttgaaccaagatctgtgaaagaaaagcactttggtgtattgttccggagcgccacccttctctccccttatctaaatgcagctacttttgttttgtgggttttagacttctcctccttctccttctccttctccttctccttctccttctccttctccttctccttctccttctcctcctcctcctcctcctcctcctcctcctcctcctcctcctccttctttttgaattctcccaattccaaagcacagtgctctctctgagtttaaaatttatccttaaaaagaagtcaagacaattgtaaaattatactttggaagtgagtcattttatgtagccttaattctgatgttctcaaagttgtatccatttttgaacactttttttcatttttccttctcatatgttattttaaggcccactctgctttaggagtcgggcaaacagcacagtggcggatgctttcctagcattcacatgccctgggttggtcctcagcacaggaaaaaaaaaaaaaaaaaaaaggaaaaagatgtaatgttcttatttctccaaaatatactttctaaaagtcttttgtaaaatgtaaaaatgttcttatt

SEQ ID NO: 3872 - DNA, 1000 bp, mus musculus
agttgaccttggggtcgtgagagtgggtgagctggccctggccctcaccagctgcagcaccagggatagcagatcctgcgacttgcctgggcagcatagtagaactggccctggtgaagggggcatggtgatcgggccccgagggtgagagcattgtaaagctggccctgccacttgtctgatgtggggtggcatgggtgcaggggtgatgcatcccttgcctcctgtgatattcaggaaagctggcttcctgggcctgagagcaggagtacttgggaaagtggcctcgcacctcgcctgggcaacacagcagagctggctggccctgatggtgaaggcatgtgtgagcttgctcagagacaagctggtccagccccttacaagactcagcatttgggaacaagaacccctgggccttaactgaccagcacagtagagggggttctaaagacagaagtgtgtgtgagtcagccctagggcatgaagagtgggagagctgactccgcgtcctgtcagagctgcactgggtgaccttaccagagcagtgctggagagcttgccacggtggtgcagacggtcaagggagagctggtgaggtaaccagctcagcgaccacctagtctctgattcaggactgtgaattggtccactccaaaatgtcctgcgatcccaagcagatctctatgacacagatccacaacaggatagataacctggagaatccaatattgatggtattacagaagccagagatcttgaaacagaccaatgactttgcaatgatcttttgcaaatgaagatgtgtggacagaggaatacactgtgtgatacactgtgacatactacagcatttccatgatgagatgttttctatgctttgctctctctctctctctctctctctctctctctctctctctctctctctctctctctgtgtgtgtgtgtgtgtgtgtgtgtgtgtgtgtgtgtgtgtgtttgggaggggggaaggctgaaa

SEQ ID NO: 3873 - DNA, 1000 bp, mus musculus
gggatctgcaaccctataggtggaacaacattatgatctaaccagtaccccccagagcttgtgtctctagctgcatatgtatcagaagatggcctagtcggccatcagtggaaagagaggcccattggtcatgcaaactttatatgccccagtacaggggaatgccagggccaagaagtgggagtgggtgggtgggggagtgggtgggggagcatgtgggggacttttgggatagcattggaaatgtaaacgaaataaatacctaattaaaaaaaaacaagacaaaaaaaacaaaaaacaaaagcaaaacatttagctgcttttcctcactaattagcaatctcaggttgccatcttgggttaccccactcagacaccattacttgtcagtccagtgcccattacactgtaacttctctaccaaatcttcaccctcactggcccatcactggagaacttaaacaccatttcctaatttgacaatgacaccacttcctctatgacctcaggacctaagagtgactgactgggagacagccctttggagcactcgccaatgtctgcttctattgcaccaatgcaaattttccccactcttgctggttagaattttattttaggagctattatgtttttatggttttcatctgaagatgcctacaagtgacatccagtcttccagcagctgaatcctttgagctcagattgcagacttgagaaacaccgtcatctattaaaagaagccaagtctttgtacagaaatgctaactcaagatccgggacagcataggtacataatgagcctgaaatgccctgtagtgtccgatgcaaggaaatcatcaaacaacccaaaggcaggagaaaggaacctacagcgatggttctcaacctgtgggtcgcaactaaatagactgcatgttacatatttacattataattcatagctgtagagttatgaattcaaaattagagttatgaagtagcaacaaaataattttat

SEQ ID NO: 3874 - DNA, 1000 bp, mus musculus
tatttaaaataccctgggtaaaacagtgaagctggttatggtggcagggatatgggtgagtgaagtggccctgaggaacttgagaactgacccctctcctcatctgctttgtagtggaggctgtgagggagagattccccccccccccacctgctgacagatgacagaatgcttgagaggaagaggattaactggctctacccctcaccagctacagtactcaggagactcaccagcacttcacacttccactgggcagcacagtagaactggccctggtggcatgggcacaggtgagccagccccaatggcatgagaacaagagaggtggctccatcccttgctggatgcagcatggggctgagctagccagggcagtgtttatagctggtacagtggatgtgagagagctgggggctaaccaactcaggcccagattcatggctctgagttggcccactccaatatgtaccccatctatgaactggagtgtgtgaagatccaaagctgcaggatctcgatggcacaggacaacacagaatatctgaaaggactccaatgaggagcaggtgttagtagtataacagaagccagaagctttgaaccagaccaatggctcatgacaatgaacatttgcaagtaaagacatgtgatcaaagagatataccatgacagactgtgacacattgcagcttccacaataagatttttatttttatcttatttatttatttatattttcttttagggttggtggttgcaaggatggatggtggatatgaagggatggggagatgaatggcgttggggtgcatgatgtgaaatttacagagaatcattaaaatgtttaaatattagagatgaaaagagagatattgcaagtaatactacagaaattcagatcattaggggttactttggaagactaaatgctaataaattggtaaaaacctaaaagaaatgggtggacttttgaacacaatctttccaattgaatcaa

SEQ ID NO: 3875 - DNA, 1000 bp, mus musculus
tcattgttctattgctgtgacaagataccaggacaaaaagcaagcatgcaggaaggatatattgtggcttacaagtccatacccatagtctatcaccaaaggaatttaagcagaaactgaaggaaaggcccttcagagactgcctcacctagggatccatctcatctgctgataccaaacccagacacctttgctgctgccaagaagtgcttactgataggagccctgtatagctgtcacctgagaggttttgccagagccaggccaatacagatgcgtatgtacacagccaaacattggtcggagctggggtaccccaatggggaagttagaacaaagactgtaggagctgaaggggtttgcaacttcatgggaagaacaataatatcaaccaaccagaatccacaagctcttagggactaaaccaccaaccaaggaggacacagggtgctaccaatggctctaactagatatacagcagtggattgccttatttggcatcactgagagggacgccccttttatgttatcaaatttttcattttgggagacattagccaatggcttatgtaagtaataatgtcttgtggctgttctgtatcacttaggctaagctattgtgatatgaggatgaattctgcttccccagtatggtagtattattattttaaggccaggaggaatagaactggcagcatgtatattcttatatgaagcaccgcttcttttaggcttctgggtataatttctcaagaggacaggcactactgaagcatgtgatgcatatgccagcctctcgggataatggcagtagaaaagtgagacagaagatggggttctttccttttaatttcattttcttcaaaatgctttattaatttctgttatcaattggaaacttcatattctacaacaattccttatgaatctctttgaaatcctcatagtaaatttttaaaaaatagtattctacttctctattaccaattccattcatcat

SEQ ID NO: 3876 - DNA, 1200 bp, mus musculus
ctaaacctgatctacactctgtatgttgttgaaacatttacaggagactatttcatatcctgaaaaatcctgtcaatatctaaactcagtgttcaaaaataaaatcttcttggtacaaggcatgttcatcctcctgtatgccattccttttagcagtttcctcactaggaagtcaaaggcgaggcactgtaacagaccagaggtattgcaaaaccttaaatacttgctgatttcttttatttattattctatttatctgctttccaaatgctgctccctcccagtcctccatcacagagctcttcccctatcttccctctacttcacctctgagaggatgtctccccttggtatctccccatcctgtcgcatcaagtctcaatcaaccctcttctactgaggccagacaaggcagcctctgctacatatatgctggcagtagccttacaccagcccttgtgtgttttacaaggatggatcagtttctaggtcttggttagttgacaatgttggtttttctatgaggttgccatccacttgctgatttttttttttatacttatactgacccttgacctagtaaataaaatggtgttctctgtgggtttcaccaggcattgtatccatcacaggaaaagaagttggtctggctttagatatatttcctcaagcatcctatttcagattcatgcacatccattgtgtagcctgaatgctgacaaggacctgtgctaactaagtgacaatattagcactgtgttctctgctaggtcttgctgaatgcccttttcagttttctgagcctgcttagagatgccctgctttccgtgagactcctgggaattatctgaggctgttcattttgtgttgctgtgacactatcatgaactgagtaagtattaagaaaaatagagttgttttgactcaaagttctaaaggtcaaagcttaatttctgttgatggccttttgacatgtgatagagagaaatgagtgtgtgtgtgtgtgtgtgtgtgtgtgtgtgtgtgtgtgtgtttgtattcatgtctgtttcttaaagagccaccaattttcagtcattgggtccttcttgacagaattatttaaccctgatcatttcctgaagctctaccataaacaccatagctgaataaattaagttaccatgccgctactaccttacaatgtcagttaaactttaa

SEQ ID NO: 3877 - DNA, 1000 bp, mus musculus
ctgagctctgacttgctgaaagctgatgtggactaattgtgctgggatggttgctctctgtatttcagctggatctactatcaggtacgtctgataagtgcctcattgcccaagcattttctcgcctttcagccttcctgcatccttaagacagcatcatcttaatgtcagctggaagtagttgcagaagataattcaccattgattgtcccacctaaacaggccaaaatgctaactcaaaaagacaccccctggcatagaacctataatgccaactcacgtcctattctctttttgataatctattttcacttaaaagccagatgaaatcatggagaatcttttgaaatttgacatcattataatttgaagcagaaaatgagtagaaaatgatttctcactatctagagcaaaaacatccaattataagagagttagatcatgtaaaacaggaaaaaattgtttagtatgccacttaaaatatgattttaaaatgtcaatcctttcattaataaagcatcaagctacttcttcttgtgtgacacagtccacttgcctgacttgcctcaaggagagaacatgagttacttggctctgtgctacagtcaaggacctagattcttttctttgtaaatgaggcttgtgccaagttcacatgaattaaagcatggctctctgttgatctgagtcttcttctctgggaatgaattagaggaaaagcttgtgctgggaatacgctcaccattgtttgcaagtctggcccagcagcatgtcccatggtccaatcacagaccttatttggagtcttatgggtcaagcatgtgcctctcatagtctatcatgtgcctttcgtgaggctatcatatgccttttgtgggcctatcttgtgccactcatgggcctcttaagaggcctcacgcttgtggctaatgcacctctcacagcctctctcatgaatctcatatgcctctcatagcctctcacaggcttctcagaagcc

SEQ ID NO: 3878 - DNA, 1400 bp, mus musculus
agtgctggcttatgtctccagtcaaaacaggacatccattttttttaaaaggacagaacagcttcagcatgagaggacagaattatgttagcagatcttaatgcttcagttcattctagttaataattgtgagaggaaaagcagttccatagcagccttatttgtgatagccagaagctggaaacaacctagatgtcccacgacagaagaatggatacagaaaatgtggttcatttacacaatggaatacttctcagctattaagaacgaggacatcctgggttttgcaggcagatggatgcaactagaaaatatcatcctgagtgaggtaattcagacccaaaacgacatatatggtatgtactcacttataagtgaatattagccaattaaaaaaaaaagtacagaatacccaagatagagtccacagaactcaaaaaggtcaacaagctgaagtgcccaagtgaggatgcctcattaccacttggaagagagaagaaagcaatcacaagtggggagagagggagggacctaggagagaaagtggactggatggggggaggggattcaaggggagaggggaacctgatctggtgttgggtgagggaaatggattgaaaccatgggaccagcagaaagaatggaaacaggcaaccatgggaaataggaggttggggggcaccctccagaatgcaccagagacctgggagatgagagactctcaggactcaaaggaagggaccttagatgaaatgccggatactagggaaagcgaacttacagagcccacctccagcaggaaaacaggatatcaagtgatggatggggttgccatcccacagtcacaactctgacccataattgtttctgtctgaaagaattacagggatggaaatggaaaggaacctgaggaaaagaaggtccagcaagaggcccaaagtaggttctagtaggggaggtcccaagacctgacactattactgaggctatggagcactcacaaaaagtaacttagcataaccccactctggaagacccaccaggcagctgaaagagtcagatgcagatatttgcacccaacaaatgaacagggtcagctggcccctgttgttgaattggggaaggctgagagaagctaaggaggaggaagaccctgtaggaggaccagcagtcttaattaatttagaccccgaggtttctcaaacactggactatcataccaacagtatacaccagctgatatgaggcccccaacacacatacagtagaggacttccgggtttctgtttttttttcagagatgatgcacctaaccctcaaagactgaaagcctcagggagtttacaagttaggtgggttagggttggggatatccacatggagacaggtggatggggaag

SEQ ID NO: 3879 - DNA, 1000 bp, mus musculus
agggctttactgctgtgaacagacaccatgaccaaggcaagtcttatgaaagacaacatctaactggacctggcttacagattcagaagttcagtctggtatcattaaggcagaaacatggcagtatccaggcaggcattgctacaggaggagctgagagttctagttcttcatctgaaggctgctagcagaatactgacttccaggcagctaggacaagggtattaaagctcacacccacaatgccaggtctactccaacagggccacaccttctaattgtgccactcactgggtcaagtgtatacaaaccatcacagttaatatgaataaaacgaaagtcatccaagttgtatatcagccaaagatttcactacttcttagaaacaagatttctgaaagtatccaatgactcactactgcccactaacaagtctccttctgttagagccttgctcacatctcagaaacttgccatcatcagcacctattctgtatcttccagcttcttccagcatcttgtagcaccttccccctgttcttagcttctccccagcagtctttttagtggctaatggaccttcaggactgcctattcacaagagatacaataaaatgagtcaaaagccctcataggaggctgtaaaagagtccaaagagcaagaaaagaactcagagatacttaaacctactctcactgttcagagtcccacaaaaatacaaagcataaatcacaaagcatgaaaaacactaaaacaaaacaaaacaaaacaaaacaaaaccagctataacgtatatgcaaagtacctgctgtagatacttgcagacccccatgcttgctgcttcactctgtgaggctatgtgaatattgcttagcttatttagtgggtcatattttattgtttgctttcatcccctctgactaccatgttttctcacccactctcagagaggagcaacccaactgagacttccattcagattctcattctgcatactgt

SEQ ID NO: 3880 - DNA, 1200 bp, mus musculus
atttaagttctctttcactgaggaaaactttttaagagaaatacactgtctggtgaaatatatggtcacagtctgaggctgcacatgttggtgataagcagcataccagggaggtggcagggggaccctttagaaagtaccagggaggtgagagactctaaggactcaatgtgggtaaccatagccaacatgcccaacaatgtggagagggaacatgaagtgccaacttttagtacatagacaggacctcaatggagagactgggttactaacccagagtcaacatttctgacgcagaactgttcctgtccaaaagaactacaggaacaaaaatggagaagagactgaaggaaagatggccaatgaccagcccaacttgtgatccatctcatgggagggcactaaagcctgaccttattagtgatggtgtgatgtgcatacagagggaagtctgtcatggctctactctgagaggctctaccaagagttggctcagacagaagcgtatacttacactcaagcattaaactggagtcagggacctttaggattgaattaggggaaagataatgaagccaaaggggagagcaacctcataggaagatcagcagtctcaatttgcccagaccccaatgagctcccagagactgagccaccaaccaggaacatacatggactggtccaagaaccgtggaacaaatacatcagaggtcttcctggtcagtcctcagtgggagatgtgcttaagtgacttgaggccccagggaagctagaggcctgctgcagggggggggtaccctctaagaggcaaagtgggaggaggaatgggatgaggaactgtgggagggggaactgaaagaggggtgcacggactgaaatgtaaattaaataaaagaaagaaaacaataaagcagacctggttttcatttctagcacccagagggcagttctagttgcctgtacctccagttccaggtgatctgacaccctcacacagacacatatgctggcaaaacacgggtgcacacaaaataaaattaaacaaattattaaaaaataacataatcaaatatccaaaagcagaacattgccccataaacaatttaagtttctctaaagtaagtgttccaaacgctgtacctttttagaaagctgaagactagaaggctgaggactggcgggacaacctgctttttcttt

SEQ ID NO: 3881 - DNA, 1600 bp, mus musculus
aaatggctgcaactctaactcctatgaatctgaagtcctcttctggcctaggtaggcacctaaacatatgtacagctttacaaacatcacaaacactggaacatacatatagatacagagagagacagagagagagacagagacagagacagagagacagacagacagagagagacagagagacagagagagagagagagactgagagagagactgaaagagacagagatatattaaaatgagccaacttgccaacttgcacaagacacctatcttctatttccccctacatgaaatgtcctgtataagaaaatttggaggcatagaaagtatataagtggtttccaaactttgaggtgttaattgaagttgcctaacaatcagtattatatttcctttagagagtgataaaaatgttctaaagttatacagtgatagtggttgcatgaaactgcgtatattgttgctagcaggagagcaaaattttacagccactatgggctttcatatgactgtttcttagaaaactgggaattgatatgcctcaagttccaactataccattttggggcatacagccaaagcacatttcatcctatgaggaggacacttcaaaactatatgctttattcataatagccataaactggaaacaacctacacattcttcaacagaagatgggatcaaaaattatggttcattcacacagcgaaaagttattcaattgtaaaaaaataagacatcataacatttttaggcaaatgggtggaaatacaaagacattctgattgaggaaactcaaacccagaaagataaatatgatgtggattcactaaaagtgggtattagctgttaagtatataatggccaagttacaatgcatagattcagagagtgcagaggtccttcccatgggcctttgccagcatggaaatgagagttggagggttgtggctgacaggacagtccatagaggagataaggactcagcagggaggaaatgagtctggtttgatggtcaggggaatctcatagctgactagcaattaggtgcttcttcatttttttttttttgtttcaagaacaaaggcagatcaataatgatccaaatggtatagagtgtgtgtttgattttttattaaatgtccacggttacaagttcagttacaattagtaaatacaaacagatcagatattattattattattattattattattattattattattaattactactccaatttaaagaatttaaagaatatcttttccaaagcaaacacatttaatatatgacagactggtttcagactggcaatgtttgctctttggaagcattccagacaaaaaatatatctgaactggcctttttatgagtagcaaatattaacatctaacttcttttactctgtatttcatcatctatgctatgattagggaaagcttagtttatttaatctatctaatttattgttttattcagggatgtactccatatgactctcatcatcattgacatattgtaaagatctttaaactatatactcagagacatctaaatctatagtaaaaaataagatttgactatatataatg

SEQ ID NO: 3882 - DNA, 1000 bp, mus musculus
ataaagttactttcatccattgtatagggagaatgagacaatattctttggaatcaggaaaaggagctgaaggggtttgcaaccccatagcaagaacaatactatcaaccaatcagacactcaagagctcccagggactcaaccacctaccaaagagtacacatggagggaccaatggcttcagctgcatatgcagcaaaggatggccatgttgggcatcaatgggaggagaggcccttggtcctgtgaaatctgtatgccccagtgtaggggaatgctagggcaggaagaaaggagtgggtgggttgttaggtaagcaccctcacagaagcagggggtggggaatgggttaggggtttgcagaggggaaaccaggaagggggacaacatttggaatgtaaataaataaaataaccaattaaaagaaaagaaatggcaccacccatagtgatccaagcattcccacaattattaatcaagatgatgttccatagacttctccataggaaaattcaatggagacaaacttctgttatgatttcttcttcctagatgactccagtttgtgctacattgacaaaagaaagagagaaggacagaaagaaagaaagaaagaaagaaagaaagaaagaaagaaagaaagaaagaaagaaagaaagaaagaaaaaaagaaagaaagaaagaaggaagaaagaaagaaagaaagaaagaaatttcttaaaaatattactgtatagttttgaatttgtattggattatacagatttccttcactataagagatttaagtttttcatatgaaaattgtaaagaatgatacctgcaatattttggtcattaatttacaaattaatcatatccatcattcttatctcatagaagatatatttttctaagttctaaaatcttatctcaatagatttttctaatcgtttaattgtaaaattgatgagcagttttctcctcaagacattttttccacttaaagcaaatcctttct

SEQ ID NO: 3883 - DNA, 1200 bp, mus musculus
attgaagaatatttctatactactaggggcttgtggggagcatgctctcttggcttttcataatgtttgtgtttttgaagtgttttgaagtacatatgaacttcttttctgtgtcatgtgtctgatatgtgattacagttgcttccacctagtggaactttgtttctctacctgttgttgcctgagcttggttgatttcagatcaaggatgaacagtaaatgggtcattccttcagtacattttggacaggaatgtttttaattgcattgcagccatgatagtaaatgtgggtgactcccatataggtttgcataaacttacttatatgtgtttgacctcagagtctgaggacagagcagatcagggcattctgtggactgggctagtgaatgagcttcatgacccaagctaagcctgaaagtataaggattgcaaggagaggtggaggtcttggtcactagacagactgtgagacttgagctagaacttctgggagaatagacaggatgcagtcagataggttcctagggaactattcatgcttagctgaagcacatgccctaaaagcccagccaattctgagagtttggtctgactaagatcggtgagaatcttcattttgtttgtcataccttctggaggtacagcattcaaacaggtataaaagtacacacatacatggcaactgtctttctataattttagtcatatatttaatggtgacaggtatgtatgtctgtatgtatgttttcatgaatacaagtatgctcatatatattcatccaatattaaaataaccctattctctccctcttcctccctctctctctctgtgaattcataaggacaagagatagcataaaagttcattattattcacctcttcctcaacagatcataattcccaaacattctgaaaggtgccatgttaatgttacattttcaagatgactgtctggttagcaggactgggcaggcttcaatacctgcacacactatatttgattctgtcagagtgtacgatgtcagacagagtcagagtaatactgcaagtttgagcactttaagatttgaacttaattgtgcttagcagtaaagcctaaactaaactaaaatcagcagacttaggaacaaaaataaccttttatacaataaacaaacaaataagcaaatggtaaccgaggaggaaaatataatca

SEQ ID NO: 3884 - DNA, 1200 bp, mus musculus
ggagtctgtattaacttggaaaagcctgagtgtagaacacctatgtgtgggaaggccatcctatgctatattaaacatactttatatgttatattatacatataaatatgctttatatttatatgtcatattaaatgtactttaaataaattaaaaattattctctttaatccaaaagctttttataagtttagttaaaaaaattaaaaggataaaacaagtgaactcaatatactatgtcaaagtccagccccttggagcccaccaaatgcaggtgtactaactaaagaaataaggaaaaatatgaatgagaaccagaaaggcgtgactgagagttttaatgccacccctgtttgcacagtttaccactcctgttgcctgctaacaaacctgggagattctgtccatgcataacaagttcataagttgatttggaactttgggatttgtcctctttgtgtgtttgtttctttttttctgctttccctcttttctctttctcttttgtaattacaaatctctaggcccagaaaggaaccttaagttacataaatgtgttttatatatttcttaagcattcaagtgaaaacattcagtaagcatccaattagtttaactattatatgccaaactaccccagattatattggtttaaaaaaaggcagataaaaaccattttgattatttctcgtagttgttataatttattgatcttcatacacacaattttgtttctttttttccttttatttaaaacaggctttattctcacacatcctgattatggtttcctcccctactctatatcccagttccttgacacctgccttcccatccagatctaccccatttttgtttctagttagaaagcaatagaacttctaaataattaattagataaagccaaaactaacagctggacggtggtggcgcatgcctttaatcccagcacttgggaggcagaggcaggcagatttctgatttcaaggccagcctggtccaaaataacaaatagaagaaaatgtgtcccaaagggcatatagatgaagtgacccactcatttgcacattgtagaatcctataaaaacattaaactagaagtcattatacataaagagactatagtgtaaaaaagtgagaaaatacatacatatatacatatataataatattcaaatttaaaaatatttaaaattttat

SEQ ID NO: 3885 - DNA, 1600 bp, mus musculus
ttaccatgacatttggcaacacataaatgagaaaagtgatgtatttatatgtcaatttacgaagtcaattctgccttttatctatttgacaaaacctagagttatcaaaagaaaaggactctagatgaaaaaaatgccaccataatattggccagtagtcaagtgtgcagtgccttttcttgactggtgattaatgtagaaagctccagcttactgtgatgtagtgccacccctggctaggtggtaaaagaatgcaacctgaacaagccaaaaagaaaaagtcagtaagaagtgtttgtttgtttgtttgttttgttttgttttgttttgttttcttcatggcttctccttcagcttccaaatctaggttcctttcttgagttctgcactgacttccctctgaaatagagagtgacctgaggattacaagatttaataaaccacctgcccctagaattgtggttggtcatagtgttttatcagaggactatgtagcctcccataagcctgaagcaggctgagccagaacttgaccttgctgccactaaggagattatctagggtggagccttcctccctagatcactctattgttgagccacagtcgctgttcctcttcaagatactgctatctgctgagcagcctggagctattccagagactatgccctatcctgcctgtcatcacctgcagctggtttcaggccccaaggatgaattggctggaatggacttcctccccctcctcttttatcaagcttgtctggaattaaaaatttgaaccttgatccgaacactgtcttggttccatattcctctcttcgcctagtttccctctctttcagtgccagcctgctattcaggtgtacctgtccttgtgagccgctggacggctcacaacaggactagatatcctaaataacacagaagagaaagcatagaagtttagtctagccactggaatttctcagttgtcaatgatgggtaattgtatttttgttcagactttatcagaaaaagtaatgttcaatgtcttagggttaacagataagcgtaacacatggaaaatatgagcttattttgaaagaaaataaaacttgagacctgtgattcatgtaatgtatatcaaatagcccaaagagttgtttgtgagctttgaaacctggggctgagaacatagcagaacaggccaggacatgcccaggcaggcccttcattaaggcattcctgtggctacttggccataaagataaagagagataaagagaatgacatggcctggcgcctctctatatcccgctcttctgacctaagttaaatgttaacaggctgctgatgtttaaatgaaccaatcatgtgaaaccgcaccaattcctcccccagccccagccccttttctataaaaacctagcttccaagcctcgtggtcgaaaccactgtctcctgcatgagatatgtttctccaaggagctccgccattaaactacctcctgtttttacatcaagatggtcatctgttcgtgattcttggatgcatgctgaattgggaacagagtgggggtttccccactaggttctttcaatttctaattatagcaag

SEQ ID NO: 3886 - DNA, 1200 bp, mus musculus
gcagtgttcaccagtaattccttgtgggttttttgtgtttcctctttaagggcttctatttgtttagcagtattctcctgtaattccttgaggaatttttgtgcctaccaccatcatgagatataattttaaatcattgtctttccttttgggtatgttggggtatccaggacatgttgtggtgggcatactgggttctgattattcccagtgttcttggtttctgttagtaagattcttatgttttctttcgccatttggaaatctctggtttaatgttcaagctgtctctggctggagcttgatcctcctgtgattctgttagtctctgttagcactcctgggagtccaactctctcctgagttccagtggccagagcactctctgaaggcaatctctcctctttcagggcaagtatccagcagtctgaagctctgatccaccttctgagttctggggtcagaactctccctgtaggctgactctcctctggcaaggaatgtgcccaggggtcttggtctcagctccaccccttggctgaggatgaaggcctgatgggaccctgaccaagaagctctgctgcccaagtgctctcaggtgatcaggaggtcctgggtgtgctaggggtcctgaggcttggagagtcctctggtgacctagatacccttggctgggttcacacagaagatggcaggtttggccctgacttgaatggatgccagcctctggtcagacgggattccttcatccctgttcctgctgacacaagaccctccacaattctttggagctgctgttgctttccactcacccatgatcccgaggtcctgaggggtacagagcaatctggagcccttagtggcctcttatgggctcagaaggaatatggcaggggtggccctgactagaacagatcccagcttctggtcaggcaggattcctttgtccctgttcctgctggcacaagaccctccatgattctccggagctgatgttgtgttccactcacctgtcatcctgaggtgatcctgaggtgttctgtaggtcctgcagcgtcgagagcactctcatatgctagaattcttgtgtatattaccacagtagattaattttcatgtcaaaggcaaatctattataataagatagtgataacaaattataggccatgggtagagaagaaaatgcactgttctatattt

SEQ ID NO: 3887 - DNA, 1400 bp, mus musculus
ccttgttgtactgagactttgtcttaactttgcctatgtcctatgcatgctgtcacaactgctatgttcatgtggaaaacactcctgtaaagtctagaaagtactgtttacttggagaaatccaccatacttgactattccaagttttctaccccatattattcagtggttcttgagccttgggatgagggggttaagaatgaaaaaataaaaatgactacaaattctggcatggatgtggtgataggggagggtatgaagcattcatataaagggaactattatgactgccctctgagagaaccaactaatactgttattccctttcccagtttcccctccagaaactccctatcctatccctgctcttcctgcttatatcagggtgttcccccacccacctacccactcccaccttcttgtcctgacgtttccataaactagggcatggagccatcacaggacccaggctctcttctccctttgataccagacaaggccatcctctgctacgtatgcatttactttgatgttggctacttgtttgctgtagattgcttttatcttgtttatgtatgggcgtcgacttcctgatctttcgacaccttttatcatgaatggatgttggattttgtcaaatgttttctcggcatctaaagagatgagcatgtcgtttttgtctttgagtttgtttttatgatggattacgttgatggatttccatatattaaaccatccatccatccctgtaatgaaacataattgttcaggatagatgattattttgctgtgttcttggatttggttagggagaattttattgaggatttttgcatcgatattcataagaaaatttgtctgaagttctctatctttgttggatctttcggtggtttgggtatctgagaaattgtggcttcatagaatgagttgggtagagtaccttctgcttctattttgtgcaatagtttgtgaagaactggaattagatcttctttgaaggtctaataaaactctgcactaagcccaactggtcctggccttttattggttgggagactattaatgactgcttctatttctttaggggatatagtacagtttagatcattaacttgatcctgatttaactttggtacctggtatctgtctagaaatttgtccatttcatccaagttttccagttttgttcagtatagcgttttgtagaaggatctgattgtgttttggatttcttcaagatctcttgttatgtctcccttttcatttctgattttgttaactaggatgctgtccttgtgccctcttgtgagtctggctaagggtttatctatcttgttgattttctcaaagaaccagctcctcatttggttgattctttgaatagttcttcttgattc

SEQ ID NO: 3888 - DNA, 1000 bp, mus musculus
tactttttactattgtgaagagacatcactaccaaggcaacttctataagaaagggtttattgggtttacagtttctgggtgtgagtccatgaccatcaagcaggaagcacgaggcacgactctggagaagttgctgagacctattgtaggattgtgggtcccatggccgctcatgagagaggtggagctggttcagagtgtgccagggccttctgtttcttaggcagtttgacacccaaggcaccactgggagtggtggaagtgccaagaacatagtgttctcccctgctcccgccccaaggctggatctaacctggggctcagaaaaaaaggggagctccagctggttccaaggagattgtccttgatatggctggtgcagaaagaatgtgtgggaagggaagcttattgtctatgccctctggacctctaagtatctcatttacatttagatcattgagcctccttgcccacaggtctcctgtatttttctttttctttttctctttctttttctttttctttttctttttctttttctttttctttttctctttctctttctctttctctttctctttctctttctctttttcttcttcttttccttttccttttccttttcttttgttttctttctttttattagatattttctgtatttatatttcaaatgttattccctttcctggatttccctctgaaaatcccctatccccttccccctctccctgctcaccaagctacccactccctcttcctgaccctggcattcccctacactggggcatagaaccttcacaagactcattaatgaccaactaggccaccctctgctacatatgcagctagagccattagtcctaccatgtgttttctttggttggtggtttagtcccagagagctctgagggttactggttagttcatattgttcctcttaaggggctgcaaacccctttagctccttgggtactttctctagctccttcattgggg

SEQ ID NO: 3889 - DNA, 1400 bp, mus musculus
tgttacaccatactgcccctactcactttcaaactcatggcctctttttcatacaaacacacacacacacacacacacacacacacacacacatacactgattatttcatatagttttacttgtacaagtacggttttaggactgaaagtttaatactaactaaccatttgatatgttcttcactggggaagactatttctcctactcccaactttcctttagttgcctgcaggatttctgtgtagagttgaggcctcctgagctattgatgtcatctacgacctgtgagacatgttcttgactgctaattgatgtaagatggtccaggtactgggtgtatgtgtttgttggagtgggttgcaatctttaggcatatgtgtctgggtattataagaaaggtagcctggatcttcagccaggaagcagatctgagctccagacctctgtgctcctaaccctgccagaacagaggtggctaccctggaaggctctaccaccagagtagctgagagagtcatcttgtatcccaggtccctcagagaccagtctgtgcaggagagcctgctaactgcagaagtagcatagcttctgggacatgccccgtttcagcccttcatcttcagtcaggaagaagatctgagcaccagacacctgtgcttcttcaccattagaggagaggtggcctgcagagagtacactgaccactgagactcaggagagagttggactcccaggagtgctgacagaggctaacagaatcacagtaggaacaatatccagcgagagacatctataacagctaatgccagagattaccagatggcaaaaggcaaaggtaagaatctgactaacaaaaatctacaatgctcaccaacatcagaacccagcacgcccacctcagtgagtcctggatacccccaacacacctgaaaagcaagattctgatttaaaatcatatctcatgatgctgatagaggattttaagaaggaaattaaaaactcacttaaagaaatacaggagaaaacagctaaacaggtagaaggccttgaaggggaagcacaaaattcccttaaagaattacaggaaaacactgctaaacaaacagaagtcattgaagaagaaacacaaaaacaccttaaagaattacaggaaaacacaaacaaacaggtgatggaattgaacaaaactatccaagatctaaaaagggaagtagaaacaataaagaaaacccaaagggagacaactctggagatagaaaccctagggaagaaatctggaaccgtagatgagagcatcagcaacagaatacaagagatgaaagagagaatgtcaggtgcagaagattccatagagaacatcagcacaacaatcaaaggatatgcaaaatgcaagaagatc

SEQ ID NO: 3890 - DNA, 1000 bp, mus musculus
ccattcatttatatttcggatcatatcctacttcctggttactcttccaccaacctgccatccgacatccaccctccacctggccctttttttgtgtgagagtgctcctcctcgcacccacactttccttccccaccactctaacattcccctatgctgggtatcaaacctccccagggtcaagggactcccctcctattgctgtcaggcaaggtcatcctctgctacatatgtatctggaaccatggatccctgtatactcttgtatttctttaaggaagttattaatgtcctactttaagacctctatcatcctcatgagatggcattttaagtcagaatcttgcttcacggtgtctttggatatccagggcttatggtggtgggaggactgtattctgttggtgccaatttactttgtcttctgttgcttatgttcttgtgcttgcttctcaccatcttgttatgtctggtgttaactggtctggttatctctgactggagcctgactctccttgtaggcaggtagagctctatgacctgtgttacagcaggtttcctgggaggtagaaaattctatctctggttaggcaggcctcctttgttcctggttagggcaggtctcctgtctctctggttgtagcagacatcctcacagataggaacactatgttcctggttacaacaaatatcccaatagacagacaggcaccagttggtcaggagagctgaatctgctctagttgcaaaccagaaggaagttgaggatcaaacagatggataggtcccacatctgctgggctctatgtgggtcccagctggggcaggtattggggcaggggtcttacctgtgtccttgattatggcagagttcctaggagaaaggctaactctaggatgtggaagaaccaatcctattatttcaatctaattttttttctctattttcctctaatgcctcaaattcaaaggtagggaacaatatttaaaatagcaatat

SEQ ID NO: 3891 - DNA, 1400 bp, mus musculus
cagatgaatttgagaattgctctctctaactctatgaagaattgagttgtcattttgatgggaattgcatcgaatctgtatattgctttcgtcaagatggccacttttactatatttatcctgccaatccacagcatggaatttataggcaaatggatggaacttgagaatatcatcctgagtgaggtgactcagtcacagaggaacaaacacaatgtgtacttactgattgttagcccaaaagttcagaatacccaagattcagttcacagaacatttgaagcctacgaagaaggaacaccaaaatgtagatgcttcagtgcttttttgaagggtgaatgaaatactcacaggagaaaatatggaggaaatatggagcagaaactgaaggaaaggccatgcagagactgtgccacctggggatccatcacttatacagccaacaaacccagacattatagtggatgctgggaagtgcttgctgatagaagcctaacatgactgtctcctaagaggttctgccagagcctgacaaatacagaggaggaagcacacagccaaccattggactgagctcaggggtccctgatggaggagttggagaaggaactaaaggagctgagggggtttacagtcccatggagggtgcaacattgtcaaaaagataaaccccccagagctcccggggactggaccaccaaccaaagaatacacatggagaggcctatggcgctggccacatatgtggcagaagatggccttgttgaacatcagtgggaggagaggccctcgggcttgagtatgttcaatgccccagtgtaggggtatgctggtgtgggaggatgggagtctgtgggtgggggaccaccttcatagaggcagggggaggggtatgggatagggggttgccaaaggggacacctggaaaggggaaaccatttgaaatgtaaataaaaaaatatccaaagggggaaataagagaacaagaataacaggcaatcttctgtaaaacaatctctctttagaaatggctacataacacaacctaggcattggtaatattaatgggtatataacatagaaattgagatattttgtgtggttctaccctcaacaacgaactacagacaactaatgactgctggaagaaggatattttttctccaggataaactttcttactgattgtctaatagagagttagtcattccatgtatacacgaacagcaaaaacagactcagcaggttgcatttacatagtacatacccacacaatatgtatttatgcacaaatgtgtgcttatgtgtgtgtgtctgaaactataaaattaaattaaaagaggctatccacttgagagtgagggtgagtgagagtgaaggtgaggaataggaggggttgg

SEQ ID NO: 3892 - DNA, 1000 bp, mus musculus
ctacagaagtgtcagtgtttcttataagaattttttatcaaggtaaatcacagttttacatttatttatttaaggttttaagatgaaggttttaaaaagagcatatagctggtgactagaaggtataaacttaccctagattggttttaaaaataaatatttaaagcatcttaattttctatctctttttaaatttaatgttaatttttagttattcattttatattccgctcactgccccctcacagtcatccttcccacaatccttcatccatcccttcctccctttctccccatcctggcacttcaaggctctgtgaagctaggtgatttctctcccactgggacagacaaggcagcccagctaggagaacttatcccacatacaggcaacagctttaaggatagccctccattgtccatcttaaaatatgtatagtttggtaataggtgaggctttgtggactggtgtctgcttgagactctcatctttgctagttaatggcagtgtggtcggactctggttcctgaacttctatgcccacttcccgttttttaagtgaggctgacagaacctcgtgcatggtgcttgtatgagaatttcacacgatgtatcccataaaaactcctcggcaaaaacctgacagtgcctgttagtgctagcattatttgcttcaactttacatcaaatcatggtgtgaaacccattcactaataatgagtgctagctgtcaggtaaagcactgagtttcaaatctgttgagagtttggagcagtggttatcagtgtttcctctagaagtacacgccaggggcttttcctctacctcctctagcaagaggatgctgtgctcatttatgagtccatgcatcccagatcaagtctcttgtgtacactctgagttatgagatatatgcacacaacacatttgggacctcgggaaagtaataaacagggagtcactcaactgggaagtacttcgacttctcgtcacctcctt

SEQ ID NO: 3893 - DNA, 1000 bp, mus musculus
aaatttatattttatcatatcaaaagaaaataaagaagtaatgttaacttttaatatgttttaattatgggtttttatttttctgaaaatgactgtcctgaagttgtactgtcaccataaggaaaaaagtgcttgtgtttcttatattttcactttttctaagatttaattttaattttaaggttttgtatacctgttactattctatgtgtgtggtgatgggcagtggctgaaggattcccgcagaagcaaaaagactgcactggatccctggaactggagttacagatggtcatgaaccacccaatgtgggtactgtaagcaaacctgattataatttcccctccctctactccttcaagtccctccctaagtccccttccctctaggtctctgaatggaaaagaatggattctaaagagattaaaaacaatagataagaagatgaaatataagataaatcaaagactattacattgaagttgaacaaggcaaagcaacagcaggaaaaggcccaagaaaaggtacaggaatcagagacacactcattcacatgcgtggaataaggtaaaaacagtaaactgagagccataataaatagacagaagacctggtacagatctgtgcaggccctgtgcttgctgctgaagtctcagtgagttcaaatgagctttacttagtggattcaggtcttgttctcttgacatgctccatttcttctggctcttatactctttctgtctccacttctgttggggttccctgagcactgagcagagagacttgatggagacaaactatttagagatgcaagaggaagtttctgataatagctgaataaggcactgatctatgagtatagcagtataccattaagagttattttatctctacttctttcttaagactaaccacttgagtcatttctcccgtcctgtctttagatttttacagaagactacattaaaatatatcgaatatgcctagattaatgactgta

SEQ ID NO: 3894 - DNA, 1200 bp, mus musculus
atttaatttaatttttagttttttgagacatggtttctctgtatagccctggctgtcctggaactcactttgtagaccaggctggcctctaactcagaaatctgcctgcctctgcctcacaagtgctgggaataaaggtgtatgccaccactgtcgggcctttcctgtagttctttaagggatgtttgtttttcctctttgagatcttctacctgtttaggagtgttttcctgtagttctttaagtgattttgtgcttcctctttaagtggttctacctgtttacctgtgttctcctttatttctttaagtgagttattaatggccttcttaaaatcctctatcagcatcataagatatgattttaaattcaaattttctttttcgggcatgttggggtatccaggactcgttgtggtgggagtactagattctgatgatgccttagtgtctgtttctcagtgtctgtccataagattcttaagttggccttttgccatctggtaatctctagagttagatgttctagctgtctctggctggagcttgatcctcctgtgattctgttagcttctgtcagcactcctgggactccaactctctcctgagtcccagtggtcagagaattctctgcaggcaagctctcctctggcagggaaagtgcacagaggtctggagctcagctgtacctcctggctaaagatgaaagactgaagggacactgtccaagaagttgtgttgcttctgtggcccacaggctctcctgtgtggattgatctctgagagacccgggatacaagatggagatcttgcctgagtcccggggttggagccttccctggaggctgactctcctctggcagggaaggtgtccagagctctgcctcatgtctgaggatgaaggcctgaagggcccctgtccaagaagctctgttgcttcttatgcccacacactttcctgcatggactggtctatgagagacctgggacacaagatggagatctcacctgagtccaggagtcagacaaaaaataattttatcacaacagcaatgtatatttaattttactattgtttgttctaaattatcactacttagatgcacaaagaaagaagcaaatattcaaaatatagaagcaataggttttctttttaagaatagcattcagtaataatcataatcttcaattattgagtttt

SEQ ID NO: 3895 - DNA, 1200 bp, mus musculus
ggtctatactatgcaaagtaacattctaaagtcaataaacggaattaacgtttttcaaactataacctcatctgtacttcttttctgccagcaaagtcctcaggaatgcagggctcgccacttgtccagaggacctcgttcagggatgtatttgactccacagccatcagggatgaggcgcttggccgccaccttgtcttcaaattcatctgcgttgaacttggtaaagccccacttcttggagatgtggatcttctggcggccggggaacttgaatttggctcggcgtagggcctcgatcacgtgctccttgttctgcagcttggtgcggatggacatgatgacctggccgatgtggactctcgccaccgtaccttgtggtttcccgaaggcgcctcgcatgccggtctggagcctgtcggcacctgcgcacgacagcatcttgttgatgcggatgacatggaaggggtgcagccgcacgcggatgtggaagccgtccttgccacagctcttcaccatgtacttgttggcgcagatgcgtgcggcctccagggcttccgaggagagctgctcatactcgtccgacaccatgtggccgcagagtggaaactcatccaccttcgccttcttccgacccaggtcaaagatgcggatcttcgcatcggggacgcctcggcagaaacgggactttgggtacggcttgttcttacagtaccggtaacagcgagccggacgacgacccatggcgacagcaggaacctcagccgtgcgtgcccaccgccagccgcaaaatggaggccaaatttctgttacccatcaagccttgcgggaatcatagagactgaggaagacttgaagatagacctttccactcaatctccgggtcactctacgcctgcgcaggcctcagtggtaaatactgaaaggtttctttcaggccgaagaaagcccaccactgcccaccgaatttggaactttgaccttaagctttgtagtaggcttaaaaacaaaagtttacagctgggcggtggtggcgcacacctttaatcccagcccttgggaggcagaggcaggcgaatttctgagttcgaggccaacctggtctacagggtgagttccaggacaaccagggctgcacagagaaaccctgtctcaaaaagccaaagtgggggaaaaaaaagatttatggtcatggtgaat

SEQ ID NO: 3896 - DNA, 1600 bp, mus musculus
ctcgtaaaaactgtagaatgtggctcatttctaatcatggttgacctcatgattagttccatgtatctccttatcttagaccaatgagttatcgaaaacacacttttctctttgttgggctcagatgatttatagaggtgagcaggattctacaagtacctttaatatctagttcagaaacattatttgtcatttctccacaaagaacaaatcacacaagataaacaacttgtatgggtttgagatacattcccataatggtaaggtttcaagagaaatatatctgagattaagaaagtattcttcaagattctcagaagttttgagctgataacagagtcctcattattaaattttattaaataaaaagtatcaaaatatttaagttatttgtatctacagacatattggcacttaatgtatatttataacttctgtgtttgtgtatgcatgtgtaatgcattgggtaatagcctcaggtcatgagaaattaagccagtctgtactagaaaatagtccctagccagagagaatggcttagccccagcctgactttcactctacctaaagaatccatatatgtctgggtatcagaaacagcctaccctgttcccagtcaaatcatcaaaagcaactgtaacatacttataactatcagtgtatgtgtctctgtacgtgtgtctcctaaacactaagagcactctactcccatcccatgaaaaggatgggaccctcactgttccactaaagcagtctcagactattgagattgattttgtctgtttctgcatatgcctcacttttcttacaaaatgtatttgtgatgcatgcaaatgtgtatgtatgggtgcatacagaggccagaggagtacatcagaggtccttctctgtaactttttgtcttagttctttgacacagcatcactcagtgagcctggagttaggctggcagccaacaaccccagtggtactgttcctgaacctggcttttgatggtggttgggggcatcagaattcaagctttttacatggatgctggagatttgaactcagaatacttgcttaacaagttctcttatctgccgagccctctctacagatttgtatgtcataatccttttacacaatcaagaataaaaacacaaccattaatgtattaaaatttaaaaacctgataatctactctccattaaaatgctcccaactgtggttgagttttgcatagatacaacatgccctttttataatgtgagagaaactatttccatatttttggcaagtgataattttaaaaaatatttattagtgtttcagtgtgaactaaggaaatagcaatatcccattaagtttcaaattgatatttgtaacaaccaatgatacaatcattttgaacatttttttgaaaactccatattctatccataatcatccttacacaaaatttgtacctaaattattattctttactagcaaaatgtatttatatttggtaaatatataatctaatttcatctccagttatatctgtctacgtgtaaatatttttatatgattttctgtgccgagagtttaccttcggttgtatgcatgataggcaagt

SEQ ID NO: 3897 - DNA, 1000 bp, mus musculus
tagaaatattgataatccacaaaaataagattattcaatgaaaggagtgtgaaaacaatttgctctctgtttaatttattgattaaaagaagactaagaaaacttttgctagaaatgtaacagttcttcccttacttggcctttgctatctttaatagtaccttaagagttttttatgattttaattataatctataccttgatgctctccatcccacttaaaaacctgaagtaacaagcagagcctcaaatatccatgatgtcactgaccctcgcctttcatgctgcagagaaggcctgatatctccagggtgaagtgaggataaatgggcctcatgccagtgacttcccactgtgattaagttaaaatccaaactccttgcactgtgtcgataagtcctcctagagctggcttctgcatctctgacctcatcacatcttaccttccattaaatggaccttctttctgaccctgcttgagcatcttcctgcctgggggattttgttcctaacatctactcagcataaaatgtaaacaacttattcccatattatagatctgggctgaaaggctatttccatggcattgacttcactatcatggtcatatcttcttacagtttgttgctattctgttgaacaatcttaacttccttatggcttgttctgcggtcagaattgttttatccaactgttttatgtctgcaaatctaccttcaaagaaagcaagaactatttcgtgtacaggtgtctctttagattttgtaagaatgcctagtggattgaaggctctcagtaactaataaactccaataaaaaattaatgacataatgaaatcaagtcatgcatactttagtctgaaaggaaactcactactgatttgaaataatgaattttgtaaatatgtgccattaaatcggctatatatgtgcttacagaaaaaaaagtcattttcaataataaaacacttatttaataattaaacatatttttctatat

SEQ ID NO: 3898 - DNA, 1200 bp, mus musculus
aattttagggaaatgtatgttatgtactcactaataagtggatattaaccaaaaaaagtactgaatacccacgatacaatccacagaagtcaagaagattaacaaggtgaagggcccaagtgaggatacctcaatcgtgcttaggagggagaagaaagaaattagaggaaggggggaaaagtgagggacaggataggaaaggggacaggaaggggaagaggggaacatgatcgggcattgggtgggggaaaaactgaagccctgagagcagacagaaagaatggaaacaggaaacctcaggaggtaggaagttggggggactctctagaatgtaccagagacctgggaggtgagagactatcagaactcaaagggagggaccttggatcaaatactgtacagtagggagggggagcttatagagtctagccccagtggagggacaggcaggatagagttgccattccacagtcaaaagctctgacccagaattgttcctgtctgcgggagctgcagggacaaaaatggagaagaccccgagaaaaggagatccagtgataggcacaaattgggctccaactcaaggggagacccccaagacctgatactattactgaggctatggagtgctcacaaaatggggcctatcataactgtcttctggaagacccaacaagcagctgaaagagtcagatgctgatatttacacccaaccaatggacagaagctggtgacccctgtggttgggctgggaaaagctgagaaggagggccatcctatagaaaaaccagcagtctcaactaaactggacagccgaaatctctcagacactgagccaccaactaggcagttgatatgagaccccccaacccatatacaatagagaactgccatatctggactcagtaagagaatatgcaaccaaccctcaaggccccaaggagtgggaaaatctggtgggtgggtgacatcctcttggagaccgggggtggaagtgggagggaaggtatgtgatgtgcaagagtcagagggtggaccagaaggggaataaagtctgtactgtatatatatatatatatatatatatatatatatatatatatatatatatatatatatatgaatgaatgcatgaatgaaagaatgaataaaataaaataaatgattaagaaaaattattttatgattttttaaaaatag

SEQ ID NO: 3899 - DNA, 1400 bp, mus musculus
atgtaagaccactgtttcctttaaaaatttctcaggggttgatctagttcacatcaaacaaagatgagcaattcctacttaattaggaaaaataattacaccaggtcaagcatatgaggtctcaacatttcaaaattaattaattaattaaatcaattaattgttcattctgtgatgctgataatggaatatgttttccaataatagactatttaaaataagagaaagttctcaaacaagatttttgtggactgtgtgaataccacttaaaaactgaccataaataaactttctctctttaaaggtatttcatctaatctcttcctaccttctggtaaattagtggatgcagataccagatttcaaaagataataatgaaagtagagagattatgggtggaataactcatcaatcagccttaacatttgttttactattaaaatacttttatgtacaattaagcagagctctataactcacaaaatgtataaagagaaaaatgtaaacagtaagcaatgttttgaaacaacccatttttaacaaagagacaaagattcataatgatagttgaaaatacaattctaaaaggagacaaaggtggattgtgagcgcctgactcgccagcaaagcagacaccacaacaggatccttctgcacacgtttattgggagagcttgattgcagaggcaaaaagaccctgagcccagaactggtgctgcttatataggcctaggagaggcgtgtctcacacccgattggttatgctttcagcacctcacagaacctcattaacatgcctgggccaggcagtgacttggcaaaaaactttactgcatatgtacacattggttgtttacccaaacttatgcgtggtggccagcgccaccttgtaatggcatatgtggcttcccacagtgaataaaacaagaccagacatgagaccagcatcaagttccattcaaagaagcacaggttttttgtagatttggcttccgaacactttgaagacaatggaataaacctttaaaatattatagtaaataagatcaattgtaataggacaaatgttgtatgttttcatttactcaaatgatctgtaaagcgttttacacatgtaaaacgcttaacactggtagtatgcagctgagagtgaagaaaaaatgtattgctttttaactgtcattaaagttcttacaccttgactaagctatagaaatattacatacaatgagagaatgtccattcatataaatatatgaatgacacatgtgcaagcatgcacacacacacacacacacacacacacacacacacaaatacacccacatagatgatagtcttataatatttgacaatttcatgcaggtatgaaattcattctgtcacaatcaccacccat

SEQ ID NO: 3900 - DNA, 1000 bp, mus musculus
agggagagagtctcagttccccagcaaatgtttactgcatgtatactcaagtatagtctcagaaccttgggatcagctttgggaaccttttgtctcaccattcttggacttggaagttttgttgacttcttgagtctcaggaacaccctcttctttccaggaggttattgcagtttgctacaaaacatcctggcactcttttgagttttgtcactagcattatttgattaagccctcagaacaattacatgatcacctccactttagggatatggacgctgtgggtgagtgtcggcagctgcctgggcatatgtagctctcatggtatgaaccagagctgaagcagtcactgctggctgctgcatcaccgccactagactgacccctctcgagtcctctgagggcgcagagggtagaggctactcaagagttcacttacatttggcatgtctttcctcttacctctcaaagccttgccttatgcttctccttcccgtgtgcccctttgctctgcagacatgtctgtctcctgcttgttattcacagcagtgtcacctgtgcttttagtcacgtatgaccaaccacagtctgaaactatcagacagaagcttccagaaacaaacaattcataagctgaaaattgtctggcctgggcatggttctgtatgccggtaaacccaacactctagaagcagaagcagatgcagaaggctctctgcaaggtcaaggtcaacctagtctacagagtgagttccaggccagctagagaaatatagtaaaactctgtcttaaaaaccaaagagactgagatatatgtcctcctaatagtgtgctcacatcacagaccctcctgaccctcctccccatgagtcctccctttgcccaggttatcccatgctgtactgcccctgctcatttgtcccttagtcacctactagctgccttagatggtcagacacactgtctcaatgcagtccttctgttaaagtaggtttaattt

SEQ ID NO: 3901 - DNA, 1000 bp, mus musculus
cagtccttgcctgtcaaagcagagtccaggttaagggggtatctgctgcctttttaattattattattttttttaaggattcttaggttaggggcttaaatggggaaatggggagcactgagaagcgtgatttggagcaagagacttgtcagaattattatcaacacagaaaggcaacatggtgtggccctgaggagagttcaggcctgtgaggcaggatatgggcccttttcttcagatctcagaggaaggcaaaggtcggtggtccttggtactgtccttaggtgtctcttgtacccaagctggtaagggagggtcttgcattctgggaaagagaggaagggatcttggtactgtgtggcttagaggatgctggggtactgggtagaagtacattaggttaaggtgttcctattagatcagtagctttctgatgttttcgagcccagtagcctgggcttacacacttcctagagggagtgagaacagcccctaccattcattttcctggaattcatatgcccaggcaatcttagaaggttactcagtgaggcatctttgcccggtagcagtaggcattccagattcaactatgagtgctgagatagagagatgagatgaggcatgccctgggcagcagctcatctgaaatctaacattattttcttggaatctggatacctggtgagcttattagagggtcgcagaggcatgggagtctttggatagtgggcttggcattttctttatggcagccgagaggaggaggttcctggaatctggaatctgtagagattagaagtctgtgtagttgctcggacagcttcttcttgctgggactggcttgttaatcaaggatgaacatattttcagaaacagccctgagaggctctttgctctgcgtgtcacagtgttgcacagctcacttcagaatgcaacaataaggagatagactgccgtagaccctctgggcccctttgtctgcgtggaatgggtctct

SEQ ID NO: 3902 - DNA, 1000 bp, mus musculus
aataactttaatataaaatgtaaaactaaggcatgaatttgagggggggcactagaggagtcagcatggagagggagggtagaagtgatgtgaacacacacactcctggacgatacttccaaagcaatcaatagaaaggtcacggttcagactctgaagttcggttgctgctgaatgcatcttgcatttcagctctgctaagctgagcgactgtcagtgacccatcattgtcagtaaatcatctgtacaatgaagtttaaaagaccaaagccctttcaccaccgttcattttctttctaggccccggctttgcacatcaattttggcgtctagcttcattagattcatagtgtttccaggagccacaattgaggcttttctgctttatcactgggtgattctaaagtttatgatactcacagaattgtggaatatctaaaaataatctgaggtattatattatctatatatcactgcatgacaaacaagattcagaatggtatatagtaaacacctagcatagtattatctcttaggtcattattacaaaatcagtatatttagactcacgaaagggaagaatcgctggcttactcaaacagaagacgacctttagcatctgttgggtcattctagactttcttcagtgtttttacatgtggatgtctcgatgtggggtacatctgtgtgtgtgcatgctctcatgtgagtgtgtgtgtacgtgtatatgggtgtgtcttcttccattgggtttgcaccttgtatctaagggcagggtctcttgctgaactcagagcggctggttggttagtctggctagccatcttgctctgggatcccatagcttcaccttctgaaggttgggataaaacataggcagccacacccacattgtaggtgggggctggggatccaaatggcagcccctgtgtatcagctcactgccctgtgagccggcccctccagctcttgtttctttggtttttaaagacaaaactca

SEQ ID NO: 3903 - DNA, 1400 bp, mus musculus
acaggttcagaggttcagtccattattgtcatggcagaaacatgacagcatccaggcaagcatggtgcaggaggagctgagagttctacatcttcatttgaagtctgctagaagaatggtgcccacctggttagaaggagggtttcattgcccacccccacagtgacacacttcctacaacaaggccaaacttactccaacaaagccacatctcctaataatgctacttcctggaccaaatgtattcaaatcactacaccaagtcataccactatgagagaataaccttccctacccatgacactttgcttatttctttcagccatacatgggtacagtaaatctttcaactccctctttctataaactaaaagtttaatacactgacctaatagatattgggtgtgttagatgggaaaaatacgtgatggaaaagaacaagcaattatcagactttgctacataagtgttagtatttagttatgcatctgtctaatcccttcactcctgtttccctcttcagtatacagatcacagaaggatgtggatccagtctccatccgggaacccaactggtcaatgaatctcaataagtaacacccagcatccagagactgccccacttggggatccaccacataaacaaccaccaaacccagtcactaggcagatgccaacaagagctgctgacaggagcctgatatagctgtctactgtgaggctctgccagtgcctggcaaatatggaagtggatgctcacagtcatccattggacagagcacaaggtccccaatgaagaagccagagaaatacccatgggctgaaggggattgaagccccataggaggaatatcaatatgaactaaccaggacccccagaactccttggaactataccaccaatcaaagaaaacacatggtggaacttgtggctctagctatatatgtagcagaggatggtctagtcggtcatcaatgggagaagaggcccttggtcctgtgaagactctaagtcccagtataggggaatgccaggaccaggaatgggagtgggtgggttggggagtagggggaggatggaggggataggggatttttggaggggaaactaggaaatgggataacatttgaaatgtaaataaagaaaatgtctataaaaaattaaaatataaataacacccagatgaatgagtacatttgattatatatgatataatgttgaatttccctcaacctgaatttttgttatatgttctctcaatgtaaattttacagagcaatttgttgactaattttttgacttgataacatggttcacatgggatttagccaacaaatataccaatttcctttttctttttttaaatttattttattttatttttttctgacttttttta

SEQ ID NO: 3904 - DNA, 1000 bp, mus musculus
cttgtgcacagaacagtcagcagtgatggcttctgggacaaatgtttgggtctctgggagtttcttctggatgtggatttagttcagggttagaaaagtcagaataagctactgggctactagcctctggtaagtagtgggacttaacaagttgcagagaggagctaaaggaaatgtccccaggaagctgaggcagacctggagctgcaccgagcagctggagattaggtttcggatggtcgtccgtgttgactggtacacttcgtggcaagtgagactgccaccgagacctgctctttgacaacacagccatgtccaggagagggcacacgtggtgaagacagcaggtatacgaagagtgattggaacgtcagccccgcccttctgaccctgtgttcttccccaggtgaccctgccctcagcatgagccattggatgttccatcagcaggcgctgcaggagtacatcctgatgtgctgccagtgtccagccggggggcttctggacaagcctggcaagtaagtgctcccttggggagagggaattgccacccaggctcactaagagccaggcccatcaatcaacctgggcatccctgaccttcatctgcttattagcactaacgtgaaggggaagtgccacggttggggtgaccctcaccctttcagtaccactgagtggtcacctctgctactcaccagagagtcactcgtcagagacccccagctcataggcacctccctacttccccagagaggtaaatgggtggctgacttggtagcttttgtccccagagatagggtttgtgtgtagcccaggctgtaccagaactagctatacagaccagagaccagttcaggctgtccttgaactccgagatccacctgcctctgcctcttgagcaaaaggcatgtgccaccgtgcctggcttcctttactttttttttgttctgtgtttttcttgttaagtccatttaactagaataggatgtggatggag

SEQ ID NO: 3905 - DNA, 1000 bp, mus musculus
cctccccttctcctctgacaggagggaggtctccctgggtatcaccctaccctggcacatcaagtctctactggtgtaggcacatcctctcccactgagtccagacaagctgacttacaggaatgggatccatgggcaagcaacagatttaggaacaaccccctgttccaggggaccagcatgaagactgagctgtacatctatatatgtgtggggtgcaaggggtggggagcactaggtccagctcatgtatgtactttagttggtggttcagtctttgggagcccccaagagtccaggttagttgactctgttggtctgcttgtgaagtccttttcccctccaggtccctcagtccttccattcaatgtttggctgtgggtctctgcatctgtttcagtcagctgctgggtggagcctctcagaggactgttatgttaggctcctgtctgcaagtattacagtatcattaatagtgtcagggtagttcttgcccatgggatgggtctcactttggggcagtcattggttgggcatttcctcagtctctgttccatctttgtccctgcacatcttgtaggcaggacacattttgggtgaaaagttttgtaggtgggttggtgttcttatccctccactgggaatcttgtctggttacaagaagtacctactttaggtgccatatcccctcatgctagaaatctcagctgaagtcacctccccccaccaagactccttgggacctcccccatcccacttctccagcacaccctagagatgccaccaccactatccccaatttccattcactttcctggacctctctcctgtctctccccacattccctacccatcttctctcccacccagttccctccctccatctcccttctatgagtattttattcacctttctaagtgagatccaagcatcctctattgggccttccttgttgtttagttttttttgggtggcagacccttatttttaatcttagtc

SEQ ID NO: 3906 - DNA, 1600 bp, mus musculus
aaatttatgtatctattacatatgtgtttttgcctgcatatatatctgtatatgatttaagtgaagtacctttggagggcacaacatactaattatatatattttgattttacatattatgaatgattcataatgttaagtttatgttaaacaaaaattagacaaatacttgtatttctctgtatatatctcttaaacgtgaaaaatggtgtttgcttatatattcatgagttttaccaattttggtggtaagtttgttcttttggtatttctagaacactgccttgtccccctgagtatacttgtcatctcactgtagcctcactgattaaatgatattttggtcccttggatcatgacattaaatatgaaggaaaagacaggattgctttctgggaagcaatcatctctaaatatatactgtgcttatgtgctgatattaagacgggttgctatggtgaattgaatttcttaaaactgtcagtcagcagagggtaaacagtggcttctgaagtagtgattccccatgaagctggacattctcacactgtattttcataaaggttaaaatctagttaccatgtttaatgaattatttaggaaatttcaaagtatctttaaagtgtttattatatgaaatagaagagttttgtttgctccagggacagtgccaggtggggagtttgactggggcggtacacctgtcaaaaggtaatgcaggtgtcctaaggcgagctcagggaggacagaaacctcccgtggagcagaagggcaaaagctcgcttgatcttgattttcagtacgaatacagaccgtgaaagcggggcctcacgatccttccgaccttttgggttttaagcaggaggtgtcagaaaagttaccacagggataactggcttgtggcggccaagtgttcatagcgacgtcgctttttgatccttcgatgtcggctcttcctatttttcactttgctacccacagttttgttaattctgaaaacttactacagctgtcttgctcttggtcattttttaaaattcttttataatttggtttgatttgcatgagtgtttgtttgcattgtacatgtatgtgccatatatatgtgtgctgttcatggaaaccagaagaggatgttggttcccttgttgctggagttgtagttggctatgggctattttgtgggatctggggctcaaacttgaattagcaaacaagtgctctacttttttaaaaatcaatataagtaggtaaactggtttatttatttttttatttgtataactagtcataaagccttgctcaaactttatttctgcccataactacgtttaaaaaagattatttgtttgtttttctcttataattacatatttttattggctattttatttatttacatttcaaatgttaccccctttcctggtttcccctctggaaaacccctacctgatcttcctcccctgcttctatgagagtgctcccctactcacccacccactcccacctccccccattggcattcccatacgctgggccatctaaccttcacagcaccaagggcctctcctcccattgatgccagataaggccatcctct

SEQ ID NO: 3907 - DNA, 1600 bp, mus musculus
ctgttcgcaggttatcttgacgaatcaaattacgacccatctgagtggagccctcccttctcaagcagacctggtgtctccagctgatgatttgtccctgtctgaaggtaaaggatctgtcctggggagactgaaacttgacactgacttacagcctcctgcctcctgttgagagccgggagacatggctactgaactctggtcagttctgctggctggagcctggtgatttagacttgggcatcttgagggacagtgatctattcttgtcttttgctggctctgagtgagttccctttgaggcatcgtcatactcatccatcattgccccatggatggagtcttgttacccctctgcggtgcccccctaaccagttgctgactatttctgagactgatactccagcattgcctttattggtggtcccctgtggtgatctcaccttttctttgaaccaaacacctctagactgtctgaaagtgtgcagtggttccatgtgcaggtgatgtgacattcctgatcagctgtacagaaggaacatgacaaggtcttcacaggggcaaagctgcccattttctatgccacctcctacttgcaaaggtcagacaggcttgaattttgaaggcagcgagccttgagtagttgggggaactacatcagcagccagaaggtggtttctgatgttgttgacagtccttccttgacatttctaggctcttctagttgcagttgaatttggggcacggcgctatgggaagcacacagtccttctagcacatcttccctttctactttctaaaaattggtcatgatggaagacaggggactttcaggcctggcaaggctcctgactgcctggccaggtaggcttcctggaccactttagtctcagcctggaagccccacatgtctgcttcttggtgttgtctttggagtgaaagctaatgatgtatttgtgaacgctgtgaagggctgtgtcccttcctccctcactcagtgctctgtcaccctcctgccacctgagctgagacttgaacaagctgaaattcacctctccttcaacttctctcatcaaatcagtttcagctttctttccaaatatattcttcacaagtctcttcattttctttgtgatttgtgttgtgatcaagtgatttattaaaactcataattggctcattttaataaaccctgtaggaccttctgtttccattctactctttggcttccttccagggtgtttccctcctactcagctcgctgagggttgtctttctgaggatgtgctaaaagaagtgtgccgatttgaaaatattcagggattttgggtttattgtaacaaccatgctatacaacatggggttcagcaaatgcaaagacacccgtatctttcttctgagtggaccagttcctagaaccccactaaacaaggctaatctttcttaaccattccgggtcagctctctccttgctagtcaacctactaagtccttgaatgaagcatccgtgtcaagtatgcaatcttctcatgcccttccctcactctagagcagcgtttctctttgtccccttcccctcttcccaaggacttcaggctca

SEQ ID NO: 3908 - DNA, 1000 bp, mus musculus
cttttcctcttcctctttctcctccttttcctgtttgtttgtttgtttttgtgtacctctgactggcctggaactcatcatatagaccaggttggccttgaacttacagagctttatgggcctctgcctctccagtgctgggattaagcttgtgcgccaccatacccctctgcaggcctgaatcacataggcgtctggaagtctccttttcattcatcctgtaagaccacagggacttttgtgttcccctggggtgaggttggatgggtgattccaaatctccaggaagagaattgtaaggtctggggaagggagtggggcagacctatgcaggcttctggggtggctgtgcaagatgtcgtagtcgaggacaagtcagagagggagcagctgtccttggctgtcattgaggttcctcagcctattcactttttggcttcctgctgggacagtgacaccctcacaccataagggatgagacttgtaggaacagaagaaaggagcagccctgggctctttccctgtagaggctggctcacggtccattcttttcttttggcacagagaagacgctgtctgctcctatcagatgagacacaggtcaagagtggtgacattcataaagtttgctctgtctctagggcctcaagcccttagggatagacctggatggacccggaaagtccccaggaaagatcacagacaccaggttaagtgggggaggggaaaggtgcagccagagtccactggcccagccagtccccgtgactcattccctgtttctgtccactctggtctgaacgccttggccaaggggccttgaggaggttgtaacataggctggccccttgcccatctgggctcagcagacaaaaattaaagatctcacccctcaggaactcacacagacagcggaggcatgctcagtgtgctgcctcagagaccagacttcaggccagatgatgctggctgccaaggaggaggggaaagtctttggctc

SEQ ID NO: 3909 - DNA, 1400 bp, mus musculus
ttgtattctgttgctgatgctcgcatctgtgattcctgatttctttcctagggtttctatctccagcattgcctcactttaagttttctttattgtggctacttcccattttaggtctagtatgattttgttcatttccgtcacctgtttggatgtgttttcctctttttctttaaggacttctacctgtttggttgtgttttcctgttttttaaggacttctaactatttatcagtgttctacatttctttaagtgagttattaaagtccttctcgatgccctctaccattatcatgatatatgcttttaaatctgggtcaagcttttcgggtgtgttggggttcccaggaccatctgaggtgggagtgctgggttctgatgatggtgagtggtcttggtttctgttaggagtttgcttttcaccacctggtaatctctggagttagttgttttagttgtctctggttagagcttattcctctcatgactctgttagcctctatcagcagacttgagagattagctctctcctgagtttcagtggtcagaggactctctgcaggcaagctctcctcttgcagggaaggtggacagatatctggcatttggacctgcctcctagcagaagataaaagtcctaaactgggcatgtcccagaagctgtgtagctttggcctgtcccagaagctgttagcttctgtagcccacactctcacctgcacagactagtctcagacggatccaggaaccaggttggctcccccaggtgctctggcaatgccccctgggtggggcaaacacctctcctctggcaaggaaggtgcccagatgtctggagcccgaaacagggtctgccccaaaagttttgtggctcctccttagcttctttagtccacactctcacctgcacagactagtcttggagagatccgggaacaaagatgggtctcccaagtgcttcggcaaagccctctcaggcggggcggacacctctcctctggcagggaaggtgcccagatatctggagcctgaaacagggtctgcctcagaagctgtgtggcttctgcctgtctcagaagcttttagcttctgtagcccacactctcacctgcacagactagtctcgaagggtgttctcattttcttgcctgcagatgaaacctatcccctcatcccatacttctacatatctaattcaattgctgtaatctaattgtactagaaatgaatttcttttgcaaacattgagctgtatgggaaaccatgatctttgtgtcccattaatgagacctgttcatggcatgaaatgaaatgcacaaatctaacaatgacctaattatggtgatgaggaatgaagaaaccagacacaggtacagaaatgttgggaaagattaggct

SEQ ID NO: 3910 - DNA, 1000 bp, mus musculus
atttttctcttcaccaaggcattgtttttcactgagcatttactcatggataaatttagattcttagagcagctgcaaggaacagaaaccccaaggcaatctgatgttgctgtagcacttgaagataaatgaagaactcagactgtgcgaccttaaggttctctggactctgctctgagagatgtttgagcaccatgctaatgtcatacctggtacagtgcacatggtcaaaagcctatagctggggaggtcacaggccctggtgggtaatctgacctagtcagctcagtcagtcaacagggcctccagggaggtagtgaggactgaaaaacaaaagacagttaggcaacactataacatgactgagttcaaagcaggtttattttttcaaagtctgcttttacactattctaggtacatgcaaagaatagggtcagttcttggatcaaagacaaagcagtctaatgaggcaaaaaccaaagtgatcaaacaagacaataaacgaagtcctagtacctaggatttaatgatcaagtacctaggatctaatcaggaatgtcacatattcctctgttgggtttaccttgagctttgtttgagcccaaatgtaaatattcttatctgagcctacttctttgtctagctgggtggtccagccagttgatgttgttcttcttatagggttgcaatccccctccactcctctagtccttccatcagctcccccaacagggtccctgaactcagtataatggttgactccagcattcacaccttcacacctctctttgtcatttgctggtagaacctccatatgagcagtcataccaggttcctgacagcaagtgcctcttggcccctgcaacagtgtgaggtttggtgtctgcagacaggatagatatcgggggggggggggggatctccacatggtccttccttcggccactgatccattttttattcctgtttgttctttggacaggaacatttctgggttaaa

SEQ ID NO: 3911 - DNA, 1000 bp, mus musculus
gatacacaatgccaaggaaggctccccatcattctgccttgacttctgtatctcaatctcctttcttccctgaagtgagtgtacagcgcctcccatttcctggtctctacagtgaggtgattcagactgttttgacttgtgggagttccagctgctgccaagtgatgtctcccgcttcctttataccccgttctccactagaagccgtgctctgcttggatcaaacagaggccttactggtttatgtttttattttgtaatccctttcttttctgttttcagattcttcgagtcctgatgtggacagatccttgttctgtgattggctgtccattttgtgtgttttcctccagcccctattttcccagacctgtttgcgctcacagtgatgtctcgtgggtggaggcagcatacgtgagaaggctcattgggatttttcattttagttttcctttttagtaattttgaatatttgatatcaccagtcttcaggtcacactgaggatggagagtgtgtgaagctgccatcatgctggaactggaagggagagctgcagggatttacagggtaataagcaaaagaaagaacaaaaaaggccatgcaccatgccaccagacaaaagagaccccaatcagggagaccccaatcagggagcttgtaactccccctgccacctgcgctttgctatattacactggcagaaaaggctccattgaactaggaatctgttgactatcccaaaatgaagaggggacaatgagtgaactcacacaattattatcaaaataggacaattccatccggaaggcctcaatggataaaaatgactccctcagtaaagccccaggaggcagaaggaatctgtaagacatttctccaacacaaaatcaatcaggctcagaccagcatgggggaataaaacgccccaccaagaatcaaactttgaaagctaggagcaaaccccagcagaactaggatctctctgtgcaactctgattt

SEQ ID NO: 3912 - DNA, 1000 bp, mus musculus
atttaggcttcctgagtcagatcagtgatattttttttaacatcctttctggggacttgaccctcctctgatagagccgaccctccctgtccttttatccagagtccatccttaattactgtgtgccattatctttccctacttgggaacctaggaatggagcagtttgcattttaccagtaacaccagctcctccttactgctatgtctttttgcttgaggcgagcgagatgcatagttagttctaaaaagacagcctggctcaggcgtccaggatttgtgtttctcctttggcacagttcccccagtttgtgtctccgaacagggctttaatcacctgggctcaagcttgccactgaaagctttaggagtaccgcagaaatggtagattaggcacatttaacaaaatagaaagttttcattgtgtcataaaaagccgtattgatcttgtccaggcattgactccagggccttttaacaaaccagtgtgtctagacttgcaggctagagcccatagtgagaacaaaagagggactggcctgcgggctgtcccctctctgcaggaaagactggggagtacctaccaatacagtttttttctgtggggccattcgtaaaagactaccatcattttattctgctgtgaagaaagtaaaaaggttactaggtttgtggcaagtgcccaggtgacagacacatcccagatgctggtttgcctggcttcgggtgtttgctgtggaactattacacaatagcaagttatgtgtcttattccatctcaagacctatccatcagcatagtttctctttgccctgaaggaagtcagtctgagctctgcggtgccaaggcccccagcaaagtaggagtgctatacacagtaagcgggacactttgtggtcattgatgaattcaactgcatttctgtataattccctataactttagccctttggggcctacatggaagatttgtaaaagcgtggaaaattgatactcaca

SEQ ID NO: 3913 - DNA, 1000 bp, mus musculus
aggcaaatgtggttcattcttgtcatgatcagaactaaatgtttctgttatccttgattatatgtgtcaggagactggaacactgctcatatttaaactaagatgtcttcctcctttgaataagaaaaagacttagttatcctggtaacttaggctctctagctagacagcggaagaggtaattaccatgaaatgttactcaccaattccagtagtgaatttttcttatacatttgatctacctctattgttcaaggaagcctgtttaggtgcttgctccatacaaaataggtaagggaaggagcagaaatgtatagaaataatagtatttcctccacctaatccactaggccggcagctaaccatcttcaacacccaggcgcaaatagccatcggaggaaaggacaaaggacgtctcttccaaggtcaactctctgggctctattatgatggtttgaaagtactgaacatggcagctgagaacaaccctaatattaaaatcaatggaagtgtccggctagtgggagaagtcccatcagtctcaggaacaacacagacaacgtccatgccacctgaaatgtctaccaccgtcatggaaaccaccaccaccatggctacgaccaccacccgaaagaaccgctctacagccagcattcaggtaaacctttcttctgcgattttgttcttctttcttgactattcaacaataatgctgtgatcagtattctaggtagttagtgactttgaactactgcctttgaaggaaggatgaagatgctcatggtaatgagaactaagactagagaaagagcaagcaaagactgagcaaattagggaaaccttgtggcactcatgagctcatgagataactcttgttatcctttccatttgtcactgaaatgggaaagctattattcaaaatgagcaatggaccttacttttattacaagacatccctctcctcttcttacattaccttttcttttcgattaacagaaag

SEQ ID NO: 3914 - DNA, 1200 bp, mus musculus
ttttctaggtaacagagagggaatatagagaggaggaagaagggaaagatgtagagacagaaacagacactacactgtgaagtcccaaaacttgttttctattgagctccattttggccctggtttgggccttgaagacaagcctgagtctgggtcgagtttctgcgtccttgtgggagagcctaagcctggctcaagttttgagacttgtctcaatcacttccatcgggatgactcagcaagacctgtttggccctgcctctgccccacggttgctgatgtagagctttgccattggtcttgtctgtcactccataccctcggtcacccttgcctgcctcctgcattatcttaacccaccaaaaatcccccttcctatgttccaaacttatataagcgagaggctgatgccaaaaaattgagttgctgctttgacagactcccaacctggctgtgtttctttttgggccatagacactcaccttcccactcagccccaaagagaccccggagggatcaggacctctctcctcgtgcctggacctgccggcaaggagccagcaacttttaataaatattgctccctcaagttcaagtccaaaggcctaagagccagaagaaccaatggtataagttctaattcaataaaacagggctttaaaatcccatctaaaatcgcatgctataaaacaccagtttcagctcaattggtcaggcaggaagcatttctgtccatttagacttttggttctacgcaaggcttctattaattaggtgaggctcactgacattacaaatatgctttaagattgattctatcttagctgcgaaccaaaaccttctcataaaatatgcagaacaatgtttgacaaacatctaggcccagtcaagtcaatatgtaaaacttaacatcatttaagagttcttcattccttagccgagcagtggtggcacacacctttaatcccagcacttcggaggcagaagcaggcagatttctgagttcgaggccatcctggtctacaaagtaagttccaggacagccagggctatacagagaaaccctgtctccaaatacaaaaacaattgctctgaaaaagatcttcattccttaaccaagaagctatcgccaattgacatctgcttacaaagggaaaattattttttctccactggggtaaaaagacactgttatattaa

SEQ ID NO: 3915 - DNA, 1200 bp, mus musculus
agacacacaataataacaaattaaatttaaaaaagcagtagcaactcagtaaatcagctagaacttcataattcaaacctagccatcttgagagcaaccgtactgagaaacgaagacaaagagaagagattctgaacagcaagaggtcttcgctcatgctgaagtccaggagcatgcagcttcctcatccacatagacaccgcggtaacaacagacagcctccagcttcacccgggagcatggggccaattccatgccattgcatatgatctcacattatatcacttgccatcatgtgcatccagtgtggggctcctcaccaatctgggctcctttaggccaaaaatgctacttctctttgttgcctaacagaatatcttaaataccaaccaatcaatacattattttctctttctttacaagcctttccttaatgtcacctcttaggtgtcaagaataacagacctcaagcatgcaggaactccagcaaggagtgaggaaacaaattctctgaagccaagtaactgcttgtctttcaggaactttcttgtttgtgtttgtttgtttgtttgtttttgttgggtttttttcttttgggtgtttttttgtttttttagtttttaggtttttttttttttttttttttttttttttttttttggtttttggggtttttttcgagacagggtttctctgtgtagccctggctgtcctggaactcactctgtagatcaggctggcctcgaactcagaaatctgcctgcctctgcctcccaagtgctgggatcaaaggcgagccccaccactgcccagctcaggaagtttctttagggcattttgtcactaattaattttgagctaacatgaggtcgtgtgggtttttgtgaatatttaaacaagaaaaagaggtttctgcctcaggccccggtgggagcctccttggctccaggactccgcggagggcaggctgcactggtgagggtgtggaatacagaggccagccttttctgggacaggtgagagccagagagcttcttaggcggcgccatcttcggctcgagacaaccggccaccttcctgaccaaagcaacacaccttctgggaaagatccagttttgggccttcatcttcagccaggaggaggtccaaacaccagataactgtgcaccttccctgaaagaggagagcttgcctgcagag

SEQ ID NO: 3916 - DNA, 1000 bp, mus musculus
tcaggtgtgtttggatattcagggcttgctgtagtaggacccttgctgggttctactagtattatattacaagggcttttgttgattttgttcttgtgcttgcctttagccatctagttgtctctggtgttggtaggcctggtgggcctgggagtggtaagtctctggaactggttgtcacaggtgtcagcaggcctcccaaaggcagacagagctgtacttggggggaggggcaggaggggaaggcagatcttcagttgcagatagaggtatggactagaagatggagctggtttttcttagtgtgcacaggccttctagaatacaggcagagctatgggctgtgaagtggggtgccaaactgagttttaaggcagagatgtggactaaaaggaagatggagctctgatctcaccaggtcatatctcacaattgctgggcttgctgtgggccaagcaggtggaggattaggatgtgggtatctcacctgtttgtcctggatgtgagcaggtctcctgagaagcaggtagacctgtgggctgtggagtagggtgcttatatgagattgtaggtagaggtgtggaccagaaggaggatctgcatagttattattgatagcactgatgcaatccaaataatacgttaatggttccattcctccggctctgtcagcttgagatgtatggtggagctgaaagttctttttctgtttgatttgtttttgtttttctagacagagtttctctttatagccctggctgtcctggaactcactttgtagaccaggctggtctcgaactcagaaatccacctgcctctgcctcccgagtgctgggattaaaggtgtgcgccaccacgcctggttggagctgaaagttcttaaaagcaacccacacaggtggttctcacacttttcagatgtaagtattccttgagagaaatgacatcctgcgagtctgattctgtaggatcaggtatgactgaagattatatattcata

SEQ ID NO: 3917 - DNA, 1000 bp, mus musculus
gcttgtgagaaatgcactattgcaatggatcctgaatttgggaggtgatttttcttctgggaactgtcctaataagaaaaatgtttcctttaatccttcccttaactcatctatagggggctcctacctgagtccaatggccagctgtaggtatctgtgtctgtctcagtcagctgctgatagatcttctcagaggttcctgtctgcaagcacaacatggcatcagtaatagtgtcggggtttggtgcctgcctatgggatggatcccaagttaggccagtcactaggtggcctttccttcattctctgttccatttttgttcctgcatttcttttcaacttgaataattctgggtcaaaaactttgaaggtaggttggtgaccctatccctctacagtgggctctgtctatttactggaggcggtctcttcaggttccatctcctcactcttgggtatttctaaggtcatccccactgagccactcacatcccaggtctctgggacttactagaggttccccaaccctgccttctgtgcccccatgccctgcagttgcccttttccatttattctcctggccctctgaccttcactcctaaggggacggcaaccccataggaagaccaacagtatcaactaacctggacccctgtgagctcccagagactaagacactaaccaaagggcatatattggctagttcttgtcccacctcccacccccacacatacgcagaatctcaaatagctctactgaaaatcatagattctgagactaaatgaagcctcaaccattttgtctaggatatcccagtgacttcttacaaggctcacgtattcataaaggtgttattctgagtccaggaaatctcaaggttgcatctttgtgggttttattaactgttaatgggcaaaagatgccatattaaaggctttgcattatggtgtcagagtcatataactaggagagggttcaaggttaatgtaaaagtatcaag

SEQ ID NO: 3918 - DNA, 1000 bp, mus musculus
aataagtggatatgaacaacaacaacaaaaatacagaatacaattcacaggactcaaaaaggtcaacaagctgaagggcccaagtgaggactcctcagtcccacttgggagggagaagaaagaagccacaagaggggagggagagggacctgggtgtgtaagggaaagaggaggagtggggaacatgatctggtattgggcaggaggaaaaggactgaagccctgagggccagcagaaagaatgaaaaaaaggcaacctcgggaggtaggaggttgggggaaggcactccacaatgtatcagagaatcaggaggtgagaaactctcagaactcaaagggagggacactagatgaaatgccctatagtggggagagggaacttgtagagcccatatccaggagaaaggcagaacatctagtgagagatgggattgccatcccacagtcacatttccaactcataattgttcctgtctgaaagaactgcagggatggaaatggagaggagcctgaggaaaagaatggccagagataggcccaaagtgggatccagctgaaggggaggtcccaaggcccagcaccataacagaggctatggagtgctcacaaaaagggacctagcatgactgcactctggaagctctaagaagcagctgaaagagtcagatgcagatatttgcactcaaccaatggacaacactgagccctgtggttgaattagggaaaagctggaagaagctgaagaagagggcaaccctatgggaggaccagtggtctcaattaacctggaaccccaagatctctcagacactccatcaccaactgggcagcatacaccagctgatatgagatcccccacacatatacagcagagatttaccctggtctgggtttagtcaaagaagatgcatctaactctcaagagactggaggcccaacggagtttataggtctggtgaggtgggggtggggtggagtggggtggggacattctggtaga

SEQ ID NO: 3919 - DNA, 1600 bp, mus musculus
gcccaaaacactctcgtttaagttatgctttctgttattgagttccagttttaactgttttttcttttaatctttaaattttattgatttgtttctcttttgtttgcttctttgttttggtgatttgagacatgaattctctgaatatctcttactgtcctggaactcacactgcagaatggctggcttgtaactcaaacaccctcctacctctgcctaagtgctgagactaaagccatgcaccatcatctcctggtcctaactgcattgctcctctgtgtcttatgcttaaagagttggttttgctaagctacaatagaatgtttttgagcaaatatcttttagtttataatagcacaatattaaatgattaataatccctacttttgctagtatttgttacatggtagtatgctatatgtttaaaaatattgcccaagattggggagagtgaacatgtagagtctgcctcccgtagaaagacgagtcatcaagtggagtcatgaggatgtcattctactgtcaaaaactgaccgagaattattcctgtctacaagaattgcagggacaaagatggggaagagactgaggatatggaggtccagtgaccagcccaaattgggatccatctcaaggggaggctccaaagcatgagactattactgatgctatggtgtgcttacagacaggagcctatcatgattgtcctctgagagtttcaacaagaagctgactgagatagatgcaaatatttacacttaaccaatggataaaggccagggacccttctggttgaactagggaaagactggaagaagttgaggaggagggcaaccccataggaagaccagcaatctcaactaacctggaccccaactcccctgaatctcccagacactgagccaccaatcaggcagcatatactagctggtctgttccaggatcccccaacatatacacaggagaagactgcctcttctgcccttagtgagagaagaagcacctaacccttgagagacttgaggcctcagggagtgaggtggcctggcagggtagggtcaaggggatgggtggggtgaggtagggggtggagtgaggtggaagagtaggatgaggtagaggaaacatcctcttggagacaggggatgagaaatggagtgaggaactgtcagaggacagaacatgagggggataatgactggactataaaaaaaggctaaaaataagagtagtaataataataataataataataataataataataaaatcatttccttgactgagaaatagaattttatttactttatttcatacattatccatcactaaggagagtagcaacaaaagtaatatataggaatacataggtttgcagttaaagttctgcatgttataagcacagacccacaaataaaaacataattactgttgctttatttatcttatgtttatatagggaaatcaagcaactcttgaacatttatatttggtttggctttgtgaatacttttgactaaatttgtgctcatatgtcatttccagtgagttacttttgtagattctttatatgttttgaaatacataattttgcatataa

SEQ ID NO: 3920 - DNA, 1400 bp, mus musculus
tttcctggtgaggcgggaggcctgtgccattgggccgacccgaccctgaccctcgattcttcctcctccccgaagatgatccgatctcatccttactcgggcgcacctcttcctctccatcattttcctcctcagaatccaaaccattaaacaagtctctgggctctgataggatggggatgtagagcgttttcttcaggaagatggagtcgttagtataaaggcggtttgtacgcttaatctgttccatcgttaccccgtatttgagtgctaatccagccagggtgtctccaggctccaattgatgctccaggcgtctttccctcactggggagcaggatgattgtaccaggcttccataagaacgagcacggctcccatgcagcagccctgaccccccgaggggaggctgtctagagggagaagccatctcctcactgtcaagacctagggtcacaactgagggaagcccagctaagtaacagtgacggccgaacccaaggaatggatattcagataattcgttttctcttctctcgtctctctacagtctcccgactctcgagagactacattcgtcgtcctcctcttgctgcttcttgccgtgcctggagttactgtccgtctcttaagaagtctgccaggccggttacatttctctttccacgagctccttacccataagtatcttccctgagctgtcagtcgctgacccggttgactttcgacgccccctccccaactcctcgcaagcctgatctctgacctttgaaccctagacaccctcatcaacactcttccctcagtgtatccccacatccaacagtcgggatgccgggtgctcccacatcctctctgttccaaataaggcccaccccaggtaggttgtggctgaggagtacgagcctgaggacagcaagagtttgtagtatatagtccactgagatccctgacgcctcgctccacatcaggaaggtcccaccctgaaattccggctccacatacaggatcttgagtctccgaacacctggatccttcgagatgtgaggtcctgtgtccaggtgagcagtgtgctcttcaaaaaaataaaaaaataaaataaataaccaaaagacttcatttcccaaaaggcacagcgtctcaaagtattgtaggaaatgcaggccccctcagggcgctggaggcgggtctctcatccactcctattatccgtaggtttggtcttctcattgtgtcctggatttcctggatgttttgagctaggatctttttgcattttccattttctttgattgttgtgccgatgttctctatggaatcttctgcacctgagattctctcttccatctcttgtattctgttgctgatgctggcatctatggttccagatttctttccta

SEQ ID NO: 3921 - DNA, 1600 bp, mus musculus
caaatgttccacagtccccaaatacttggcttaggtaataatgattttgttgctattattgctaaccaatagtatggaattaaagggtttttttgtttgttttttgttttttttttgttttttttatgagcacagcataatcagctaagtcagagtgcaataacacctaaaaacattacccatgtttcataagttatcttttaaaatgcaaagaccatgtcattatttacgagtggactgccaaattgtacatttcgcaactcaatctctggcttcatttttttttttttttttctgcttgttttcaactgtcaggaagatgactaagcacacacagagatcaatatgccctggcataccgcaggagatttgcagtcacactgcaggaataaccctcagcaaaacatgctcaaaaaccaaccatcttgttagtgttcatatctgctaactgttttgctttctgtttggaaattagctgtaagaaaatcagagaagtaactggccatcgttccaaaagcaaagttgaactacaactccgagtttcaatgatacagcatccataggaatcttgaagaaaagggatgaaaacaaatgagcaagtaaccaaatgcaaaaacaaaaaataaagaagaacaaagccattcttaaaaataagaattgggccaggcagggatggcacatgcctttaagctcagcacttgggaggcagaggcaggtggatttctgagttcgaggccaccctggtctacaaagtgagttcaagagcagccagggctatacagagaaaccctgtgtacataaaaacataaaaaaacaaaaataagaattggttgtctgagatgtacctcagtgtctctgtgtgcacatggctatctgtcacacacaaagctggatttccagcacccctacaaattgagtggttatgaccattccagcactcagtaattagagtcaggaatgtcagaaatttgtagtcatgtatggctaaccctggataaacaaggcactgaaaacaacaacagaacaaataaacaaacaaaatttaaggaacaaatgctatgctatgtaaattgcattctactaaataattaagctgttttactagatagagttaccagaaaattctaacattctattggttgttctatcttccacattacaacaaactatcttttttagcattacatctttcatgaaaagaaacatgatagattagcaaattgagagagttaaggcacttaggcagtggatcaaagacattgggaaggagaccaagaaagtgagagagaaaaagaggaatgggtaaagatgggatgtatttatatagcttattcttacaattttctctgggttgctttgtgtgtgaatgtgtgtttgtgtgtgtgagagagagagagacagagagaggcacagagagagacagacatagacacagacagatggaaacacagatacagacacatacacacacacaggaaaatctgaaagaaaggctgggcttacatagaatttcagctataaaaattgtctaagactaagttggacaaaataatattaaactatatgggatctaatctttctttatgtctaaatagaaaca

SEQ ID NO: 3922 - DNA, 1200 bp, mus musculus
attaacttaagaatatcaaaccacgccagagaatctaccattatttaagtcctttaggaaaatctcaagggaaatctaaatagctggcaagacttccgttttctgtgtaagtttgaaagtagcataaatctatggagggaatgcaaaaaatagtttgtctaagtttaatctgccttgccactctaacttcctcactaacttatttaaatgtcaaatgttattctcttccccagttctccctttgcagtccccctatcccatccccttaccctgttttaatgagggtgcttctccacccacacacccactcccacctcaccaccctagcattcccctaaactagagcatcaagccttcataagaccaagtgcctcctctcccattgatgccagataaggccccttcagctccttcaggcctttccctatctgttagggctcctatgctcagtctgatggttggctgtgagaatcagcatcagtattggtcaggatttagcagagctccacaggagacagctctatcaggctcctgtcaacaggcacttcttggcatcagaaatagtgtctggtttggtgtctgcatgtgagatgggtccctacatgaagcagtttctgcatggcctttccttcagtctctgctccactctttgtccctgtattttctttagaaaggagcaattctggtttaaaattttggagatggatgggtgacctcatccctcaacccgggggggtgggggtcatgtctaacctctggatatggtctctacaggttctccctcccctttgtggggtctttcagctaatagcatctgcatggggtccatgattcttttatttaatttctttgcttatttttctctcatcaccctcagtgtgaaccttcactcacatttattccaaagagtcttccggtcactacagaagcactaagcactttcaggctctatatcctgtgcattgtctgttcctgtatggcacactgacctaacagccattcatgcttgtcaaattttttgtgtgggataatgtagggaaattttcatggtcaagatacaagaatcatataagatatgatgttaaacttctggcagggagtagaaagtaaatcattattacattaaaatgtctgctctatttagaaacttgataatgtcagtatcacagtttggaacttaataaatgtaaaagtgattac

SEQ ID NO: 3923 - DNA, 1000 bp, mus musculus
ggggggacttttggtatagcattggaaatgtaaatgagctaaatacctaataaaaaatggaaagaagaaaaaaaaaaaaaaaaaaaaaaaaaaaaataaaacacgcagataaatatttaagtttgtgcacagacatggaataacctaacaacaatttagagaatgcatctacattcctagataagagataagatgaaagtgagtcatgaatgtgtgtatgagcttcttgtctcttagttcattctatacttctaatgtgtgaaatataaaaaccaaaaagggtttttcatgcaaattactcgtgacattactgtctctccttttccccaccctagactaattattttaagatctttcctcttctaaagaaaacaaataagtatgggtgaatctgtaggagattatatatttgtcatatatcatatatctacgtctatttctatatatatgatataatatagatataatcatttatcatatatatcctattttagagaaatataagaacacagtggcattgccaaagctaattcaagaggttgttgctaacttgtctttaccagtgtaaacaaagccctgaggacaactgagtgcaggtgaacagataagggggatgttgtttgccaaaattaataatgttgagtcaagtcccagcaataactaacaaaaaacacctgccaagcacaccaagacatagctgaaggaaagtttctggagtccttgtacccttgtgggtatccctttgctctctgcagaaagggactccagctgatgagttatgacaagctcccaatgggaacccagtcagccaggaagggcatctccttatgtggcatgcacattcacatcactttgtcacttgttattatcatttcaatgtaatgatacctcagaaggaaagaaaaaaaactcaatatttgctgctgacttaatcctgacaagggaattaaaataacttattaaggcttctaaatgaacagctccagatattagaactggc

SEQ ID NO: 3924 - DNA, 1200 bp, mus musculus
tatatacctatataattttttcgcatatatattggtttttgtgttagcgattatgcatttctcatcaatggggtaactttattttgaagatttagtttggctccctttttttgtgattctaatccacagataactgttgtgggtggctttgtgcaccttgtatttttatgttaattgtgttcaacagggagaggttgtctggaatgagtcacatacacaggtggcttcttgtgaaccaagtccctaatgaagaaaggagccaatcactgggcaagtaggtgggacttccgggttggatggaggaagagggaaagctggagttaggttctttaggaactgggacagagtatgggtaagatgtagctgctagagtatcctgttatcatggcagatatgcaaggatttgccacctgaggaactggattttaataaggcttacaagattaagttttagctgttgcgcccagagattgagttaccattgtttctgaactaaatttgtgttgggttttccttcacttggaggctcatctggcttcaagagagaaaggtatagcagcaaagcgtgggtttgccaattgctcatcacaaagtatttgaagcatggggctagctggcatagtagcgacccactagttggtacttagtgagctgtgtggagatggttccgaagctctgggccagagagtctccacaaaataaaacaggttggccattgtctgccagggcatgaccggcaagggagccagggcagagagttgccagaacaagtgtgagaatgtgccagttcttcttaaatagttcccataacagataaccagtaacattgttccctgtgaagcataacaccatcacagaagcatgaaagagattgttgttcactaatttttagatgaccataaaggaaaacgacttaaaaggttggactaaatatatgcttccaagacaagcacatattaacttgtcttttccagactggccccccacttccaacatataaacgtctgtctaaatactccaaccatctgcataccaaaccttaatagtatgagcctgaataggaacttcatatatgaactacagatgtttgcatgtgttttatcccaactatactattatagatgctgactaaagaacctgggccatggcaattctcaatgtcagatagcactaatatagttgaacaaatcactaataaaa

SEQ ID NO: 3925 - DNA, 1400 bp, mus musculus
actagtttaaaggctttcagggatcatcaaaaaataaattatctgcagataatgcaggagcgaggcatctactaagcagaaataggacatgaccagactgaatggagagaggagatgacttgtattgggtgtgggaaacctacttccaacaaaggggacttggaggttgtaccactgtgagggggagtggcatgtgggaagcatgaagaatgtaaatcttaaaacacaaagtgtcagatgaaattatagagatcactatgataaaatcattaggctgtgtatgcattctttactttttcttgaatgtaagttcttcagatttagttagttagttagttagtttagtttgtttgtttgttttaggaccaatcatctaatttatttttcatgtacttttctttcattaattatatacttagttgctttatactccaagatcatatcttcctctatcttctttcttctcagtcctccatccccttctctcctgttacctctcctcctcagagaagggaaggcttctaatgagtatcaactggccttggtatatcgaactttggtaggcacaggtgcgtcttctattgaagctagacaagttagcccagttaagggaaagttttccaaagacaggcaaaagaggcagagatggcccggctctggctattatggtcttatatgaagaccttgcgacacatctgatacatagatgtagggggtctaggtccattccatgcaagctccctgattggtagcaaattctcagtagccccatatgggcccaggttagttggttttgtaatttttcttttggtgttcttgatctctctggctccatcaattactcttccccctcttccaaaagatttcctgaggtctggctcacattttgctgtgtgttctgcatttgtttccattagcagttgagtaaagcctctgcgatggcaattatgctaggctcctgcctgcatgtataggacaatatcattaatgatgtcagaggtgggatctcttttatgccataggtctcaaattgggccagtccttggttgtcttctccaccaatttctgctctatctttatccctgcacatctaaaaagtaggacaaattgcaggtcaaaagttttttgggtgggttggcgttcccattcttccattggaaatattgcctggttataagaaatagctatttcaggttccatatctcatgttgctggtagttgtagctagagttaccctcatatcacatcctaggagtttcctttcttgcagttttctagctcatctaagagatgaccctccaccaatcccagttctctctttttagtcatccccacagttgaaccctcctgttacccttctcacacactctactacccagttctctccctctatctaccac

SEQ ID NO: 3926 - DNA, 1600 bp, mus musculus
attaaccactccttccccatgatgcagttctgaattctccctgtagcagggggtcttcgctcgtgcctgaagatgtttcttgtcccgggttttcggcaccacttcttgcgcacaccggactggccagcagtaacgatgctgcaacaggatccttctgcacatgattattgggagagcttgattgtagagacgaagagaccccgagcccagaactggtgctgcttttataggcctaggagaggcgtgtctcacacccggattggttatgcactacgcctcatttgcatgttcctcatctgattggctactctctctcagtaccacacagagcctcattatcatacctcatttgcatgtctcacatctgattggttactctctcagtaccttacagaacctcattatcatacctcatttgcatgtctcacatctgattggttatactctcagtaccttacagaacctcattgtcatgcccgggccaggcagtgtctttgcaaaaactttactgcatatgtacacattggttgtttgtccaaatttatgcgtggtggccagcagtagtcagtgccactctgcaacggcacatgtggcttcccacaatgtacagagtcaggaaattgaaccgcagtgtgtagcaatggggcatgggacacaggaggttgcaaccagatagtcccagatgccaggaaacaagaacatcccatgaacccacaggaatgacattagctgaaatgccgtacaaatgggagggagaacctgtggagactatatccagagcttaggcatggccctccagttgaggaatggggccactcatgcatctccaaagttttaacccaaaaatgctcttgtctaaaggtaatacagggaaaatgagtggagcagagactgaaggaaaggacatccagaaactgccccacctcgggatccatcctacttgcagacacccaacccaaacactactactgaggccaagaagtgcttgctgacaggatcctggtgcagctgtctcctgagaggctctgccagatactgaacaatatagatgtggaagcacaatcatgtgacaaagatggttgtcacagccaaccattgtcttgagcacaggaaccccaatggaggagttaggggaaggaccgaaggagctgaaggggctttatttggcatcagtataggcccttggtcctgtgaaggcttgatgccccagtttagaggcattctagcattctagggtggtgagtgggtgggtgggtgggggagcactgccatagaagcagagtaaggggtgatgggagagaaaggaaaactagaaaggggaaacatttgaaatataaacaaaataaccaatgaaaaaaagaaatatcataccaaatgatttctagcttgattcctctatatcatacactcaaattacacagtgttttcatcagtagtcttacaatatagttatgctagacagccaagtgtaatggcaagagtctgtactatttggtaagtggctttaagtcttcttgattaataattcacaagtcactctctcaccaaatggcactatggtttgtttaataaacaatagtcttttttaagagcaggtttt

SEQ ID NO: 3927 - DNA, 1200 bp, mus musculus
atgtttgaatgcactttttaatttataagcactctttagacatattgtttcctaccgagagccagacaattagaaaggatagtatgaagcacatacctggcattatattgggacccaagaacctgtggctacacatgtcttatacccttaatgagaatctataatcattattccgtagaatgactgtcatgttaaaccaactcctaatgacttattgagctacccatagattaaggcatcactcaacactcatcaatgaagcagatgataattaacaaagacaaccgccattgctcgaggtgtggagaatgagagattgtgggatcctcagctcaaatagaacatctgtatcacacctcttccttccaaggctcaagaatatttatgaaagaataaatataaaggttttgagatccaaaggcagtggataacaataggataacttgtttggtggacacagcagggtaaattgaaaataagggtgaattcacagtaattaagatagaatgcacaatacttgagcaatctcaagttaaaaaataaatccaagcatagagaggggagggaggcatgaagtcacctaaagctaagcagttattggtcattgacagtggctgggtgaaggaaagtccattttaagcatgcattccctggtgtgttgaccatgctccaacagagggctggcatatacattcaacagtatatgggcaggacaactgtatctgatgggtcattgcaaacagaggacacagagatgggtagatatggaaaggagcatggtggtgaatatgctcaaaacaaattgtatgaaaaaatctcaaaaaactaaaaaaaaaaaaaaaaaaaaaactaaaaaaaaagagagagagaaaataaacaagaacgataccaactaattttatgaactttactagtttcaaacatgttaaaaattatgctttaaagttataaaatccatatgatcattagtttaaacactaagaaaatatttggcattaaagaagtttctcagaagaatatgttcttgttcacatctctaaaatcagatttctttaagaaatatacacaaaagtaattagacatgaaattacatgttatgtggaatttacatataaataatatatgggtggtagagcatagatgtttatgtaaatgctgtaagaatggccataaatgcataagtggagtagtggatgcaca

SEQ ID NO: 3928 - DNA, 1000 bp, mus musculus
tataataattttattttttaaatgctaatacaaggctggagaggtagatcagcaattcagagcactggcggcatttacagaggactcgaattcagtttccagcacccatgtcaaacagctcacaaccttctactcatccagctccggggtacctggcactctctttcgcctctgaagatcctcatggagcatggagacacacatacccattaaaaacatctaagaataataaaactttgtcaaaaccctacactctcttaattaataaactctatgtttatatatttacagtgctggggatccaacctagcaaaccacaaagggtaagcaaatgctcttctagtgaggcacactcctgggcttccagcttacaatgataaattgcaaaggtggacatttaaaggataagaggatcagtggggcgggagagtgtgggtggttgagggaacactctcatacaggcaaaggggaggcaggagggcagatgtgggatgggggcgtggcggggaaaccgagaagtggcatattatgggatgggggggcgggttggtggaggaggtaactgggaagtgggatatcatttgagatgtaattgaatggaatggttaatttaaaaatgtatgagaatgaacaagaatttttaattttttaaaggggtatgagaatgccaaaaaagattggattcattattatttgctgttaagtctcattaatctttctttagacaagaggactccatgacacatgaccctgcccatcactctgtagatcacgaacagtcctcaataacaaacaaacaaacaaacaaacaaaacccacccagcaccacctcctttaacgtcctgtgtagaatcatttctgccagagttcctgtatggtagttacaagtctagacaaatcatgcatcatgtcaatttaattggcagtaaagggggaatggtctcgtatgcttagacaggaatgagattgggtcaccgagctttttaagtgctgatctgtt

SEQ ID NO: 3929 - DNA, 1400 bp, mus musculus
gtttctaaatcggatatatatatataaacatatatacaatatatataatatacatattatatatatgtgtgtgtgtgtatatataaatatatatatatatatacacatgtatgatagaagaaaatcttgagatggaggatgatggagaattttctcaaagcacaaatcaaaaacaaaacaaaacaaaaaaatgttatctcacctcttcctcttttatttatttgtttgtttatttatttatatttatttttctttctcttttattagatattttctttatttatatcacaaatgttatcccctttcctggtttcccttccaaaaaccccctatcccatcctccctccccctgtttaccaacccacccattcccgcttccctgtcctggcattcccctacattgggtcattgagccttctcaggatcaagggcctcccattgatgtccagcaaagccatcctctgctacatatgcagctggagccatgggtacctccatgagtactctttggttggtggtttagtccctgggagctctggggtactggttggttcaaattgttggtcctccctcctatggggctacaggctccttcagcttcttcagtcctttctctagcttctccattggggaccatgtgctcagtccaatggttggctgagggcatctacctctgcatttgtcagacactgtcagagactctcagaagatagctctattaagctcctgtcagcaagcacttgttggcatccacaatagtgtctgggtttggtgactgtatgtgggatggatccccaggtggggcagtctctggatggtccttccttcagtctctgctccacactttgtctctgtatctcctcccatgggtattttgttcccctttctaagaagaaccagagtctccatactttgctcttctttattcttgagcttcgtttggtctgtgagttgtatcttgagtattccgagcttctgggtcaatacccacatatcagtgaatgtatgccatgtgtgttctttttttgattgattggtttacctcactcagcatccttagtcatcatggaaacgcaaatcaaaacaatactgagattccacctcacaccaatcagaatggctaagataaaaaactcaggtgacagccgatgctggtgaggatgtggagaaagaggaacactcctccattgctggtgggattgcaaactggtacaaccactctgaaaatcagtttggtgtttcctcagaaaattggacatagtaataccagaggacccagctataccactcctgggcatatatccagaaaatgctacttgtaataaggacacatgctccactatcttcatagcagccttatttataatagccagaagctggaaagaacccagatgcccctc

SEQ ID NO: 3930 - DNA, 1200 bp, mus musculus
ttctccactcctgggcatatacccagaagatgttccaaaatgtaataaggatacatgctccactgtgctcatcgcagtcttatttataatagccaggagctggaatgaacctaaaagtccctcaatagaggaattcatacagaaaatgtggtacattcgcacgatggaatactactcagctattaaaaacaatgaatttatgaaattcttaggcaaatggatggaactacaaaaatatcatcctgagtgaggtaacccagtcacaaaagaacacacatagaatgcactcactgataagttgatattagcccagaagctcggaatacccaagatacaatccacaaaccacatgaaactcaagaagaaggaagaccaaagtgtgaatacttcgttccttcttagaaggggaaacaaaatacccatggaaggagttacatagacaaagtgtggtgcagagactgaaggaatgaccatccagagactgccccatctggggatccatcccatatacaatcaccaaacccagatacttttgtggatgccaacaagtgcttactgacagaagcctgttatagctgtctccggagaggatccaccagtgcctgacagaggtagatcctcaaaacttaccattgggctgagcacaaggtccccaatgaaggagctagataaaggaccaaggagctgaaggggttagcagcccataggaggaacaacaatatgaactaaccagtatccccagagctccctggggctaaatcactaactaaagagtacacatggtaggactcatgtcttcagctgcatatataacaaaggatggcctagtcagtcatcaatgggaggagaggcccttggctctgtgaaggctcaatgccccagtgtaggggaatgccaggggcaggaagcagatataggtgggttggtgagcagggagagggcatagggggttttcagaggggaagccaggaaagggggacaacatttgaaatgcaaataaagtaaatatctaataaaaataatttatcataaaaaagatgttgagttcttttgtgatagagatttaaataatgttgtagtgataagtttttcattgatattatacattttctgggaaaattaactttatatgtttgtgtgtgtgtgtgtgtgtgtgtgtgtgctgtcttgcaattttcgaggttcttacataagatatgg

SEQ ID NO: 3931 - DNA, 1600 bp, mus musculus
tgattgtggggataagaatgccttcttacaatatttcagctctcctactggagggacaagtcaacattggaagtgtgtcaataagcccaaacctttgcctccactgtctgatggtcagtgccccagtaattgttcctttgttgatcagatgcgtgctagttgttattcttccttgtccacatgcctcaaagataggcagccttatttttgggctcttccctctaagatgctacagagtacgggggtgggggggtggattggtttcgcaacacccaggtaattggcaccaattcctatacttcaaaatatgttacagctggttgcctcgcaccccctgataaaccggcttgttggccataagccgctcctcttcatgtttcagatggtggtggtcccatggaccacgtttgagaagaatgggttcaacagataattcaagcccagattgatggcctccttctccgcctccaccaccacccaaagtccagaggcattaatttagacctctagaccatagatatacgtgttgctactcataaagccctaaatgtttccaacccctccctggccagggattgttggctgtgccttgcattgggagcctcttggccccttgtaatacccctgcttcatgaatccactatcgtcccctcccaagataattgtagttacacggaccaaggagtctaacgcatgcacgagtcaggggctcgtccgaaagccgccgtggcgcaaagaaggtgaagggccccgcccgggggcccgaggtgggatcccgaggcctctccagtccgccgagggcgcaccaccggcccgtcgcgcccgtcgcgccggggaggtggagcacgagcgtatgcgttaggacccgaaagatgacgaactatgcctgggcagggcgaagccagaggaaactctggtggaggtccgaagcggtcctgacgtgcaaatcggtcgtccgacctgggtataggggcgaaagactaatcgaatcatctagtagctggttccctctgaagtttccctcaggatagctggcgctctcactcttacccgacacacgcagttttatccggtaaagcgaatgattagaggtcttggggctgaaatgatctcaacctattctcaaactttaaatgggtaagaagcccggctcgctggcgtggagccgggcgtagaatgcgagtgcctagtgggccacttttggtaagcagaactggtgctgcgggatgaaccgaacgccgggttaaggcgcccaatgccgacgctcatcagaccccagaaaaggggtcttttaagttcttaccaaacaattttaatgtatccaccttaatgtatagctcttttaagaatgattcctttgatgcagatcttggcctagccatgtttatctcatgcaccagttatgttaccttctctgcctcaggctgtttgggtgcggggggaaaagtgtatgtatgcggtgataacgtggcttccccctttctccctgtaaattggactggttcctgtgtgccggccttactttcgccagatatagagattatacgaggagacgagcctgttcctctgcccagttttgctatgtttgtcccccagacat

SEQ ID NO: 3932 - DNA, 1000 bp, mus musculus
aaactcacccgagtccaaggagggaggtagagtcacagaagtccagagcgtttaattagcttctctgtgctcacactctttctctgatggcataatagggaatctgatgcagtaatacccccccccaaacttaggagttctttaactttttctgcctcatctagtaggtggtagggaagagtttaaacaaagaacatctgggcacatctgcaaacagccttccttcactctcagcctttgtgataggaaccaagaagatacgcccatgctcaggtgcttgtgttcaaccagtgacgggtctccaaccattccacttactaaggagccaacaagtattagggtgtcctgcatgccagatactgagatgtactttgccttcatttgatgttcaaagcaacctcacttgtttctttttgcgacaagagtcccactgcacagatcagactggtccagacctcatcttcttcccttggcctcctcaatgttggtataacaacttgtgccaccatactaggctcaaagtaacctccaatcatattcttagtcccattttacagatgaaaaatcagacccagagagttccaagggtctcccagtcattagatgccactcatgtgaccattgtttcaagtccctttggatgctcgaggggacagctgtcctgggtctccctggatttgtggatccaggtgaccgtagcatcatttgcagacctggatattgatggaagagtccttagacatttgggacagtttgctcttttttttttgctacatcacaaacagctccaaacctcaaaggcaaccaccatgtgcactgaaaagctcaagggctggaagctgctggtggcaactgcaccagactggacccagccggaggaaggtggggccatagaaaccacgtggctataggatgggtgcgggaagaatgaaaatccaggttcattcctctcctcttccctggaccaggcagcaatgggtgacattgacaagtcacagtt

SEQ ID NO: 3933 - DNA, 1000 bp, mus musculus
acacctgtgtcttcattaacagcggccagagaaacgtgggttgtcctgctctgtcactctctgtctggttgctttgggggggggggtctctcactgaccctcgagctaggctggcatccagcaagtcccagggatcctccacagtgatcctcctgcctccacagtgcttgatttacagatgtccacggtcaacttctggcatgggtgctgagagccaaactcaggtcattcgtgagtcgtactctaacccacaaagctgtcatcccagccccccttcctttacgttttgctatgatgacaatgttaaatttgtggtgatagcagtgttttacagctatattttccccaaaatgtgttgaactcaacccttaaaatgggtgaattttgtggaccataagccatcatattttttaaaaacaaagcattccagcaagtacttagcagaagaagccagtggggccatgaaggtttcacacaaggaccatatgagacaccactgcgttcttctggagtgactgagatagaacacatagacagcatcaaatgctgaagaggctcgtctgctgctggtgagactgtaagtgttcaactgcttcggaaaacagtgtctctgaaggctgtgaccacatgtccaccatacgtgcacacagtcataaaaaagcatgggactgagagtgcacaaggccttgcaggcagtagtcaatgacacagcgcacatgacaatccctgatgatggaaagacagactgtggagtgactaaatgaacactgagcatcagaagtggccccagatgcagatgggtggtagatgactatgataggacccagactagactcccagctccaccccagtcactgaaggttgatgatataaaatacagcttagctgatagcaggggtcttagatacagtctcaggacacacacactcgcccatgcacgcacacacatacacaccacatacacacacacacacacacatgcccatgcacgcacacacac

SEQ ID NO: 3934 - DNA, 1000 bp, mus musculus
agaattcttcttagaaggaggaacaaaatacccatggaaggagttacagagacaaagttcggatcagagactgaaggaaggaccatccagagactgccccacttggggatccaccccttaaacaaccactaaacccagacactatgacagatgccaacagaagcttgctgacaggagcctgatatagctgtcttctgaggggctctgccagtgcctggaaaatacagaagtggatgctcacaatcatccattgaacagagcacagggtccccaatgaaggaaagtactcaaggagctaaaggggtttgaagccccataagaggaacatcaatatgaactaaccagtacccccagagctccttggatctaaaccaccatttaaagaaaacacatggtggaacttgtggctctagttgtatatgtagcagaggatggcctaggtggtcatcaatgggaggagaggccctaggtcctgtgaaggttctatgccccagtacaggcgaatgtcaggaccaggaatgggagtgggtgggttgggaaacagggggagggaaagggggtaggggatttttggaggggaaactaggaactaggaaagtggatagcaatttgaaatgtaaataaagaaaatatctaataaaaatgttaaaaaaatcaaataaaattgggttaactagcatcatagcatgattccttgtcagttttgtgcacatttatgactatttggtagtgaggaactcattcggatttatgctggggacccttagtgagtctgcacacccaacagagagcatccatgcagcagtgaatatgggagaaaatgggaaattctgtgcacgtacagttcttcccaggcttgcaccctgtgtgcttgcttgtttttctttcagtaagttcatttgcaagtcattagttcttagtcctatttttctttcgagacagatatgaagctctccctgatggttgccttagctttagtatttggagacagaatgaccct

SEQ ID NO: 3935 - DNA, 1600 bp, mus musculus
ataagagaaaggagaatggacatacttattttaatcctgcttttagaggaaatgctttcattgtctctttttaatataacaatagctataggtttgctgtatgtagcctttattatttttaggtatgttctatccattttcaaaatctccagaacttttatcatgaaaacattgtcagatgcctattagggataattgaaatcagtatgtggtttctgtccttaagtttattttatggtgaattacatttattgaattataaatgttgaatcatctttgatttttttttttatgaaggcagctttgccttaatgtataattattcatttacttatttacatcttgatcattgcctcctttttgatcacccttcacacagtccttctgccactcccctccccttttctgagagggtgggccccctttggttatcccttccctgtgggatatcaaatctctgcaggcctaagcccactgtctcccactgagaccagccaaggtagcagagttaagggaatgggatctacaggcaggcagcagctttagggaaagctcccattccagttgttgggggaccctcgtgaagactaagctgcacatctgctacatatgtgtgagggggagactatgttcagcccatgtatcttctttggtttgtggttcagtctctgaggacgtccaggggttcatgttagttgactatgttggtcttcctgtggaattcctatccccttccggaccctcaaaccttcccctaactcttccataacactcccagtattccgttccacatttgactgtggacctctgcagctgttccagtcagcttccgggtggagcctctcagaggacagttatgataggctcctgctccaagcattaataacagagtgtcattaatagtgtcaggaactgctgcttgcccttgacatgtgtttcaatttggaccagttattggttggccattccctcaggctctgctgcatctttgtccctgcatttcgtgtacacaggatgaattttgggtcaaaagttttgtgggtggattggtgtccttatctctctactgggaatcccgcctgtgtacaggagctaggcacttcaacatccatatccccactggtatgagtctcaactaaagtcactcccatagattcctgggcgcctccactattccacatctttggcatgtcctatagataccccctaccctcacctccaatagccactgatttccattccttctcctgaccctctgactctctttcctgtctctctcaacacttgatcctggaccccattccacttccctttttctctctcatccagttccatctgtctgtctgcctcctatgcctattttattccttcttctaagtgagatttgagtattcttgcttggaccttccttcttgtttagcttctttgtgtttgtggagtgtagcgtggggattctgtactttttggctaatatccacttagcagtgaatacatatcatgcatgtcctttggttctgggttacctcagtcaggatggtattttctagttccattcacttgtctgaaaaaattcatgatgtctttgttttcaatagctgag

SEQ ID NO: 3936 - DNA, 1000 bp, mus musculus
taaactgagcatactggatccagggaagttgacagccaagattttccaggacaggtaggcaagtccattataattcctccttcatagaaatgtctgtcagatattcttggctgaagatagatgatcccatgttatagaaaacttcagggggactgtgcaggcaaccagccatctctgccacttttatagttttggaagctgcttccctgcacttcctgtttattcaggtaatatttattccttttcaagtctctgatgtggttgaagactaaatagtttctgtatctatatcaagctcaaattgtttaggacttaggaagatgtttttaggcctattcatgtcatcatgataaaaattgatttaacccttccagtgggcaccagcaccgggtcaccttgggagtcggcagacacccccaaggtcctcagaagactctccacgtgatcttaggacctctagtgagtggaacacaacttctgttccaatccatttgtgtgggacctgagacagcattaattagggaagcagaaaacctggcctgaccagggtcacaagtcccttctggtctgcaccagcactggggcaccttgtgcatggagtcatcagacaccccccaaggtccctagaggagtctccaagtgatcttaggacccctggtgagtgcaacacaacatctgccaggaggcaggtatgaacgacagatatctgggcaccttccctgcaagaggaaagcttgcctgcagagagtactctgaccactgaaactgaggagagagctagtctcccagatctgctgatagaggctaacataatcattggaggaacaagctctaaccagagacaactataaaaactaactctagagaataccagatggtgaaaggcaaatgtaagaatcttactaaccaagaccactcaccatcatcagaacccagcactcccacctcacccagtcctaggcaccccaacacacccaaaaagctaggcccggatttaaaa

SEQ ID NO: 3937 - DNA, 1000 bp, mus musculus
atgtagcaatgggggatggggagctgggggtagcaatgagaaagtcccagatgccaggaccctatgacgatgacattagctaaaatatccaacaaaggggagggagaacctgtcaagaccatatccagaggttaggcatggccccctccccagttaagggatggggccatccacccatctccaaaattttaacccagaattgctcctgtttaaaggatatacagggacaaagagtggaacagaaactacaggaaaggcaatttacagactgccccatctgggaatccatcccacatgcagacaccaaatctagacactattgcagatgctaataagtgtttgctgacagaagcctgatatagctgtctcctgagaggctctgccagatcctgaccaatacagatgcagaggcttgcagccaaccatgggactgagcacaagaactccaatggaggagttacaggaaggacgaaaggagctgaaagggccttgtctggcatcaatgggaggggaggtcctggtcctgtgaaggtttgatgtcccagtgtagaggaatgttagggcagtgaggcaggagttggtgggtgggtggataggagggggagcaccctcataaaagcaaggtaatagggggtgggttagggggtttgcaaaggggaaaccaggaaaggggataacatttaaaatgtaaataaatagaatatccaattaaaaaattaatcatcttaatcatcttataccaaaaataaaagaaaatcacacacacaaacatgagcatgtgcacacacatgtgtgtacacacatacacacatacacacaaacacacactcccacacacacaaacacatctaacaacaaaagaaaaggaacaattattggtcattaacagctctcaacatgagtggattctatgcaccaatcaaaagacacatgctaacaaactaggtatgtgaacaggatccaccgttcttctgcataaagaaacttatctcagcaaaaa

SEQ ID NO: 3938 - DNA, 1000 bp, mus musculus; identical to SEQ ID NO: 3937

SEQ ID NO: 3939 - DNA, 1000 bp, mus musculus
aaagtacatgatataccccacagacccaaataagttaaacaagtttaaaggcccaagcaaggaagcttgaatcatacttagaaagggaagcaaaataatcataggaggtagagggaaggctggttcagagtgggagagggtagggtgaacagaattgggaggcagggtcaggagttgggagagagcagaagagaggccggagggtcagaggaatgaatggaaatctgtagctgctggtggtaggagttgaggagagaatctctaggaagtgccagagacctgagagcctcctggggggctcctaaggagtccatgcgaatgaccttaagccaacagtaggaacatggaacataaaaaagtcacttcctgtagccaagcaggaactccagtagagtgataaggacaccaattcatcctccgaactttcaacccaaaatttgtcctgtctaaaagaaatgtagggatggagtagaaacttaaggaaaggcccaacaataacctgcccaactcaaaactgatccatgggcaaccaccggtctctgacactattaatgatactctgttgtgcttacagataggaacctagcataactgtcctctgagagacttcacccagcagtgagctgaaacagatacagatatctactgccaaacactggatgagggtcagagacactaatggaagagctgggggaagggttgaaggtcctgaaaaggaaagggagccccagaggaaaaccaacagagtcaactaacttggactcctagagctctttgagactgagccaacaaccaaagaacatacacgagctgcaatgaggccccggcacatatacagcagacatgtagctcattctccatggctgctgtgtctggcctcagtaggagaacatgagcctaacctggcagagacttgatgagccagggtggggaggatatccagggggttacaccatcctagaggtgaaggggagagacacactgtgagggaagggccagg

SEQ ID NO: 3940 - DNA, 1000 bp, mus musculus; identical to SEQ ID NO: 3939

SEQ ID NO: 3941 - DNA, 1200 bp, mus musculus
gaataaaatattcagaagataaatgtaaaagcagaatgaagatgacaaatgagacaccatgaacttgaaaatgggccaattattcacaaactcaaagaaaattattaagaaaaaataagagtctcagagacacatagaataatatcaaaaggttaaaacgtatataatcagaattccaaaagataaagaggatgaaacagaaagaaaatattagaataagtaatatgtatcttgatgtaggtttgaactatactattatatgtatttgtcaatatcgaacacataacatatttgaaactgaactaatacacacaaaattcaaaagtagttttagaaagtacattgtacttaagatataagtaaaaataaagttgttaatagattggtaaacttcaataaaaaatatgtacaaatatttagaaggagtatattgttggcctcagttcattcttaaatgtttcacctattcctgccaaaaacgggattaatgttggacagaaaggatggagttacatagattaatgattaaaaaaaaaccgtatagtaaaatgttaatgggacaatataagctttagatataaaagtattccttctttcaactcttttatatgcttgaaatttttcctgttttaactataccaaattttagaaaatagtgagtaaactatttctgtgtcattatttactgattaaattctttttttttctttctaggataatataactattttttaaagtcaaactggaggaactggagatatagctcaataggtaaaagcacctgttgctcttccaggggactcaagttcagttcccagcatccacacgggcagctcacaaccacttgtaactctggctccagaagatcccagtaccttcgtctggcctccacaggcatccaaatgtatgtggtatacacagacataaacatattcacatatacaaataaaaataaatcattttaagccaaactatatataaatgtgctattttatattattaccagtttctataatcggatatttcaaaaatactattcattaagctgttctacagaaaataacttataaaccttaaactgtaaatatttgtataaattttgtgtgaaagatataaaaaaagcaaaaaattaatattaatagcacttaaatggttcatgttgacttttaaatcctgatattttattgtttaccttccagt

SEQ ID NO: 3942 - DNA, 1200 bp, mus musculus; identical to SEQ ID NO: 3941

SEQ ID NO: 3943 - DNA, 1200 bp, mus musculus
tccctggagggccatgaagtacctaatgggggcctatggctgcaggagggactctgggagcaagtaggtatgggagaagctgctctcctctccagaatgcctacagtagcatccaacccaagtctgacggatgatggctgctcctgagtctcctttcaggtaggaggaccagcacctaactaccaggtgtgccccagttcacaccttacagctctgtccctaccacacaggagcccaggtaagcctgaacctctaatcccctcaaggataccctgagctgaagctgcatatctacagtgctgctaggcctgctgaggtagtatgaggacattgcccgatgcttgaggttaggccagcttttcccaggtgacaagaaatccagggcctgggggtttgggttggggagaatcaggccaaccccaggactggacagcttctaaatccccattgtctcataaggtctgagctggtccctaaccagcttcctgttcaagaacaagccgttaagtgctttacaacacttacctggaaaatcctggcttcatcaatgcaatgttgctgcctcttcccatggcagcaagagactaaagtatgtaccctatattatatgagcaaggcgttcatgttcattcctcgggaaacctgtctgcttgtgttttatgcaaatgctcagcacatacacttgggttactgtctccctcaagcttgtccatctttcaggttggcctgagtggaaaattgacagtaggtgggacaggggcagagaggcctattgaaaggatagtgtagtctcccctcccccagcctgaaacctgcatgctcaggggtggagcttcctgctcattctttctgccacgcccactgctggaccttgccgctttgctgttccgaagccatcacgtgatcaccctgctattggactccaagattaattggtgggaatcgggcccccttcccctgctttatagttgcgtgtggaacagtaaaattgagctttgatcagaatgactgtcttagctgcatttctttatcttgccacctagcccctcttctcttccaggtttccaaaatgcctttccaggctaaaacccatgttgtgatctgctggccgggcacaacaggatagaagagaggtgactcactgtgtctctagtctaggtcaacttctgcagaaagtctcaaagtccagatggagtgaca

SEQ ID NO: 3944 - DNA, 1000 bp, mus musculus
gggagcagggctggaaaagggcataaaggaaaggccagcaaagggtgggcactgtctacatggaaatggctgtgcctgcattttggcccctccacatctttgtcttctctcacctgaagatactagctatctactgggcagcttggttcaagaagggagcttaggtattgatgttcccatggcaacaagaggcctaggtgccacaggtgcaattaactttatcctgctcccagataggctgcctgcttgggaagtgcagagactcaggggcccctccaatatttcccctgggaaaaatatactcacagcttgctgtcccagagctgggtggtgaccgaggctgaggagacagagccctgtcctagtctgtatttaagcagtgggagccaagggggatatgggggagtttgctagtgaatattaaccaatgtcaccacagttattggtagagcaaacagagaggggctaagtccatcggttggacactgaggtaccacccacactgttcgggacagagctcagctctctctctggtcctaaatcaatggagtcttaagcaaagcagttagaacacccatccctcataaaaacaacaaacacaacaccggatgtccaaagtgcgtctggtgtaatgagtcacacggcctctaggaagacacaacatggctggctggtcctgcactctcctggggaatgcttgggttgcttacatgtaagcaaagtcaatatttactgagccatctgcctccagatgcctggggcagaagattcactgcctccaccaggggctcagagtaggttatgtgcccacctgacgaatggagacacaggaccaaaacaaagagattgctccttgcgcgtgtagatatgaattctttgtttcctttgcaggagaatggactgtgactgacaggaaattcctgacaggctggtgcacagtggccatgggataggctagggggcagagaatagctctgtaaggaagagctgggatgccctt

SEQ ID NO: 3945 - DNA, 1000 bp, mus musculus
cgcctaccccactatgaagtctgagactttcctgctgttcctggcagccccagcaaggtcactgctgttagaaggtgctcttgtcaaagccacagcaaacatagaccccagaggccttgaaaactattccatgttcctccaaactgggatgggagcaagggtgggaaggtgtctgcagaagcaaggggagcagacccaggctaggctcccagctaggtgaaccccacagtgctcatgccctctggacagacgaagagtgggcatagagcttccccatcaggcactcaggtgacactgaggtggcccacagtcccacagtcagagcaggttgactcctattctgatcctgttgtgacatctctctcaggttaccacacctctctggcgtctcattgtttccatctatttaatggggtatatgactgaagtaactccattgtccccttcagcagatcgttagcaatcccatcaaaggccatggcccatctaaaggaagcaaattaaaaataattagtaataatcgcagtaatggcaataataattagtaataatgagatcaagacagtgagctagctctactcacccgagtgacacactctgttctgtacacacactcctgcaagtacagtaggagtgtctggttggcctagcaaaaggacaattacattctatccaataggatatgtgctgtgaacagcaagaaggaaggctgaggtctgtatataatttggatagcactggctatcttctagctggatgatgccagaccttctgcaatacttggaagggaaggaaaagcttatctccgtgggaagaggcatcggagacacacaacccacagaaatgttccatgtacctcctagaggatcctgaaaccagggctagccactacactaaagggggcctcttgagtagggtgtggtgccacactcctttaacgccagttagaactctggaagcagaggcaggagaattgtgaatccatggctatcctgggcta

SEQ ID NO: 3946 - DNA, 1000 bp, mus musculus
aagcaccgaacccagcagtgagtactggctgtctgcagcctccccttcacaccatgcatgcagcccaccattcactacccggcaatctccgagtcttacccacgagccccatgctgtcactggcagcttacattccaatcccacgggttcctccaaagcaataaagtcagtgaagtctgcggggagccaggcgtgctggctgagttgtgggtcactttgatagggttacagtcatttgggaagagagcatcaactgagaaaatgcccccaccagttggcaagcctatggagccttttcttaagtgactgatgtgctagtgtcactgctgggcacgtgatccttaatataagaaaagggcaggctgagccagccgtgctgaagtggtaagcactgttcctctgtggcctctgcttcagttcctgcctctaggttcaggccaggtttgaactctgctctgacttccctcactgatggactgcaatgtggaactgtaaactgaaataatgcttttcaaaacctccccaagttgcttttggtcatgggatttcaccacctaacaagacaatagaagcgcatgcaagcagtcctgacttgtccacagacctctctacgtacctcttttacaacgctgtaggccttggccacgccttccctcaggtctactggctggtgggctaaccggtgatgaggaaatctctttgccttcttgggctcaatggaaagggtactcggagacaccatgtcatatgcagtctctgcggctgcctgggtcattttgtcagaaggaagaaatggattagaaaacagcctgagagctgggccccaagtgtggagggagaggctctcctgcgggggtaaagagagccccacagagacagacagagacacacacacacacacacacacacacacacacagtgcctctgcttcaacactcagaacaagagcttaggacttccctattgtgaacagggatgcaaagctagaaactggcatctg

SEQ ID NO: 3947 - DNA, 1000 bp, mus musculus
attcccccgagcgtgtccttgagtggggaggaccacaggctccccactgccctcttgcccttgctcttcctgctgcctctggccagctctagcgtggacactggttagtgcagaaaggtcaggagaagccaaaccctggggcacacaagccagacacttagggtttcagtctatatctaccaagcgtgggaagcagagcctgtatatagccttaccggtgctgatgcccgtctgtgcaaagttaattttgattcttccatggcagggggtggggatctgtctcttaagccaagtgacgcctcttacagtcaaagcttgccgggtggtggggtagagatttgctattctctatcctcagctgccccgtgggaccctagacattccagaaaagaagggaagggagagggttccccaagaatgtccagctgatagggggccctggcaacccctgacttccgttcctttctccctccccctcttcaccggaagtgtctggatcctttgagacccgggtacttatcgtcgcaggaggcaaacacagggttggctctgctgcagccaaggtgatgaagacacagggcccacgcagaaaagcgggcggtgccgaaggaggaggacacttgagggataaacaggtgtggttctggggcagagtgagggaatggcactgtaaatgggggcaacacaggaatgcctagggagagttcagcatgatccaaaattcctcaacttggagaatagagacaaacggcccagggaaacagcaggggccagagcttagtgacctccaaggtcacagccgaggtctgatatggacagtgcagacgggcctgggactggagaagcacatctggtaattgaatcgatgagaaaagtgacaataacaggctcatttgcaggcagccgccacgagggtaatggccggtggccagggaggccatatgcactgggctaacagaattaatcacgggcggcgtggcacgaaacaggagcgacaggc

SEQ ID NO: 3948 - DNA, 1200 bp, mus musculus
tttccctatagagcgtacaggaagctaggtttacattctgtttgggtaaacacttagtaattgcatagtgggctgtaaggcaaaagcccgcttcactctgaaagatgctgcctgattttctccagaatacagtttaatgatttattcttatatgtatgggtgtgtgcttgcatgtatatctgtgtaacgcgtgcctatagtgccttctggggccagaagagggtggaaccacaggtggtcatgaactgccactgtgggtcctctgccagggcagctaatgctcaacacctcagccatctctccagcacccagggcgccattttaaattcccaccagtggtacagggaagtcccagttggttcaagccctcgctagcacttggtgttatccttttcctgcttaacattagccatccaggcaggtgtgcagtgacatccccttgttgcgttaaattacatttccttagtgatgagcactgtctgccatctctcctagagcttgcttggtgtccttttaaatcttaagggaggtatcgatttaagtcttctgctaattattgaaacaagctcttctcatttgacgaggttttaggtttacagtccatctgacgtgtaccacgtacagtatctatagagaaaaataaagatttcttggtacctgcctcttgcctctaccgaggcacagcctcctccactattaatatcttccagaagggtccaagggcacgacctgtgaaattctacttgcacattctcacccggagcccatggtttttgcatcaggcctcacttcctctgaggcacatttggagggttttaggccaatgcacaatgatttgtgtctgcacacgtagtcttttcctattggctccctttgttcagcaacatggatttaaaatgctgccgtgagatgttcatgcttttgatgactcattgctttttaacaccgaataacagcccattgttcgagagcaccacattttatttacccatccgttcactaggggcgtcctagtggcttccaagttgtggcagttacgaataaagctgctataaacacgggatcttggatggacataaatttttcagttccttcgaggaaatttcaaagagcatggacacatgtggttccgagtattgtcagttgtgtaagaacgctcacgctgtcctccccagtgactcctctgttctggctttcaga

SEQ ID NO: 3949 - DNA, 1000 bp, mus musculus
cccgccaaagtcctaaagctttgtttatatgatatattttaaataaactttgtataagaaataaggaccataagttactgacactttcttgcccaaatcgccaggtcactggagagagaccagagagcagaatcatactctcacattgggcttagacatagcttatgactgtcagcaaagctcccatacctgtcactcgaggttcctataccatcatccccatccatatccactgcctagcccaagaccacacctaagacctttccatccaagactacacccatcacctaggaccatactcaccaccgaaaaccatacctgccacccaaaacatacccactgccccacccaagaacatacccatcacctaagaccctatccaccacccaagaccacacccatcacccaaagccatacccatcatccaaaacatactcacgcatcatcacccaagatcacacccatgacccaagatcatatctatcaccctaagccacacccatcacccaagactatacccatcatcccaaactacccctgcttctcaaagatcacatctgccttctgtgtacagaaacagcatcactgaataagtgaaacaaactcccagctagaggcagcagcaggaagtgtttcagtttgaactgtgttgacaaaatggctcagccctgaaaggtgtatgggcaattctaggccaagctaacaacatctcttgttcctggtgagggccagatttttgggtcatagatggtgactttttactgtgtcccagccttcagggtcacacctcaccttgccattacagtaggctttagattccaatgagaaaggggcagaaggaagcagaaaagcacctcatctggacttggggctcctttccaaggtcttccctaacacttacacagcagtcccagagaggccgctggcatagactcaatgacctctttctgggtggggaagggggatcctgggtgttagatgatggtgcttcttcttcttc

SEQ ID NO: 3950 - DNA, 1000 bp, mus musculus
ctctttctttttttaactcaaatccttagaccaagaacgaaatgagcccttgaacgtgaaggagtccacccctttccctggactctcgtatctcagctctgccacgtgcgaaagctgctggttctttctcttagtttcacagttgaggatgcctgagagtgcgtgagtcgatttctcaaggtgcacaggagggacatgttggatcttggatttggacgctacctgtggtcctgacagcacacctctcattacactagacaagtatcatcaaggggtaggcaagataaggagacaggtcccagcaggcttgaccttgtagaaaatttggaagaaggtggggagaccccgtgtatggggtgtgagggccacagagagattgcttagcttccaaaacatgttggcctgatgcctagtgtgatgtgattttgatacagggcctttggaaagacattaggtgtctcctgagtagggagagcacctttctaattaagactgcaggaacttcccttcccctttagccacagtcacagtgaaaagacctgtctgaacaggaactgggccttgccctataccaggtctgctggtattttaaccttggacttttcatcctttagaactattgggcataagccacccaggctgtgacagtatgttccagctgctcaaagggaccaaggcaggacagtgttgagaagttaggtgccattacaaccaatgccttaaatggtggaggtggtttcagacctccataatgacagcgattggaagagctttaagaatgcaccaggagaaaaggtgactggcaacagcatgtcatctctaagagcagggacctctgttcattggtgtagtccatggatcaagatgatcaatataagagttgctcaaaggggatctaatggcctcctactgcaacttgatgtcctggggtggggtggtacccaaaaggggctcccccttctctgaggagaagaagggagataataggggaaggatctgt

SEQ ID NO: 3951 - DNA, 1000 bp, mus musculus
cacatcaaattgaatggcagtagagaaactgtccaataaattatttaattttgttctttatagtgccagtattgtgaatgccacgcttagcaacactgacactcaatctcagctgtcccttacagtttaacccacctctgggccaaagacaagaatatgctgcaatttcttgtttagaagccatttaatttaaatgcaaacaaaagctttaaagtgcgggtcaacagaattcaaacatcaaatcccaacaagtccaatgtatagtatgtcccaacttaattggaggaaggaaaagacaaaacacagaaacggaagcagcgtggggcaccttggacagaactcttaccagctcctccgggaagagagaacgggtgagattcctttgccctacagtgcccatcagcgtgagatgagcgaccccgcagctaacttctccagttcaccatcagggccagttgtctgcttgggacacagtcaagttaccactgtagcaatggacacctgggatttatctgtaggctgggggctgaaaagagaagccatcttgccaggagaagcctgagagaacattgttagtctcttctttcccgccactacaggccacagctgtctacccagtgggtatcctcggcccattttatgcagccaaatctacagcaaagggcagaggcggcttcccaatacgccaagctcccccagaaaaggacattatcatatctcctggtaacacacaattgcaggatgtgggggctgttcctagagtcaccctggaaaagattctcggggtcccaagtgggggagaggctcgtttgccacgcccccctcaacattttccttccatagcatgaaagttgaattccacacagagacgcctctgtggctcaggaggacatcagtgctaactctccaatgcgatgctaagacaaagtgctacaattttaaagattgtaatccgctgtacatccacctcccggaaaaaaaaaatggttttgaaagccac

SEQ ID NO: 3952 - DNA, 1200 bp, mus musculus
ctacatgatgtcacttcagccgcattaagctggaacagctcaaaattgaataattaattacactcagcttcagttgcagtgactaattgatcaggggccgccagaagacacctggacaggattaactgggtacaataaagcctgcaggcaggtggcacaggcccccatcctccacactctgtgtgtgatttaattagggttgacttgatttctctattcttgctggaggtctcaggcagatcctatcctggcccagggtggcatctggacatggtgacaggctggggtctggaaagatacaggccccaggctacctgtgtcgtagctagctctatggcttgggccaaggtctaaccttgtggcatcttgatctccagtcaagtgggtatatcactgctgtctgtgtccagaatccagctaagccctgaagtggggtgacttttgtctttttggcccctccagagagggtgatccagctggccctcatctcttgactagctagagcagtggccccctagtcttgtatagtctggctcgctggagtaactaattgtctttcgaagctgtatttctggacctggcagctactgagtacagcttcctggatgtgtaacagtgtatgatcctttggcagcctgataaacagtcctgttcacaaaccaaactcagccaaaccgaactgtgaaagcccacagccatgtaagcggtacgtcctgctcctgagaagggctgagtgtatattgttgggctggctgtgcgtggagtaattccagcttgacgcgagtgctctgatgtggacttgtgcaatggagatggccacagagtctttatctccttcacagttgccctggtgaaaccccttggctctgtgccatctaccctcttaagtgaaccaaaatcagagctaatcagcccttggtaggtgtgtgggacagggatggagagacaaaatgaagatgcccccttggctgggattggtgatgggactgtagctccttagtggagggtcccttcgcttcctcaacctaccttatctacttctaggacaagagttcattgtcttccattagccttccttccttgatctttctcatatcctcccaacaaggggttccagctctgcgaaggcagcccttcagcagcgtctgagctttgctaagttccagaaggagcacttggacagatgtcatggtgtcgtgt

SEQ ID NO: 3953 - DNA, 1000 bp, mus musculus
caggaccaagggcctcccctcccattgctgtcaggcaaggccatcctctcctacacatgtatctgaagccatggatccctccaggaacactcctttgttgatggtctaatctctgagagaactgggtggtcagaccagcctatattgttctcccaaaggagttgcaatcttgctccactccgccactccttccagctcccccaccaggttccctgagctcagtctgatggttggctccaagcacccacatgtgcattggtcagttgctggctgaacctcccaagaaaccaccacaccaggttcctgtcagcaagcacctcttagccatggcaacaatgtctgggtttggtttctgcagacatgatggaatccccaggtggggcagttccaggttggcccttccttcagtctctgttccattttttgtcccctgttcttcctttggacaagaacatttgtgggttaaaaactttgagatgggtgggtatccccatctcttgaccaggggccatgcctttctactggaggtagtctctacaggttctatcttcccattctctgtgaatttcagctaaagtcatccctgttgggtcctgggagcctcacgtttccctggtgtctgagaccctccagtggctattcccagtacctcattccccctgatacatatgtttgttcggtttcctgaccgtctattcctctctcacatctcttctagttcctaatactgcctccttatttcctctccctcccaggccctcctctccctccacctcccatgatcatcctgttcccccacaaagtgcaggactgaagcatccacaccctagtctttcttccttctaagttccatatggtctatggattgtataatgggcattgtgagcttttgggcaaatccacttatcagcgagtacacaccatgtgtgttcttttgagtctgggttacctcactcaggatgatattttctagttccatccatttgcctgtgaatttcat

SEQ ID NO: 3954 - DNA, 1000 bp, mus musculus
gtagaatcctctggaagctctcgggccagctagcctagaatagtcagcatggtagtagaaaccagaaagcccctgcctcaacaaggtgaaggcaagaacagattccccaaagttgtcttcagacatccatactctcaccgtgatacaggtgcaattagtgcacacacacacacacacacacacacacacacacatacacacacacacacacacacacacacagactaataataacaacaataatagtaaattttacaaaaacaaatgaccttatttcttgataagaagaaaattaaaacacaatttttatatatagggtaaaatctcagacattggccaagatgctggcctcagcctagagtttaggtgggagcccgtggtacctcgagctggctcatctgaagctgaataatctctggtgtttgtgttccccccccccaagatgctctctggcacggttgctcacagacaccccacaggactcacaggccagaacattcacgggatcacaggaaggacccaagcttggaaccgttaactgctcatgttcagtagacccgctcagccacattcccagcacacagcagactgcagcatcgtcgcagtgagaacaattgtaaatcagcatgcaggaatgtgggaagacctcccacgtgtgggtgttagaacaggagaggcaagacaggagcgtgggcccgtggtgaaattccacgggtgggaagctcgtgcacaccaggtctgcgttgaagaggagcttgtggcttaccttggcgggaagttggggggcaagggggagcacaggaagcctgcagagtgtcagtctcaacgagggctgggtaaagggtcaatgggcattcaggaagccacacaaacccatgaacgttctgcgaggaccttctatttcaaaacagagatgaaaggaaggcagaactcttctggaagaaaatagcttatgtccacgggcagagtgatgtcactctgtaccctatctgcctgtcct

SEQ ID NO: 3955 - DNA, 1200 bp, mus musculus
aatgaggaaaggcatcttgtgatggtgccctctcctctcccagctcttaggaaatgctgtctgtcatgttatgacaactgatctggcacactgcagacacacacccatggccctctgcccctgagcacgtgaggctgaaggagacaccctcaagtttaggacacagcagagcccatgtctactttccctcagctacgctgctgcaggtggccgggccactaccaggagccgggagcgttctcatctatggaagggcagagtacggagtagacagctggagcccaggcgaagccggctgggcacctcagcacctcagcacacatgacaccaccagcactgactgaggttgtgcgactccaaccagcctgagtcagcccaggcaggacaagatgctggaactggccaccaaattatccaacagtggtgtttctgacacggggtgggggtgggtgtcctgtttttgaatgccatgtgcagaggctggccctcagttacctctaagatgaaaactctccagatgggaactctgggacaagtgctcttacttgctgaatatatgggggaccccacttgtgatttgtcaacaaaggacaaagttcaaatggaacgtctgaataaacacactacagatgcactggagggtatgtgctttggagacagctagacctgcaagctagggggcctctgaacctctgcctctcgagacaggactaggaggcactgcggactctgatgctgctccactctcaaagttccctaacttcttccatctctgaagctgactgggtacacatggggctgcccatggaagtggaggagggaacactgggtgtccacgctagctatgtgtaccaaggattgttaacgacaccgcacttagggacgtgtccgttccaattccaaactgggaagaaaaatgagattctggaagttaggagtgtacagcctagagcgctgcactggctgcctgcaaggaccaggagaggttatctcctatctccaaggctgcccttcccgctggcaatgcccgggcctgctgccctagcttccccggtgagggagaagggtttgagaaccactgcagcacacagactgagttgtcagccctgtcacctctgggcatctcctttggccagagagagcatcatggaggcggcctaagatgttgccagttgtccaccattatgggagcatgaagcc

SEQ ID NO: 3956 - DNA, 1000 bp, mus musculus
ctttgtcttaggattactattgctgtgacgaaacatcatgacccaaagcaagttggggaaagggtgtatttggcttatacttccacatcgctgttcatcatcaaaggaagtcagaacaggaactcaagcaggaacctggaggcaggagctgatgcagaggccatggagggtgctgcttactggtttgcttctcgtggcctgctcagcctgctctcttagaggacctaggaccaccaacccaggaatcacactacccacagtgggttgagcccttcccatcaatcactagttaagaaaatgccttacagctggagctcatggcggtctttcctcagttgaggttaccttctgtcagatagctgtagtttgtgtgtcaggttaacataaacctggccagcacagggtgtgtgtgtgtgcgcgcacctgtgagaagacattctgtataggaagcagatgagtggctgctgctgtgtccggccagcggttcacatgtctgggttctgttttgggaaggcattttggaatctggaagagaagagggagagctaggcggtgcgagagaaatatgaaaccaagacagtcagtctgatcaaggttcaattttaatgtcagcaaacacgctttataaagaagaggggaggcccatctctaggcatgtaaagttctttgaagtagataggtcatccttttagtgggaactctcgaagtcagtttggtgctaactccggaaagtcttggaagagaggcaggtagtggcacatcaaaggagcagcacagctggtggctcagcttaagccgatggatggtcacagccagccttgctaggctggaaggaggtaacaggctgccatgaggtagggaacgaataacctcatgggacacctaggagcctgacagtaaaagagatgaaggcagaggacacaggatgcatttgccccacctccgagtgtctccagatagtaatgtatggcatacacaccatacagggagttgggtcttc

SEQ ID NO: 3957 - DNA, 1200 bp, mus musculus
caaaagcaatttatatttagatatattaataagttcaggtaaacttataacataagattctatagaagtaaagtagctacactcaaatctatgatgaccctattaaaaaactgccttttcttgtttcggatacatcaaagaactatgaaagaggtttttgtttgcccacatgttgtttatttgggttttacttgccatattcataatatcgtttatttctgtctagttcagcaacaattaacaaggattaatatattattataaaatattgcaaaggcatgccatttatcttttattaagcaataacatgccaatgaagattttcactaataaagaactggtcaaaatatagtgtactctagggggatctcagatcagccccattttatttggagatgcacttgaaaagttgacaaataccatatataactgaggaggaggcagaaattgggacactcaaaatggctatttcttcagggtagtatagtctgtcatctcagttccaggcagcttcctgcactttatggtttatgacactctcaggatgtgtttgcaagactgtgtgtagtacagtaatagacggcagtgtcctcagatgtcaggctgctgagctgcaggtaggctgtgttggaggatgtgtctgcagtcatagtggccttgccctggaacttcggggcatattcagtatcaccatcctcaggatcaatccttccaatccactccaggccctgttcaggcctctgcttcacccagtgcatatagtagtctttaatgttgaagccagaagctgtgcaggacaacttgactgaggcccctggcctcacaagctctgccccagactgctgcagctgaacctctgaattgacccctggagaaagaaaaacaaagtgattgccactgtcacagagtgtgtggcccttcaagtttgggacttgcgagccccttacctgtaaccactgccatcaggaagaagatgacccagctgcatttcattgtaaggatcttgagattcagtggctgtagagaagacagggctcatatgatgtttggtgtggatatccctatattaatcatcacagtctcacatgatttgcatacaggatctttcttacataaggacattctggctggagaagaaggaagttgagtgcacctgggtcagtcaacaggatgctggggaccaaatcctgcttctgtctg

SEQ ID NO: 3958 - DNA, 1000 bp, mus musculus
ttctcattttgactctaaattgctttcactgtggggaattcacccatttctgaagtttctgtacctgcacagaaggaacaaaagttatgtaaatgaattggagtcaaagagtaatgaagataaccctatccactcttgattattaccaagaaatgtccttggcgtccagagcatgggactcattcaggatcttgcacaaaagttaatgattaatgacctggttaatgagagcagttttactaaatcattgactactctgggttcaggttgaactagccatacagccttaataagagaaagaaattacgagaaatctgtctttctattgaatcttttacatctagtctacatgattcactgacgaattttaatgcattatgtgaaccacattcattcaaatacttttttattagatattttctttatttatatttcaaatgctatcccctttcctgattcgccctctgaaaatcccctacccttacaccttttcccctcccccttctcaccaacccacccactcccactttctggctttggcatccctctatactggggcatagagccttcacaggaccaagggtctctcttcccattgatgacttactaagccatcctttgctatatatgcagctggagccatgagtcccaccatgtgtactctttgattggtggttaagtccctgggagctctgggggtactggttagttcacattgaagttcctcctatgaggctgcaaaccccttcaactccttggattctttctctagttccttccttggcaaccctgtgctcagtagaatggatggctgcgagcatccacttctgtatttgtcaggcaccggtagagccccttaggagacagctatatcaggctcctgtcagcaagctcttgttggcatccacaatagtgtctgggtttggtaagtgtatatgggatgattacccagcctgggcactctctggatggtcattccttcagtctctgctgcatagtt

SEQ ID NO: 3959 - DNA, 1000 bp, mus musculus
gagtaagacagtaatctatttttaaaggtaatctggaggtgtcatttatggtagaaattcaacacattaaattgatgcacaaggagtcgcaaaggcaacctatagttagaaacaaaacatatctgtgtttgtgtcttcaaaatttccttcttttcaaaagaaatttgcacccacatatagtttctcataaattagcaattctgttcagttgtcactttccaatgcaaacatttctttggagataaagcatggtaagttccagagaaaactccagatgttaagtagtaaaaggagaggcaatgcactctttttctctggtcatgtgcgccccctgttggtcctgagcacccctgcaaggaggtttttttctaggctcacactgaagtaccctcgctgtgtacagcttttacacagtaataagtggcactgtcctcagccctcagggtgttcatttgaagatagaggatgttttgggaattatctctggagatggtgaaccgacccttaacagatgcagtatactctgttgtgtaaccattagctttgtttctaatcaaagccaaccactcaggtgccttccctggaggctggcggacccagctcatgtagtaatcagtaaaggtgaatccagaagctgcacaggagagtctcagagaagccccaggctgtaccaagcctcctccagattccatcagcttcacctcacactggatacctgcaatagtaaagaatttgttcaggaaaatgtcacacagatccactgtccctcttacttacacgcactcacgtattcagcatcccttgttccccataaattaccatttaaaagtgctacaagtagaatccagttcacccacaacttcatggtgacaggtctgtgttcaaggctgatcactgaatctgggaactgaaggctggggaaatcaagactaggttcatatgctacagcgagagtcttcacaggattttatgagaagggggtgggttccaatttgcatgt

SEQ ID NO: 3960 - DNA, 1600 bp, mus musculus
ttacatctggccactttgctgaagttgttttattcagctggagaaattctctagtagaattctgtgggtagattatgtatgctatcatgccatctgcaaataatgaaaccttcattttttttctttctcaatttgtatccagttgatctctttttattttttttattcttctagctagcactttgagtattatattgaatagataaggagagaacagacatccttgtcttctcatttcaatgggattgcttcaagtatttctccatttgattttttatttcattttttaattaggtattttctttatttacatttcaaatgatatcccaaaagttccccagaccaccctccaccccctacccacccactcccacttcttggccctggcgtctcccgtattgaggcatataaagtttgcaagaccaaggggcctctcttcccaatgatggccgactaggctgtcttctgatacatatgcagctagagacacgagctctgggggtactggttatttcatattgttgttctacctatagggttgccgacccctttagctccttgggtactttctctagctcctccattggggagtcctgtgttccatccaatagctgactgtgagcatccacttctgtgtttgacaggccccggcatagcctcacaagaggcagctaaatcagggtcctttcagcaaatccttgctggtgtatgcaatggtgtcagcatttggaggctgattatgggatggatccccaggtatggcagtctcttgatggtccatccttttgtctcacgtgagagaccaaagtgtgggaaactaagttacacagttactctcaccctaaagatcccgctgatcctttgaagggaattatgtcaccccctccttcagtgcctccacttggtgcctgagactgccagcttcactctccttcacttggtgcaaagaactgcttagattaaggcagattcacctcctccaccatgtctccatttggtgcttgagaatgtttagtcaggacaggcactccaagataaactgcagaacgtttgaaggctgcctgggatagttttagggcccacattccaagataagttgcaagaagcctgtaatcagcatctgccccagatgtccatccctttctatatattttattatgccccttcgaaccctccctattttctctcactgtgtgcttataacctggctcttagccttcattaaacagacctagacaactctgtacttggactcgctcccctttctctgtccacttctcttgcaggcctcagtcctcctcaacccacagaataactaggtcctgctggacaggacagtctcagcttagactttttctctgtaactccttccatgggtgttttgttcccaattctaaaaaggggcaaattatctacactttggtcttagttcttcttgagtttcatgtgttttgcaaattgtatcttgtatcttgggtattctaagtttctgggctaatatccacttatcagtgagtacatatcatgtgagttcctttgtgattgggttacctcactcaggatgatgtcctccaggtccatccatttgcctaggaatttc

SEQ ID NO: 3961 - DNA, 1600 bp, mus musculus
tgtctttaatttctttctatatttcttccctgaccaagttatcattgagcaaagtgttgttcagtttccatgtgtatgtatgtgtatcttctgggtgtatgcctaagagtggtatagttggatcttctgataagaacttcaatcctacacagttatttaaaacaatgaatacttataattcttaggcaaatggggaactagaaaatatcatccagattgtgctaactcaatcacaaaagaacacacatgtttatacacttagtgataagtgtatattaacccaaaagcccggaatacccaagatacaattcacaggtcacatgcatctcaaaaagcaggaagatcaaagtgtggatacttcggtccttcttagaagggggaacaaaattcccatggaaggagatacataaacaaagtgtggagcggagactgaaggtaaggccatccagagactgccccacctaggcatccatcccatatacatttaccaatccctgactctattgtggattccagtaagttgttgctgacatgaatctgatatagttgtctcctgtaaggctctaccagtgcctgacaaatacagaggttgatgctctcagccagtcattggactgaacacagggtccccaatgtgggaactagagaaaggacataaggtgcttaaggggtttgcagccccataggaggaataacaatatgaaccaaccagtacccccaaagctcccagagactaaaccaccaatgaagtagtacacatggagggaaccatgcctccagccatatatgtagcagaggatgaccttgttggacatcaatgagaggaggggcccttgtccctgtgaaggctcgatgcctcagtgtaggggaatgccaggacaggtaagtgggagtgggtgggttgataagcagtgggaggagaaatggaatagtgtttttggtgggaaacaaggagcaggaataacatttgaaatgaaaataaagaaaatatttagttttttaaagtcacccagaaactgcctcacctagggatccatctcatctgcagtcaccaaacccagacacttttgcttatgctaacaagagcttgttgacatgaacctggtatagctgttatctgaaaggctctgccagagcctgaccaatatagatatggatgctcacagccaatcatctcactgagcattgggacactaatgaacgaattaggcaaagaactgaagcagctgaaggggtttgcaaccccataagaagaataacagaaaacaaccaaaccaccaagaactctcagagactaaacaatcaaccaatgagcacacatcgagggacccatggctccacctgcatatatagaaaagaactgccttatttggaaacaatgggaggggaggcccttggttatgtggagtgtccatgccccagcttaggaaaatcctagggtggtaagggagattctatttctgagtgggtgaaccactctctctgattggaatgggagggaagcatgagagatgtgggagggcctatgggacagagggagcagggggagaatgatagtgataggaaggaaggaaggaaggaaggaaggaaggaaagaaag

SEQ ID NO: 3962 - DNA, 1200 bp, mus musculus
accaactatttcaacagaagttctggtctctcagaatccattgttacgttatcatgcatcatcatggttttcactttttattgttttactgagtaaaaaacttgctaatggaggtaggtactattgaggccatttaaaggtaaaggtgtacagtagaagaacttaagttagtaccacttcactcttagattaccttatgcaaagttgacaaaggcactataagtctgtgtgtaggaaactaacaaacgaaaaataggcactcaaaatggttatttctgaggaagtctaaatgttagccttttctgatatttcagacccagggcagcttgctgctcctccagagtttctgacacactcaggatgtggttacaacactgtgtcttgcacagtaatagatggcagagtcctcagttgtcaggctgctgagttgcatgtaggctgtgttggaggatgtatctgcagtgaatgtggccttgcccttgaacttctcattgtagttagtactaccacttccaggtaaaatctctccaatccactcaaggccatgtccaggcctctgctttacccactctatccagtagccagtgaatgtgtagccagtagccttgcaggaaagcttcactgaggccccaggcttcatcagctcagctccagactgctgcagctgaacctgggagtggacacctgtggagagaaaggcagagtggttgtcattgtcacctcaagctctgtctcttcttcagatttgaaaatggtgagccccttacctgcagttactgacaggaggaagagaaagacccaggtccattccatggttagagtctatgttcaaggactttggagaggacactgatcatatgctgttttctgcatgtggtcacccctgtatttactgccatagactcaagtaatttgcatattcatgagcattaacttcttagataagaacctaattgagcaggagaactactggacagtaggcacatgcgtcaggtatcaggatgctctggtcaatgtcctaatcttctctgaaaaaatacttttcctacatttttggtaagctttgtgcagatgctgtggacgtagcatcaggaaataacttttcagaagatttcaggccttacactgttgcttctctttgggacaatgtattcagattgatttagagatggttgcatgatgatgatgaagatggtgata

SEQ ID NO: 3963 - DNA, 1400 bp, mus musculus
ccaaacgttgacaccattgcatacactagcaagattttgctgaaaggacccagatatagctgtctcatgggagactattctggggcctagcaaacacagaagtggatgctcacacatggatggatcactgggctcccaatggaggagctagagaaagtacccaaggagctaaagggatctgcaaccctataggtggaacaacattatgaactaaccagtaccccggagctcttgactctagctgcatatgtatcaaaagttggcctagtcggccatcactggcaagagaggcccattggacatgcaaactttatatgccccagtacaggggaatgccagggccaaaaagggggagtgggtgggtaggggaatgggggtgggtgggtatgggggacttcttggtatagcattggaaatgtaaatgagctaaatacctaataaaaatgaaaaaaaaaagaaatagacacaaaaacacactattcaaatgactgcatctaaacaagtctgcaagtgactattctctaagtcttgtcagtcccaagggagcttgctgcacctccaggatttctgacacactcaggatgtgtttgtagcactgtgtcttgcacagtaatagactgcagagtcctcagatgtcaggctgcggagctccatgtaggctgtgctggaggacttgtctacagtcaatgtggccttgcccttgaacttctggttgtagccattaccaccattgttaggataaatatatccaatccactcaaggctctttccatggctctgcttcacccagtgcatgtagtagtcagtgaatgtgtagccagaagccttgcaggacatcttcactgaagccccaggcttcaccaactcaggtccagactgttgcagctggacctcagagaggacacctgtgaagagaaagacagaatggatgtcagtgacatcccaagccatttcttttcttcagatttggaaatggtgagccccttacctgcagttcctgacaggaggaagagaaagatccagctccatcccatggttagagtcagtgtgttcagtgtctgtggagaggacattgaacatatgttgttttcagggtgttgatatccctgtttttaactaccatagacttaggtaatttgcatattcatgaccaggggactttgtatatactaaccaatccaaatggagaacagctggagaggatggacttaaaggtacataggtcaagcagcaggatggtctagtccaaacccaataactctctgaagaaatagatcccatacattttctgtgagccctgcactgctggttttcttgtaactacagggacaaatctctcaatctgtatttggcctaagtctgtttcttcactctggggctatgttcacattttgatttac

SEQ ID NO: 3964 - DNA, 1000 bp, mus musculus
atttttgtgaaaactctaacctagacagcttacacctcctaaaatcaaggacgaaaatgaggttaattaggtgcgctgctgcgtgtttacaaaatttattgaagcttcatgcttgcatggaaaagattgttacgaggtgattaattagagtgggcagtggctggctcttggcattgatggctgatgagcctagtgccctcacacctcgacctatgtatagctctaataaacaagcatggaggcagaggtggacgtcagtgctacagtgcccgcctagcatgtgcaaggtcctgggtttcatccctagcactggcaagaaataaaaaatgaattaaaaaatgaagacggaaatagtatttttctgggctagacctttcacttaatttatggacgttttgtacatatctacaaaagctacatgtgccttaatgtgtgactgttaatatgacaatcaaacagtgacccaggagacatattgaataaaagatggaaagggactgctaatcatgaatcagtcaggatggacaccaattagctgcattccaaatggtttgtgaaaagctctgtcagtctcaggccacagttgaaaataacttcacagatctaaacgacttatatgcacctaaagtattatttcaggaggtgtagcatcatgaggcagatggaagcatgcctgagtcctccattaccatgtctgatccctcagttcagttccccggtttaaaccagtgaccagatctgtagctgcaatcatgaagggaccgctgaagggagcaacgctgactctgactaaacaagcagctttgcagacccatgacctcgtacaattattgtggtgtagaatgtttggtttgacactgggggtgggggggggagtgggactctgcggactagggtttaaatcacaatgataattggtcatcctcataagcttgcttcacatacccatgagatgacctgcaagagactatctgacatgttgctgtacttaattgctttg

SEQ ID NO: 3965 - DNA, 1000 bp, mus musculus
gagaagtcatcagatagccatgtctttcgcgtttgcctgggaaggcagcataaaggaaaatgcctctagctgggtccaagcttcttgtctcagctctatgacacagagtctcatgtttaagcagaaaggcaggaaaacatcacctttcagcagtgtggaatctcaagtacatcttctagtggtccctgaccagtcataattcataacaaagccatgccttctgaggaggagttgcagtcagaaaacaaatgaggctcttcattggcaggggcagtttgagtgacaggaatcgacagaggaccaatgagaagggaattgcagtactggtaggtggtaaagatatcagaaagcaccagaataccggaaggtaggtgccagagacacaagttctgtttcgtgcctctgtggagatgagaaacactatagcctgattctgtcggtgatctgtgtgttacatcacgtgcaaaggagacaacttagggtcaggtacggaactggagggctgtaaaatcagtagatgtttatttaaaagaaatgacttaactttctcagtgataagagaacatgggagtatttggtgacacggggtcgtttcttctgaacaagttccccgagtgcagggaacaggaaagaacaccagcacggcagtagggaggggggcatttagtcccagctttggtgcgaatgggaaaatcctattaactttcagatttagatccagattggggtagggtctggctgcctgcatatgcagagtatgctgatgtgctgctggtctgcagaccagctgtgatgaacagggatctgaagacctcctagcatgaaccccagctaggagaggaggcatagggacgttttcacaggttcttgaccctctggggagtgggaccactcaaatgtttcagttccgtaccctttcatctttggttcagaggccattttctctaatgtatgagattaatcttgtaggaagtgcactagtgaactgttagctattttc

SEQ ID NO: 3966 - DNA, 1600 bp, mus musculus
tcttttgaaataattagtcaagcacaaatgcagtatgactaacatgctttatttttatttgtccatctatggatagactcttaggttgataaatgtccttactgttgtgaatagcactgcagtgaacgtggaactgtgatatttttcacacacatttttctagcccttacaacacatattcccagaggtgagatttctgtatcatatggaggttattcttttagcattttgaagaatttccatattatttccagtatcaccaccctatttatagtcccactagcattgctcaattgttccctttctctactttcctattatcaacatcatacaataatccaattgattttttacagttggtagaaattcaggaacattgacactaattttaagtatacattgacaggtcgtggaatggaaacatctgagggaattttctgtaaagtggctccagctgttgttttcagaggccaagtcttccttgtgtggtcagaccactaaagatgtgagttctggagtctgcgcaggggagagtgtggactgcagaagctaacagcttctgggtcaggtggaagccacagagcttctgggacagacagcatttcaggctccagacatcctggcaccttccctgccagaggagaggtgtcaggcccgccctggagggcttcaccaaagcatctgggggagacatcttcattcctggatcccgccaagactactctgtgcaggtgagagtgtggactacagaagctacacagattttgggacaagccctgtttcaggccttcatcttctgccaggatgcaggtccgaatgccagatatctgtccaccttccctgcaagagaagagcttgcctgcagagagtgctctaaccactgaaactcaggagagatctagtcttccaggtctgctgatagaggttaacagaatcatgagaggaacaagctctaaccagagacaactataacaactaactccagggattaccagatgacaaaaggcaaacgtaagaatcttactaacagaaaccaagaccactcaccatcatcagaacacagcactcccacctcaaccagtcctgggcaccacaacagacccgaaaagctagacctggatttaaaagcatatctcatgatgatggtagaggacatcaagaaggactttaataactcacttaaagaaatacaggagaacactgctaaagagttacaagtccttaaagaaaaacaggaaaacacataaaaacaggtgatggaaatgaacaaaaccatactagacctaaaaagggaagtagacacaataaagaaaacccaaagtgaggcaacactggagatagaaaccctaggaaagaaatctggaaccatagatgccagcatcagcaacagaatacaagagatggaagagagaatctcaggtgcagaaaattccatagagaacatcggtacaactatcaaagaaaatgcaaaatgcaaaaagatcctaactcaaaccatcctggaaatccaggacacaatgagaagaccaaacctacagataataggagtagatgagaatgaagattttcaactcaaagggccagcaaatatcttcaacaa

SEQ ID NO: 3967 - DNA, 1600 bp, mus musculus
ttctaattcaagtcaatttatatgaattgatccttcaccatgttcttgggataggaatagttagctttatttcactctgtgtgatggtttgaatatgcttggccctgggaatagcactattaggagtggccttgttggaggaagtgtgttgttgtgggtgtgggctttaagacctttgtcctagctctttgggagccagtcttctcctagcttcctttaaaacaataggtggaactctcaactattccaaccccatatctgcctggatgctgcgatgctcccaccttgatcataatggactgagcctctgaacctgtaagccagccccaattaaatgttgtccttatatcagttgccttcgttatggtttctgttcacagcagtaaaaccctaacttagatactctggtaacccactatttagataggaagccaaacaatacacatcaaatcttaatataaaatttaaccactattacaagataagaaaatgaacatgcacaatagctaaatgttggttgaggctggagggaggagaggctggcttcacagatgtcatttaagccagataaagaacacttcccttttccttcattcggagaagatgctcattaatttttttgaataatatatcttttctttttgactgaccaatatttcttgatatataaactccttcatttggtaaagaattagttattaactaaattggcttttaaaacataagcacttgccgggcggtggtggtgcacacctttaatcccagcacttgggaggcagaggcaggcgaatttctgagtttgaggccagcctggtctacaaagtgagttccaggacttccaggactatacagaaaaaccctgtcttgaaaaaaccaaaaaacaaaacaaagcaaaacaaaacaaaacaaaaacaaaaaacataagtgctctattgtgtatgtgtctttgaagaccagagttggaaatagatattcttatttttcaaatggagaatttgagtaagaaaataatacaatagcaaactagaagaaaattgacatttttgtctatacaaataaacatgatcttattcagacattttaattaataagtcaaaatatcaaagtaacaaattaaaaattctaacattcaacaaggttgtataaaatattttattacagggatagattctgagaaatgtatggctaggggatttctttatggtatatttacacaagtgaagatgattcatcactattaccttgtgacccatcattggatgaaaatgttatacaaggtgctgggaaaatagctcattgattaagagctcttatagaagaactgtgttcagtttccagcactcacatgttagatcacaaacacctataactatccccagggaatccaatgttctcttctggacccttggggcacctgcaaatatacatatgtgcacataccacatatgtggtatacttgcaaataagcagatgcacatatacacataaaataaaaattcttacaaaccttagttaacataagattgtatttgtacatggttaggcatttaactgttactgtttcattctagaagttagaatagagtcaataatttaatat

SEQ ID NO: 3968 - DNA, 1600 bp, mus musculus
agaaaattggacatagtactaccggaggatccagcgagaccctgtctttaaaacaaatatatatgtatatgtaaacattattttgtacttctacttgtgtacttttcatatatatatatatatatatatatatatatatatatatatatgtgtgtgtgtgtgtgtgtgtgtgtgtgtatcaagaaatatatttctagtcctttttgaatgtataaatgtgttcacacagttttaaaaatgagtaactcaactttctaaactgtatttcgatttagcggcaaggtatttgtaaccatgcatgtaacctctaataattaaatatggtaaggtgttggtgcctttgggttataggaaagtacgggaacagcttgatatgtttaatccttctaatttttgaacacagaatttgtgattacagtcttggtgcttagaataaaatttaggatttggctcacaagtagaagtacaagaaaaattaatgtttacttccttggaattctgggacagaaagcaattaatgattttttaaaagtactttaaaatgtaaacgcacataaaacataagccttggtgatattcttgagtagaggttgcaacaaatcaattaattcatgatcatgctggcagccctgccaggtgtcattagtgctgctagctataagctaccactgaaaacctgcctgtgcttacttcgtacgagccttagcttgagtgtgtggaatggagctggccctgactgcacattacagcacaagtaattattcataaaaacttgcttcgctgcaagcaattcattcctctctcaacagatgtctaggactctgacccaaagcagcatgaatgtggactaaaaatagcttccactgcagcaagcagccctggagaactttgaatttaagtggtttttattcccatggtagcagagcattttgctcaccagattgaccctgaaagaagacagggaaagtaaagattttttttaaaccttcttttatgtctctcttctttgagatatagaacacatttcttcatagaaatatattttgctctacctggtagaaaaatggtgggggggaggggatcaatccccttcaaaaccccttccagccttctctttgttttgtgtgtttgatgtttcttctttttttcttacttttctttctttctttcttcctttctttctttctttctttctttctttcttcctttctttcttttccttccttctgtagctacaggggagattgagtgtgtcagttatatcactaccaaagtgatcactacatgcttggtgtatcattacattttttatcacacatgctcatgagaatatattcactagtgcatcttttatgtgtatatgtatgctagacactgtagaggatataacatgtgtatccttatcacattagtggcatggaacataatagatcatcacatgactgcaatctagtgctgctggaatttgagcatacctggtatatcaagtttcagtgggtgaaatcctgaagtgagaatcacaaaatgcaagtaaatcctcttaaaaatagccaagttagttttgttactacagggtatggatcagactgcattgcctgga

SEQ ID NO: 3969 - DNA, 1200 bp, mus musculus
agtagaaataaatcgatataagtaggatatttggaagaaaagggtgataaagatcagtaatgtggtgatttttttataatatctaagtagatgatgaattacaaaataacagtaatatcaatgccttatgatccttaaacagatcattcaaaatacaatacaataattatagtaggcatccatgaacatataccttgaaaagttatataaataattatgtttttatttcaagagtaactactaatagaatagatatagtagtagtgtgggaagtgtggaaatatttttaaaatattcaatcagtagaatgtagttaagcagacaaaaataggtaaaatatgacaggtaagaatacaatcaatcgactcgagcaccggggtctcctaacaccctcaaggacccacacaggattccccacgggatcctaagacatctggtgagtggaacacagcttctgctccactctgatcatgcggaacctgagactgcattaactagggaagcagacaacccaacatgagctggggaacaagtcccttccggtccactcgagcaccggcgtgccttgccagcggagtcccaagacactcgcaaggacccacacaggattccccatgggatcctaagaccactggtgagtggaacacaacttatgccaggaggcaggttcgaacaccagatatctgggcaccttccctgcaagaagagagcttgcctgcagagaatactctgaccactgaaactaaggagagagctagcctcccaggtctgcttatagaggctaacagagttacctgaggaacaagctctaaccagagacaactataacagctagcttcagagattaccagatggcgaaaggcaaacttaagaatcctactaacagaaatcaagaccactcaccatcatcagaatgcatcacacccaccccacctagtcctaggtaccccaacacaaccgaaaacctataccaagatttaaaagcttatctcatgatgatggtagaggacatcaagaaggactttcataactcacttaaagaaatacaggagagcactgctaaagagttacaggtccttaaaaaaaaaacaaaaaacaaaacaaacaaacaaacaaaaaaaaaaccaggaaaacacaaccaaacagatagaagtccttaaagaaaaacaggaaaacacatccaaacaggtgatggaaatg

SEQ ID NO: 3970 - DNA, 1000 bp, mus musculus
agatattttctttatttacatttcaaatgttatcccgaaagtcccctataccctcccccacaccctgctcccctacccacccactcccacttcttggccttggctttcccctgtactggggcatataatgtttgcaaggccaaggggcctctctacccaatgatggctgttcatattgttgttccacctatagggttgcagaccccttcagctccttgggtactttctctagctcctccattgggggccctatgttccatccaatagctgactgtgagcacccacttctgtatttgccaggcactggcatagcctcacacaagacagcaatatcagggttctttcagcgaaatcttgctggcatatgcaatagtgactgggtttggtggctgattatgggatggatccccaggtggggtagtctctggatggtccatcctttcttcttagctccaaactttgtctctgtagctccttccataaccctgattttgaaattctttcatgttgatcatgtttccttcttcattcctgattctgttgatgttctcgttttctctctctctctctctctctctctccctctctctctctctctctctctccttctctctcctttcctctcccctgtcccctccccttttcctctctcccctctctcctcttcctctcccttcccacatttaaattagttggtatcccagcaagttactttctagaaatggacacaacacttctaaagtttatgtacctagatgaaatattcccaattgccagcataatatctatccagaacacaattaggaaaaaaaaatgttaagactgttggacttttagtcttattatatagccacagccaccaacatcaaggaaatagagtcttgtaggaaacaataggtgattgatggaggaagtagaacagagattacagacacataactcctgtaaatataatcacttactttttgacaaaggaaaagttcattaaatggagtgaaaa

SEQ ID NO: 3971 - DNA, 1400 bp, mus musculus
acctaataaaaatgcgaaaaaaaatttttttctcattaaaaattatggaaatgagggggaatgaatggaatgaggaacagtcagagggcaaacccagatgaggataatgactagactataaaaataaatttaataataataataataatgatattctaaacattgttagttttcttcctgagatagaaatgtttaattaatttttacaaattactgtggattattttattttaaattttttattggttactttattcatttgcatttcaagtgttatctccttcccagtttcccctccacaagcctctatcccaccaatcttccccctgcttctatgagggtgctcccccacccaaccaccactcccacctcactgccctagattcccctatgctgggacatcaaaccttcacaggaccaagggcctcccctctcaatgatgccagataaggccatcttctgctcatatgcagctggagtcatggatccctccatgtgttttctttggttgatggcttagtccctaggagctctggagggtctgatattgttgttaacagggatgacattagctgaaatatccaacaaaggggagagagaacctgtagaaaccatatggagaggttgggcatggcccctgcttgagggatggggccacccacccttctcgaaaaatttaacccagaattgttcctgtcttaaggaagtacagggacaaaaaggtggagtagagactgaagaaaaggccatccagaggttgccctacctgggaattcatcccatatgcagccatcaaacccaatcactattggtaatgccaagaagtgcttgctgacgggagcctgatctgtctcctgagaggctctgccagagccttactgatacagatgtggatgcttgtagacaaccattggactgagcacagggaccctaatggaggagttagggaaaaaactaaagaagctgaaggggttttcaaccccatagggagaacaacaatataacataattttaattccccaaaattaatatatcttgagttaaatttaaacataatgctctctggagctattgagatttccccatcaacatcacataacctcagtctactgggctgtatgggtttctgtttctatcatatggtttttttttgttctaattaaagatccatacaaatatatttttacaattgaaacagtctttattttgctactctcagtcaaacaattgattcagaaataatcatcactggacgtttaaaacattacaccatatcattgtatctctgtgacaatgtggaaaactagagactgccatgacatcaaatatgcctgcaggatgtagttcagtggtacagtacttgcctaagataaaaaggacctgggttcattcttaccact

SEQ ID NO: 3972 - DNA, 1400 bp, mus musculus
tcatttacttggtgttctataggcttcttgtatctttatgtccatcactttctttaggttggaaaagttttcttctattattttatttaagacattttcagatcttttgagctgggaatcttcattctcctctattctgattattcttagatttggtctttttattgtgtcctgaatttcctggatgctttgggttagaaggtttgtatattttgtattttctttgacagttttttctaccatatcttctgtacctgagattctttcttctatctcttgtattctgctggtaatacttacatttgtaattcctgacctctttcctaggtttccttttccagatttgccttcatttgtgatttttctatcgtttctactaacacttttaggttttggattgctttattcaattccttcacctatttacctgtgttttcctgtatttctttcagtgagttattgatatcctccttaaatgactctattatgttcatgagataggattttaggacagattcctgattttcaggcgtgctggtatattcaggttttgctctggtaggagaactgggttctgatgatgcccatggattttggcatctgttgcttatggtcttgtccttgccttttgccatcaggttatccctggtatttgttgatctaggtgactgtatggagtctacctcttttgtccctgggttgcttcaggtctcctggaaggcttgtggccctggctgtatcagaccacctgtggggctgtccaactggcagctcttcacagaggcagagaaactgctggtctattgcctggcagcagtagacctcctggttggccttcagactgttgagtctttaggtggagtagtcaagttgttgtccaactgagctgagggcagctgatactcaactgctctgagtgcatttggtcctctaggatatatcgggatatggaatcttcatgggagcaggccaactaggagtctgccccagcagaaaggaccagactgaaagggtggaaaggactgaaggaatggtgagcatgaaactttctaacttgagctattttatcatttttatcattttaataattttgtgtacaatatttaattcatcaactcaataatatttagctgaatactctgtgaacagaaagaaaaaattgaaagattaaagctctaggctattctgtgttctcagaagaccttgactgttaataaatgttacaatggattttgcagtctactttctctgaatatttttccaggtagtgaaaataagcaatttgcttctcttgatttttgtataagaaaatatgagtggcaactgaaaagaaattcacaaaaaatcatgaaaacccagcaagggacatctatctccacttataagaaaaccagttttcc

SEQ ID NO: 3973 - DNA, 1600 bp, mus musculus
agttattttttgtagttgcatctgtattcatgcaaacttaatgatgacagtttttttttgaggttataaaactgctttaatggaaagtcccccctcccccaatacaccatctgggatggggtagatgtggccaagactggccccaggacaatactgagcctgtagtcgttaccaaaatatacatctgtcaccataaaaaactgctgcaccgcctcaaccccacaggtataaaatcataaatatttacactcttccatgcctttcacagaaccagggtgcagggaacccctcccacagaaacaggctaggatggaggtggctgtgcaggagggacattaaggcctagaggtcagcccctcaactgggcacagtaagaggcgggcagaaagctaaactttggtccaaaattttgaaggtagaaacccacaagtctcagagctttttatccagccctggcctgggcccacctgcaagttggtcactggaaggagctcaggggacacagaagctcagagtacacacatacaattgtatcattgctataaaatgttacttaaaactatatctcttgcatataaatggaaaacaagtggaaatattgctaggcacaggtgtctgtgaccacacggaatagaatacaaaggtcacaatgagggtcggcatctgaggatggtctagaccctctgggctggccagggacatgggagaatcatgtcacttgattataggggtgtaggggagtggccccagctcttgcacaagattggggagcctatgtataggccacctggctcacctgcaggtctagagacaactggtggccttagagggtaggtgtacggccatgaggcacgttggtttgtaaggcacagaaagaggctatgtttggggcaccgctgtggcctcatgcctgagcccctcaaggcatggtgctgggattgactgggcctctgtggtccaagccatttcctgccactgcagagtgggctagatttaatttttttaaaaacaggtaaactgatctctttttaaaaaaataaaatctctggtctataaggtcacttcagctgctttttaaagtggcttttctggaatggtggaagctgacgcaggcccacagacacctagatggtggacttggaaaaggacactcacaggtggtggttctcgcccaggtcatggttgtgcagttcaatcagcgcctacacagcctcctccacagagcccatctggatcagtaccatcttgcggtccttctggaagaacttgaagcctttgaccacaccaccattgctggagaagaggctcttgaggtcgtcctctgacacaaagggcgggatgttggagaggtgcagggtagctgagggtggaaagatgttctggaagttcttggagcctggtttcttgaagcggtgcagcagggagcagcggtcctggtcctcctgaccctcccgaggcagctgcacactctgatgcttggacagtgtgatgcgcactgacttcccgtgcttgtgcccgttcatgtggctcatggccagctgggcctggctgccgtctgccatctgcacaagcgcttctccttattgaacaggatcttcac

SEQ ID NO: 3974 - DNA, 1400 bp, mus musculus
ttgttattggcaagggtaacaaaccatggatctctcttcccagaggaaaaggaatccgcctcaccattgctgaagagagagacaagaggcttgcggccaaacagagcagtgggtgaaatggtctctaggggacatgctggaaaagtgtttgtacaagcctttctaggcaacatacatgctagattaaacagcatggtgaaagtaaaaaaaaaaaaaaaagaaaaagaaaagaaaagaaaagaaaagaaaagaaaagaaaagaaaagaaaagacaaagctttgaataatatccctgagctgcagaaccaatgatccagtttcttgggggttctttttccttgagaaattctcgctcgttcactgagtcagagttgccaagcatctgttaagccctagatcctgttctaggctgttgaacaaaatacaatgtcctcatagatcctcgtggagtcagagtctaacctggaatggcaattcattaaagatgagcaaggcaaggctactctatgtaaggaagcgtgtggagcgggcacggagactaaggagacaggcttttgtatccaattgaagacagggtgggttggccttgctaaggaagaaagattacactaatactataagaaacagaaagttctttctcaggctgtcagaattctgtcttgtcagccatgctcagaaaccgtttcttcctgcattgcagtttgctcatggttctgggtgaaagagactgccattttcctctacatcctccgcatgcctctgggagcacatgctgtcatcattgctgccaaagcctgaagaccttgtttgcttttatctctgtgcttgtatttagttggttggttgtttttgagacagtcttgtcttagatactgctctattgatttgagacaccatgatcaaagcaaagtggtagttgggagcttgcttagagttgcagagggttagtctgtgatcaacacagtggggagcatggaggcagacaagcaggcaggcatggagctatagcagtaactgaggactcacgtgtgatccaagagatccaggcagagaaaaactgtgactgggcatgatatgggcttttgaaacctcaaagccgacccccaccccaacctgttcccatcatcccccacccccaaactctcaccctcacctctcatagcacacgtccaacaaggccacacctcctcagtcaaagccacactcctccaccaaggccacacctcctccaacaaggccacacctcctccaacaaggccacacctcctaatccctcccaaaaagttttactacctcgggaacaaatattcaatatatgagcctatggtggccattctcagtcaaaccataagcctcatgtatcttaaatttgcttcaaacttgaactcatcatgatgtag

SEQ ID NO: 3975 - DNA, 1600 bp, mus musculus
gtcttaacttgtgaaccagaaagtcacttgcccacgtacaagtctcttccttccaagtaagatgtcagttccgtgggaggccttgggaacttatactttactcactcacaccctactcaaaatagaagtcggattccaagtagtctgtacactgaatcagtggtgtgggtgtctctcttttgttggggggcggggggtgtccatccccagggcagcttctaagagcaaatgccagaaaagtgtatacatgggtgggtgcaggaaatactgctgggtggtcagtttggatccaagcatattgcagataactatagaacaaaggaagcagttcgattggcctctctcgtgattggtttccgaggacacatccaacgagaatatgtaatcaattctggcagtaatggcagaaactagatatgagaaagtgtccttataatagtagttaacagcaccaaatggcaggctagccaggtaagaggttacctagcccttatctaatctgacgtaagccttcacattccatctaggccttaatattttacctataccttaacagccagcagttttgccctctgagtcatcgcacatgcatgtatagatcaatgaatacctttctctgtattcatttatttatgagagaccaagtctctgtacatggtgcaaaaacatacaagacagaccaggctggcctctcaaataagttctgcctctgcctctccccagtgctgagatcaagacagtgtttttctgtgtagccctggctgtcctggaacttactctgtaaaccaggctggcctggaatgcagaaatctgtctgcctctgcctacaaagtagtaggactaaaggcgtgcggcaccactgcccgacagtctattacttttaaatgccagatgaatccattcttttacattttcgggttggtttgttagttgattttatgttgttttcctggaggtgtggttgcctaccacctacacaagctcaggcacgagaaataaataagtaaagatctctgaaacacaaatctggggttggtactagctgaccatggaaacacatatacacacatggagtattaatttgcaagcagctacatcctcacctgtcggggagagggacatgaaacagtttccacagcctttttattggtggtgatggttatgattccttgtttatttctaagaatccctgggaaatatgatttctttgatctgtgtaccctagactaacacacacacacacacacacacacacacacacatgcacacgcacacaaacatggagtgagagagagaaaaataaggaggagtgacatgaattttaggaaaaagagatattaatggattaatattacttacatacagacagacagacagacacacacacattttcttttaaagagaattagagtagagctggggcagttgtggcacacacctttaacctcaggcagatttctgcattcaaggtcaccctggcttacagagtgagttccaagtcatccagggctatacagagaaaccctatctcagaaaaaaagaaaaaaaaattgaaaaaaagaaggaaggaaggaaggaaggaaggaaggaaggaaggaag

SEQ ID NO: 3976 - DNA, 1400 bp, mus musculus
gttctgattgtgtctgaagacagctacagtgtgatgacatacataaaataaatgagtaaatctaatacctctcaaaaaaaaaaaaaaagaaaataggtttgttcaagtccagtgatggtcctggctacatccaacaatggggacaccaaaattctgagcttccagtcatcttggcctatgtctaacagaggggtctccatgaagacactgtcactctggctgtggctgtgttaagagaaaaaaaaagacaaaaaccccccaaaaaactaggcagcatgtaaatttctcagaggttataaacaatactgctgggctgaggtcattcaatgataaggtacttggcatggtgaaagcccatgttccatgccattacacagattggacaacaaagtccaggaagatcccaggctttctctccaactcccaaggaagtaatttgaaaaaatgtgtaagcacacaggccagcctgcctccttgaattgcaggcaagaggatgccactaccataaacaattatgtggtagagaaatggaagagaaggagaagtggagaggtctgcatggtgtggagatgccatggcagtgaggaccaggcagatgtgaatggcctgtgctgccacctgaagccatgttgatgtatgagggcccagctaccactgggggccatactgatctggctgtcctgcactgctctaagggtaatgtcttggtactgtccctgttgacagtcaggtctggttcttccacagttgggggctgtgaagatgtccacagtctatgctgtggcctcaggccaagttgattttgtgggcagtgtttctacttgaagccatgatgatatctgaatcaggtctgagtagatgtccatggccccttataacaccaagggatatgtggatgtccatggtctgactgcagtctaaaagcacgttgatgtcagtgggctgtgctgactctgggggccatattgatatgagtgctttgcactaccacttgaggtcaagctgatgtgcaggctgcctccaagggtcttgtctggttctatggtcctacagcagctggggtctatgccagaaagcatgtagaagccccttttttcccattatctgtaaagaacaaggaagctacttttgcagtgatagtgacaattgatgatgtactgttgagagggagggacataaattgcttctgtgatacctttctccattccaaccactttcccaggaatggataacagcctaaacaggaagccatcaaagagaactcgtagaaagtatgataagagccaggcgtggtggatcacgcctttaatcccagcacttgggaggcagaggcaggaggatttctgagttcgaggccagcctggtctacagagtgagttccaggacagccagggctttaa

SEQ ID NO: 3977 - DNA, 1000 bp, mus musculus
tcccggttcgcccgcacctccacccctggcaaccccctatcccatcctccagttccccacttgtatgagggtgtttctccacccacccactcactcccacctcgctgccctcagttccccttcactggggcttttatcaagccttcacaggaccaaggacctcttggacggatggccctaaataaaacaggagcctagtgtgaggctgagtgccacggaaactcaggccagacagaggaaagcagagagctggccagagctgcatgggcatttcttgaaaagcagtgtttgctgttccagtctcccatttgatgctgtgtgccccaacatttcaaagaggctagatttcattggtctacaacttcataaagtctcaacaatgatctgtttatccaaggacatgaatagtaaaacttacgtaaacacaacttgactataacaaatactcaaagcattaaagtggctctgtaattttgtataaaatacaactgtgtttaaaaatatgattttgtaccaatttgtacactgctgaatacatgaatgtttggatgtggtgtgcgtgcatgtacacacacacacacacacacacacacacacacactagcgctcatatgcacaccccagagaaggaaaaggaaagctgaaatacaggatgtgagtagtggaggagcaaggaaagtgttgctttctatgttctgtgtgtgcatatgcatgtctgtgggcacatgtacatgtatgagcgtacatttaagtaggggccagaggtcatcattcttaggagtcatctttctttatttttatatagggtctcatgctaagacgtcaagctcaccaatgaggctagaatagctggccagagagtctcacagatcacttagtcctgatatttcaagcatatgccaccatacctggcatttcatataggttcttgggaattgaagtcaggccctcttgcgtgtggggctagcactttactggttgagccatctaaccagctcct

SEQ ID NO: 3978 - DNA, 1400 bp, mus musculus
aacattgataaatcaaaatgaaattactcttaaatagaaagagaaatggagaagtttgtcttctacatatcaaggctgactttgaacattataaagtgtgtacagaaattaaatacattagtgctggagtgatggctcattcagaaaaatgcttgccttgaagccatgaagactggagtttgaccccagaacccacatttcaaaagccagatatgttaacacaccacttgtaaatttagtgtcagggaggcagagacaggtatatccatggcttcctagcctacttggcagattacagagcagtgagagatcatgtcaaaaaaaaaaaaaaaaaaaaaaaaatgaaagcaaaaccccaaccagaaaaatgaatagcaccttaaaaataccaactaaggcttccagtcggcatcagccctgtgccaccttaggcacaaactctgcggtcatcccaaggtccccagaggattctccacgactctccaagccacaggcgccctagcacacccaggatcttaggatcactggtgagtggaacacaacatctgttctaaaacaacccagaggggcttgtgctaataggaacaggaacaaaggaaactcacctgcccaaaacctgcctgcccagcgactggggtttctttcagttggtgccagccccgtgccacgttgggcacgatcttggccaatggtcccatggtccccagaggactctctacatcacaggtgccctagcacacccaggatcttaggatcactgaggagagtcggcctccagagagggctctgatccagggactcaggtgagagtgcaatcttgtatcccaggtctcacagagaccagtctgcacaggagagcatgtgggccccagaagcaacagagcttcttggagagggtcctttcaggccttcatcctcagccaagcggcagagctgagacccagacctctgggcaccttccctgcaagaagagagcttgcctgcagagaatgctctgaccactggactcaggagagagttggacacccaggagtgctgacagaggctaacaggatcacagaaggaataagctccagccaaagacagctagaacatctaacaccagagattaccagatggcgaaaggcaaacataagaatcttactaacagaaaccaaaaccacagggcatcatcagaacccagtacgcctaacacagaaagtcctggataccccaacacacacacgaaaagcaagattcaaatttaaaatcataattcatgatgctggtagaggattttaagaaggacattaataactcacttaaagaaatacaggagaacactgctgaaaaggtacaagtccttaaagaggaagcacaaagacccctcaaagaattataagaaaatactgctaaacagg

SEQ ID NO: 3979 - DNA, 1200 bp, mus musculus
agatgtttgtggcttatatgaggaagtcaggtgcaagtcatatgacttagctgcagtccctggcgcctttgggactgccgccacacctgctcctaacagtgcatgtcctttttttgtgtctacagttcaagaactctttcttatgtataaagagacaagattcacagaaattgtggccaagtttattggaaatattagttatgttgctgttttagtctgacaataccttctgtgtctaaaaaaaaaaaaaaagaaagaaaaaaaaaagaaatgcagggacaggggatggagcaaagagtgagacaatggccaagcaacaactggcccaactagagacccagcccacagaaaaacaccattcccttacactattaatgatactctgttatacttgcagataggaaccaagtatggctgtctctgagaggctccactcaccagatgactcagacagatgcagacacccatagcaaagcattgagcagaactctgggatcttatggaagacttagagaaaggattgaggaccccttgagggataggaactgaaagaccagagtcaactaacctggacccttgtgggctctcagagactgaacctctaaccaaatagcatacatgggctagacctaggcccttgcacatatgaagcagatgtgtggcttggtcttcatgtgggtccagaacaactggagcagggctgtccctaaagctgttgcctatctatggaatctcttcccctaactcagctgtcttgtctggcctcagtgggagaagaagcacctagccatgaaaagacttggtgtactacagtgagggaaagctagggaggggctccacactctcagaggagaagagggggtgggggatgagggtagggactgtgggaagatggtccgggaggagagacagcaatcaggatctaaagagaataataataaagacatgaagttggaaggggaacatattgagggagatacggacaggagttgtaagggaaaatggtacataattttgcttatatttcattgtatatatttatgaaattctcaagattaaagaaatatttgaattactatagttgtgtaatggtatatggattaaaagaaggaattctgactttaaatgagatgactcatgaaaaaaaatctcttacataaaatggactatattccttacttacaaatcaatactactgtg

SEQ ID NO: 3980 - DNA, 1000 bp, mus musculus
tattccactcaggccagacaaagcagcccagctagaagaacatatcccacatacaagcaacatcttttgggataacccttgctccagttattcaggactcacatgaaggtcaagctgcacatctgctacatatctgtggggaggccaaagtacagcctgtggatgctctttggctggtgattcagactctgagagccccacgtttgctaagtatatagctgctgagtcttcggaattcctgtagactcagaaatgtacctcaaattagttctcttataaaacaatatggaactcaaatggtgacattattgccccacagtggtaaaattctgtgtatatttggagttgccaggaattagagtgttgtaacctcccctcagcctgaagcaggctgagccagaccttgactttgctaccactaaggagattacctagggtggagccttcctccctagatcactctattgtgctgtttctcatcaagatactgctaactgctgagaggccccagagctattccagagactacaccctatcctgcaagttatcacctgcagctggttccaggctccaaggatgaattggtgggaatgctccccccactccataagcacattcgccattaaacatttgaaccttgatcagaaccttgtcttggctccatttttctctcgtctgtctagtttaccccctcttttcagccctggtttgcctcccaggtgtaacccagttcatgttagccgcggtccggtttccaacaagtgtgagacagataactgacatctgaagacattcatggagagatgtaggaggggtgtcatatatctaaggcttggagatgcacccgtaatgctgcctcagttcagaccatacagctggatgttgtactatgtgtcaagcagacactggatgtgtgccagagcaggaacacaagatagggcatcatggcttttcatgtgtaagcttgtgttaagtacttaatgaaagatcagtcggcaca

SEQ ID NO: 3981 - DNA, 1000 bp, mus musculus
cctctgagcactgcttccacaatatcccacaatgtgtgataactgcctcattaccatgacaaaatacttgaggaaagcaacttgaacaggaaagggggatgtgaactagaacctgaagcagattctatttgctcccaccattaggaagcagtgtgagctgagcaccacccagcctgtcttctgccctatgtccagttccccaactcatgcaatggcactgcccacatttatgctgggtcctcctaacccaaccaaatctagaaaatacttcaaagacatgcataggagctcatctcacaggtgattcttgatctggtcaagttgacaaccaatactagccgctacaacatgcatgattttaatctgcactgaaggtttcctaatactcctctaacactgctcattaattacaaaaatcaggaaacagaattaaagcttgaaatacatataatactgcttttaaatctacaaacagtctaaggatcccttaatacccttgaggcacttttccatttccatttcctctcagttcgcagcactgtcctcattctctgtggctggtaatagaactaagcctcttctgcttccttgtagtttgacacaattttttcatctttgcaataaaaagggtggggacgtctctagtgttctcaaagttgatgagtgacgtttgattgttctgctcatgtttatgaaggagggaccatatccattataaaaggttactcttttttttttcttctatacctctagggtggtctttcttcctctgccctccatgaagtgactacaagtttaacttccctagataagctctcatgtttggaaatgtcagcctgttatacaaatgtaggaaggtagcaaaaaaataaactatgctgtgtctacccatgaagaaatgaggaagggttggctctgggcagcaacaaagaacagtagcagtactcatgattcttgtgttcaactaccactgcatttatccttgagagaagggctcaca

SEQ ID NO: 3982 - DNA, 3000 bp, mus musculus
ctattagagctcagtcgatgcaatcattgcctgctgctaaaggtccaggaagaccagaatgagatcatatgtggccaatatagaacagatgttttcaggcaagaatgatgttttgcaattgtgaaaaccaggatcctgctggcatattagggctaaacataccacaagtctccaataagggtaccaattgtgcaacatataaaatatcagtaaaaatattaaaagcatcattcacagactgaaagacattcagtattgctgttaattctgctaattgagctgagagaccaggagtcttattgattacctgttgattatttatttataagagatccagggggctggtgagatggctcagtggataagagcacccgactgctcttccaaaggtcggaagttcaaatcccagcaaccacatggtggctcacaaccatccgtaacaagatctgactccctcttctggagtgtctgaggacagctacagtgtacttacatataataaataaataaataaataaataaataaataaataaataaataaataaataaaaaagagatccagctcgctgtttagaggagcaatcagtaaacaccagaacagcattgtgtaagggttgtaaagaggtcatactaggaaatatcacctcatgtatgtttaaatattttgtcatcctatcttgagggtagtggctgtctatagttccttaaaaccctatttgagcaagcaaccaatctgtactgtactgctttagccaagtgtcttgacctacactgtaaggctaaacagtaatatctggctctttgtcaaaataagttagtgcctgcttccttccaaggataatcatctcagctactgcttcataatatggcaagatattacatttaggagaaatcctcgaatgtatccacattagaggagatttttgccataacaatcctgtaggcatatgaatcatattaaaaattgacagatgtaaaggcgaagagtaatctatatacgtgacaaattgttcttcaatagctttttccacttgttgtaaggacagcaatccttctgaggttaaagatctaggggaggtaggatcaaaactccctttaaaaatatcaaataaaggtttcaacccctctgtagtaagctttaaataggggcgaagccaattaatatcacctaacaatttttgaaaatcattcaaagtcctgaagttgtctctgcaaataactatcttctggggaaaaaaaaaaaaaaacagcttgattagtaagtctaaaacccaaataattataaggatcctgagtttgtatatttttcaggaactatctataatcctttatcagctaaagctttatgtaaatctctatagcacaaaaggaaatcctgggggtcttttccaggcaacccaggacaaattcttaactgtccaaaaacagtcttcttaaaagaacagtattttttcttatgagttgcataaccaattgcaaacttgagaattaatagcatctgagggatgaacaattttaagcaattgtaagctctgagatatatattgataaatatacaaattaaagcttgattattcaccattttaaagcattatctatagtatacaatttaattatgtgtgctgaagcaggacgaaactcagaagaataagcgtgtgatccaattcacatatacttttctcccatagaagggctgtttttaaacacagtaattgggatgcatgcatgcatgaatttatatagaagatacagacgcatgcataaaaacattttttaacttatctttggaataatgattgtcaattttatttaaaatgatggtattcaataggtcaaatattaatattctataataaccaatttaaatgctgttttgaacaaggaacagacactttgtcaggttcttaagacacaatttttgttataggttttctaaaatatatgaatttatcttacaattctttattagcaccacagcagccttagtaggatgttaaaactgtgttttgagatgaacaccaccttggccttgcccacctccagccctcctcccaggccatagaggataaagcagcccaatctgttgtaggccaggaagcccgagcaggggcagcagagcacctagcaggaaaagatacggccacccaggcagatgctcatgggagcaatggagcacacgactggtgcttcaggtcctccgctaagtttgctacaaaagcgcccactttctggcggcatcccatgccaccaccactcagggaaagaagcataccccatggtccctccccgcagcagccagcaggtggccagctccatgtgagccaatggtcggccaggaggagaagaaagatgactttccaataatgctttctcttgccaaggaattgctgtgggcacatttaataaccaataactaaaataggcagctaatatttaattaccattgattataattgataacaattataaaagctttctttaatttctgcaaagcttttgttctttaccagttaatttgtgtctcacttaatagcacctaacaaaggcttaaattctcctgtggtgagtttaaggtgaggtcttagccaattaacatctcctggaagcttttgaaaataaaattttgaagcaaatcaatttttcgttcttagattttctgtaccacaattttatagtataactaaaaccctaagtattaaaaagatattgcctctgcatcttttctggagcaacagctactccccagaacttaaaagctctttgtgtgagagcaaggatttaaagttaacttcccttgagaggcattagctactaaaatactttccacttaggaaacaatatacactgaaagattcaaactcttagcttcttgtattgaagcagaaacactaagaatttttcttacatgaggtaaagctatattagccatacccagtggcaaaattttccagtgattacaagctcactagaagcaaactctttacaattttccagatgca

SEQ ID NO: 3983 - DNA, 1000 bp, mus musculus
ttctcttctgagaagtgtaacccctaccttgggtactaacccatgctggcatatcaagagactgcaggactaggcaaatcctctccaactgaggccatacaaggaagcccagttaggggaacaggatccacaggcaggaaacagagtcagggatagccccctctctagatgctggggggcccacatgaagaccaagctgtatatctgctacatatatgcagggggcctaggttcagcccatgtatattctctggttgttggttcagtctctgaaagcctccaaaggttagttgactctgttgtggagtccctatccctctgagtccctcaatccttcccctaactcttccactagactcccgagctccatctaatggctggctgtagatctctgcatctgtttcagtcagctgctcagtggagactctcagaggacagttatgctagcctcttgtcttcaagcataacagagtatcattgctagtgtcagggattgatccttgctaatggaatggatcttgagttagggattgccctttccctcagtctatgctccatttttgtctctacactcttgttggcaggacaactttctagctgaatgcattgtgggtgggttggtgttcttatctcaccacttggggtcccgcctgactacaggaggtagacacttcaggctccatattacacattactgcaagtctcgcttcagagtcatcctcatagacaccctgaggctttcctcatccctggtctcaggcatatcctagagatgtggccctcctccacccccaccacaccaccatcactgatttccattcactctatcctgctcttcctacacctgttcctccatgctccccactaccctccctgctcccctctccctcccaggtccccctctccatccacttctgatgactattttatttccctttctgaacaagattcacacattctctcctgggcctttcttgttatttagcttctttggatccgt

SEQ ID NO: 3984 - DNA, 1200 bp, mus musculus
ggatgaagcatttttagtaaaacattttatataagacaaagcatccaaattttaacagatcattctttttattttatgagtgacttagagatcacatcctcaaactcagcacaaaaccttgtgaagaaatgtgacattttattgttgtgcttttgtttcagaaaactttgttttattcattttcttatctttgtctttaacaaattatgtattcatcggagatggatggagagagggaactaggttgaagagggagtaagaaggggaacagagatgaggattaggcaagggtagggggacagaacagggccaggagtgagaatagaaattggtgggggacatctctgggacttgctggaaaccttggccatggaagtctctgaggagtctatggagccgaccctagatgatttttaccactgaggggatattggaagtaacaacctcctgtaaccaggtggagggaggggacatcaacccatctacaaaactttcaacccaaaatttttcctggctacaagatgcacagggataaagatagagcagagactgagagaacagccaaccaatgactgacccaacttgagatacaacctgtgttagaaagacaatcactgacactattaatgatactttgctatgtttgcagatagaaacctagcatagctttccccagagaggcttcatccagcagctggtggaaacagatgcagagacccacagccaaacatcaggcagtgctctgggaatattgtggaagagtggggaatagaattgaacaagctggaggtgtctaggacaccacaaggcctacagagtcaattaactttggaccatgggagctcacagagactgaacctccaaccaaagagcatgcaggggttggacctagcccccctacatatttgtagcagatgtacagcttggtcttcttatgggtcacctaacatttggagactgactgtctctgactctgttgcctgccattggattcccttcccttaactggactgcctggtttggtctcagtgggagaggatgtgcttagtcttgcagggactgaatgtcccagatggtgtggcacccaaggggggggcatcctcttcttctctaagagaaggcatagcagtaatgggggaagggacctgtaagggtgggacttagaagagagaacagaaagggtgtaaagtgaataaataa

SEQ ID NO: 3985 - DNA, 1800 bp, mus musculus
tacccatatcttcgaggcttttccctactttctcctctataagtttcagtgtctctggttttatgtggagttccttaatccacttagatttgaccttagtacaaggagataagtatggattgattcgcattcttctacatgataacaaccagttgtgccagcaccaattgttgaaaatgctgtctttcttccactggatggttttagctcccttgtcaaagatcaagtgaccataggtgtgtgggttcatttctgggtcttcaattctattccattggtctacttgtctgtctctataccagtaccatgcagtttttatcacaattgctctgtagtaaagctttaggtcaggcatggtgattccaccagaggttcttttatccttgagaagagtttttgctatcctaggttttttgttattacagatgaatctgcaaattgctccttctaattagttgaagaattgagttggaattttgatggggattgcattgaatctgtagattgcttttggcaagatagccatttttacaatgttgatcctgccaatccatgagcatgggagatccttccatcttctgagatcttctttaatttctttcttcagagacttgaagtttttatcatacagatctttcacttccttagttagagtcatgccgagatattttatattatttgtgactattgagaagggtgttgtttccctaatttcttttttttttttttttttttttttttttttttttttcaaacccttgtgtcgagggctgactttcaatagatcgcagcgagggagctgctctgctacgtacgaaacccgacccagaagcaggtcgtctacgaatggtttagcgccaggttccacacgaacgtgcgttcaacgtgacgggcgagagggcggccccctttccggccgcaccccgtttcccaagacgaacggctctccgcaccggaccctggtcccgacgcccagcggagggagaccccgcgccgccgcggggacgatccctaatttctttctcagcctgtttattctttgtatagagaaaggccattgacttgtttgagtttattttatatccagctacttcacctaagctgtttatcaggtttaggagttctctggtggaatttttggggtcacttatatatactatcatatcatctgcaaaaagtgatattttgacttcctcttttccaatttgtatccccttgatctccttttgttgtcgaattgctctggctaatacttcaagtactatgttgaaatggtagggagaaagtgggcagccttgtctagtccctgattttagtgggattgcttccagcttctctccatttactttgatgttggctactggtttgctgtagattgcttttatcatgtttaggtatgggccttgaattcctgatctttacagaacttttatcatgaatgggtgttggatcttgtcaaatgctttttctgcatctaacgagatgatcatgtggtttttgtctttgagtttgtttatataatggattaccttgatggattttcgtatattaaaccatccctgcatccctggtaaaacctacttggtcaggatggatgattgctttaatgtgttcttggattcggttagcgagaattttattgaggatttttgcatcgatattcataagagaaattggtctgaagttctctatctttgttggatctttctgtggtttaggtatcagagtaatagtggcttcataaaatgagttgggtagagtaccttctacttctatcttgtgaaaaagtttgtgcagaac

SEQ ID NO: 3986 - DNA, 1000 bp, mus musculus
tggagccatggtgaggtcacagccttagctgttgttgagggccacatctgagtctgtggctatgcagttgcaggggtcagtgttgatttctgtggttcatattaccactggagaacatgggggatagccctggtcaggtagccaccagggaccatgtggatacccaagggctgtgcatagctataaccatccctgcccttcactggatgcaggcttctggagaggtggcctaatttctcactggtgggagcattcaaaggtatgggcaagccagctctgagggcttgagtatgggagagctttgaccctgacactcatctgctatagggtggtgtgggtgtggaagtgatgctccttactccggtggttgagaaagccacccacagggttacgagctcaggggagctagttctgtcccttacacttgggggagtgggccctgctccttgcgtggatagcacagcagagctgtgctcatggctgggagagcaggcaatccaatcacgagggcaagagcttgagagagctggccctgctgctcagtctggtgtgagatggtgtgggtgccctccccacttacccctaaccccctgcagcagttgggagaactggcagtggggcaagtgagctgaccttgcccctctctgactgtagcactcaggagagcaggccctgcacctgggaaatgcagtagagctggtcctgatggagaaggcattgtgaaccagcagccccaagcacatgaaaagcaagagagctgtcacagtctcttgaaagctgtgacactagtggattctgaaccttgactggaccccacagtggagctggctctggaggtgtcagtgcaggtgagctggctcctgagggcatgagagcaggagagctgaccctgccttctgctgatggtggcctagcagtgctggagagcttgtccaagtggtgtggataaaagagagctgctgggctgaccagctcagttacctcccaggcccagatcgag

SEQ ID NO: 3987 - DNA, 1000 bp, mus musculus
gccggtacaagagtcagagacccactccttctcaaggtgaagagtctcctaaaaattctaagcttgtatctataatgcccatgcagaggacctagtgtagacctatgtagccatctgtgcttgcttcttcagtctctgaaagcccatatggaccttgcttagttgattcagagggctgtgtcctcccatctggctctgagagtcttttcatctcccatttcttgacattccctgagctctgatggagacttcccatttagactcttcacaaaatgtttggctatgggtctctgcatttgttctcatctgctacccaaggaagccatcctgataatgacagggtaaggcactaacttatgagtgtagaagagtagcattaggagttactttattgatactttcttttttcaaaccaataatccttggttttaccctgggtttctgggctatctaatctctagttctaggttcctgaagcagtgtcaggcatgggttccctcttgaggaaggggtcttaactcaaatcacacattgtttggctactcccacaggctctatgccaccattgctgctgaaaactatacaagaggaacaacaaatggctttagaactcatggaatgtggcccacaggttaccacagccacatgggtgagcctagaggactgtgtggtgaggacttcatgctggtgtggagttctgctctgcttgctgccctcacttccctcttaatctaagaattgtatgaaaactctaagggcttccagactctcactgggcagtatctctggaactcataagaataatggctgatctcttttaggcattgctgctggggcagattaataattcaatcaccacctagggtagaacttcaagatgtagattatcagcaatgaccactaccctttgaaaacatcgggaaaaataaaattgttaatgaagctaggttgagatgtttttactgctggctctgatttagacaaccttatggagcaattt

SEQ ID NO: 3988 - DNA, 1000 bp, mus musculus
taaaatgtcacccacgtcaatttactggtcctttgtttacttgatgctcaattaaacacaagccataaagaatcactaagttaaatattccttatagacatatcttattttttaatcccctcaaatctcagatcagcaaaagcagtggcatatggcttgaaatccacatcccaacctcttaaccacacataggtctcaaacaaaataactaatgaaagcagtggtcctgagcgctcagatgaaaagaaacatggaaactcagaatggtccaactactcttttcctacattcaagaacccaagccatctcaagaatggctcacttagctggctgatggttgcatgggagttgctacactgtgcccttctgcagccttgagcaggctgaacaggccttgagtgcttgccacaatgggctcaacgacgacccaggtggagtcatctgccttgatgcacctgcaacttcctacaggaacttagaagaatagactgtccactgagcttgtccaacataaaacagctgaaacaaaggatggattttgtggttttccctttataagctggcgctgcagaattaaattttgagcttgatcagaaccttgtcttggtttcatccttctctcccaccctttctgttcatttccagtccccctttcagataaactcagttctccatgaccactggatgactgcaccacacaagtatccacacctcaatttagatcctcacacaagtatccacacctcaatttagatcctcagaagtcatgcgcacccaggtgcagaaatgtgtgtctatgatccgaatattcctatgatgagatgagaggcagagcctggagaatctatagagattgggggactgctggtttggcacacaagctgaataacaaagggctcttttacaacaagggtgaggaaagggccaaagattggcctctgatctctacacatgtggtagcatgcattccccagtacgcaaagatacacaggcacattct

SEQ ID NO: 3989 - DNA, 1000 bp, mus musculus
gtagatttagcttttaaataagattacatttagttgctgtcttagttagggttttactgctgtgaacagacaccatgaccaaggcaagtcttataaaaaacaacatttacttggggctggcttacaggttcagaagttcagtcctttatcatcaaggtgggagcatggcagcatctaggcaggcatggcacaggcagagttgagagttctacatcttcatccaaaggctgctactggaagactgacttccaggcaactggggtgagagtcttaagcccacacccacagtggcacacctactccaaccaggtcacacctagtccaacaaggccacacctccaaatggttccactacctggtccaagaatatacaaaccatcacattccaagcctggccctaatagacttgttcaaaaacatgagtctatgggggccatacttaaacatagcataatgcaaatgcatttagtccaacttctaaagtcctcatagtctatatcagtctcaataatgttaaaagtccaaagttcaagggctcttctgagattcattcaacgtattaactgtaatctccaaagcaaggcaggaaagcagctgggcaaactccaaactctgcatctccatggctgatgtcaaagcagtcttcagatctccattcctttttcatctttgttgactgcaacaaactgctttttcctgggctagttctactccctgttagcagctttcctcagcatgtatcccatggctctggcatcttcaatacactggggttttccactccaactaggcttcaccaatagcctctcataggctctcttcatggtgccaagcatcaaatcctttgtctgaccccttcagtcctgggccatcaactacagcggaggttacaccttctccaatggccttcgattacctctcacagtgccaagcctcagctgttcttcatgaccccttcatgccttcaaaaccagtacctcctgtgtgactcttacacatt

SEQ ID NO: 3990 - DNA, 1000 bp, mus musculus
aaagaagactatgggagagtacaatggtagatttagcttttaaacaggattacatttagttgctgtctcagttagggttttactgctgtgaacagacaccatgaccaaggcaagtcttataaaaaacaacatttacttggggctgacttacaggttcagaagttcagtcctttatcatcaaggtaggagcatggcagcatccaggcaggcatggcgcaggcagagctgagagttctacaacttcatccaaaggctgcttctggaaggctgacttccaggcaactggggtgagagtcttaagcccacacccacggtggcacacctactccaaccaggtcacacctattccaacaaggccacacctccaaatggtgctactacctggtccaagaatatacaaaccatcacattccaagcctggccctaatagacttgttcaaaaacatgagtctatgggggccatacttaaacatagcataatgcaaatgcatttagtccaacttctaaagtcctcatagtctatagcagtctcaacaatgttaaaagtccaaagttcaagggctcttctgagattcattcaacgtattaactgtaatctccaaagcaagacaggaaagcagctgggcaaactccaaactctgcatctccatggctgatgtcaaagcagtcttcagatctccattcctttttcatctttgttgactgcaacaaactgctttctcctgggctagttccactccctgttagcagctttcctcagcatgtatcccatggctctggcatctttaatacactggggttttccactccaactaggcttcaccaatagcctctcataggctctcctcatggtgccaaacatcaaatcctttgtctgacctcttcagtcctgggccatcaactacagcagaggttacaacttctccagtggccttcgatcacctctcacagtgccaagcctcagcttttcttcatgaccccttcatgccttcaaaaccag

SEQ ID NO: 3991 - DNA, 1000 bp, mus musculus
tatttctttaagtgagttattaatgcccctcttaaaacttctgccaccatcctgagatatgatttcaaatctgtgtcttgctttttgggtgtgttggagtatccaggacctggcatactgggttctgatgatgcccagtgctcttggtttctgttagtaagatccatatgcttgccgttctccatctggaaatctctggtgttaatgttcaagctgtctctggctgacacttgatcctcctgtgattctgttagtctctgtcagcactcctgcgagtccaactctcacctgagttccagtggtcagagcactctttgcaggcaaactttcctctttcagggaaggtgtccagcagtctggagctctgatccaccacctgagtcctggggtcattgccctccctgtaggccgactctcatctggcaaggaaggtgcccaggggtctgggcctcagctgtgcctcctcattgaggatgaaggcccgacgggaccctgaacaagaagctctgttgcttcgattgcccatgtgctctcgtgtgatcaggaggtcctggttgtgctagggctcctgcggcatggagagtcctctggtgccctagacaccctcagccaggttcacacagaagatggggaggctggttccgatctgaatggatcccagcctcaggtcaggggggttcctctgcccctgttcctgctggtacaagaccctctgcgattctttggagctgatgttgcgttccactcacctgtgatcccgacgtcctttggcatagagagcactgtggagcccttggcggcctccgctgggttcagaaggaagatggtaggcatatcacattttctaaagtgagaattttaggcctaaaatgtacttctgtctctcaagcaaaacacagaaaatggattggacatgttgggaggtggaggcataggaaaatgttgattgaattaaatcatctttagatgatttatggaagaaaatcagacatgtttgaca

SEQ ID NO: 3992 - DNA, 1000 bp, mus musculus
ttggttctttaagaaaatcaacaagcagctaaaagagtctgatgtagatatttgtacccaaccaatggacagaagctgctgacaactgtggttgaattagagaaaagctggaaagagctgaggagaagagggtgaccttgtaggaggaccagcagtctcaattaacctggatctctgagatctctcagacactggaccaccaaccaggtgatatgaggcccccaactcatatacattagagggctgctgagtctttgttcagtcagagaagatgtacctaatcctcaagagactgtaggcctcagggagtttagaggtctggtggtatggagatggggacattctcatggagacaggggtggggtggggagtgggtgaactaagagggaataaaatctggagtgtaaaatagataaatacaataaaatatttttaaaagataaaatcaacaagactgacagattattatgaaaactaattaaaaggcagagaaaaagtatcaaaattggcaaaatcagaaaggaaaagtgaggcataacaatagacactgggtaaatccaaagaatcattttgtcatagttcaaaaacctgtactctacaaaactagaaaatctaaaagaaatggtttattttctcaatagatactacttaccaaagttaaatcaagaccagagaaataatttaaataaagatatagctattaaaaaatagaagcagtataaaaagtctccccctcaaaaagaaataaagaagaagaaagaaaaagaaagaaaaaaatcccagtacagaattcaacgagacattcaaggaagacctaatatctatactcctcacattgcactacaaaatagaaacaaggaaccattgttaaattcattatgtgcccacattcaccctcacaggtaaaccacacaaagattcaataaaggaaaaaatatatagaacaatttctctcatggaccttgatgtaaaattactcaacaaaatacttgccaacaga

SEQ ID NO: 3993 - DNA, 1400 bp, mus musculus
aacacaaccaaacaggagaaagaattgaacaagactatccaggataaaaaaatggaaatagaaacaattaagaaatcaaaaggaggagacaaccaggatatagaaaacctaggaaagctcctaacacaaaacgtccaggaaatcgaggacaaaatgaaaagatgaaaccaaaggataataggtatagaacagagggaagatacctaacttagatggccagtaaatatcttgaacaaaattatagaagaaaacttccctaacctaaagaaagagatgcccatgaacatacaagaagccctcagaactccaaatagactagactaggaaagaaattcctcccagcaataaaatcaaaataccaaatgcacaaaaaaaagaaaggatattaaaaggttataggaaaaaggtaaagtaaaatacaaaggcagacctatcagattacaccagacttctcaccagaaactataaaagccagaatatcctgggcaaatgtcatactgtgaggaagcgcccttgcaatcgccattacaagatggcgctgatttccggtgttctaactagtaaacaagtagtctgcgcatgtactggggtatttttccattccttgtaccatgcctgtcccgtggcgtcatctgggctgatagtgagcagccggtcagggtgaaatatgtccccaaacgctcttgtgagctatttaaggaccgagtttcctgtgtcctgggcctcctccccagaagctgatgacctttctctcaagatgcattaaagctatgctgcagaagaacccgtgtgtgtccttgctggcgagactcccttatcacacagatacatctggtgccgagaacccgggaacgccacaacatcgctggcattgagaagttcccctggaaacggggcaggtccagaactgcagtggaaggtaagtccggagagacatgtctggccttgagaaagcatgccagaaactgaacggagcaagataataggagctcatgaaaaaaaaaagacatgtctaaggaaaaagaaggaaaaaggacctacctggacattagaaaaaaaagggggagtgaaaaaggagaaaagagaaaaactaaaagataatataaaatataaagatacaaaggataatataaattataaagataaaaagaataatataaattaagccaatttaccctcctctcgaggactttgactaaagaggcagccttcattaaaggcttaaagatagctgtcaaggtcactatgcctcctctctatttcctggcagtattccctgaagaaggagataaggaagtagagtctgaacatgagggagagaaaataagttttaaaaaagcagttatcccctgtttgagatcttttagcaaaaaagagaaaaaatgaaaataagctatttt

SEQ ID NO: 3994 - DNA, 1400 bp, mus musculus
tctcagcctgtttgtaattggtacaaaggaacattactgatttatttgaggtaattttatgtctctcaacagaaaaacgtatacagaaaatacacatttacataatggagtactactcagtgattaaaaagaatgactccatgaaattcttaggcaaatgaatggaactagaaactatcctgagtgaggcaacccagacacaaaagaatatacatggtatctactcactgataagtggatattagacccaaacctcacaatgcctatgatacaacccacttagaagaaaggaagaactgtatggatgcttcagtcctttattgaggggggaacagaatgattgtgggaggtgaagggaaagggggtcctgggaaggagggaggagggggaggcagtatcaggcactggaggggatgtgagagaggtacagagggtcaggaaatagaataaaaatatctagcaggaaagatgaggaactggggatagccactggagggttccagacaccagggaaatgtgaggttcctaggagccaatggggatgactttagcctaaatgtgcagagaacatgtagattgaacctatagtgactacctcctatagataagcatggcccctggttgagggatggggccacccacccatctcagtttttaatccagaaatgttcctgtccaaaggaagaacagggagaaaaaaatggaacagagagtaaggaagggccatccagggactgccccacctggatattcatcatgtccacagactccaaacccggcatttttgatgtggtcaagaggtgcttgctgacaggaacctggtgtggtggtttcttgggaggtccaaccagcaactgactaattcagatgtggatgcttcaagtcccccatcagactgagctcaggaaacctcatgggagagctggcagaagaactggaggagcgggggtagggggtttgttgcaatcccattggaagaacaacataggcttccctgaccacccagttctcccagagagtagaccaccaacaatagctctagatacagatgcagcagaggatgatcttgcctgacagcaataggagtggaggcccttggtcctggggaggtttgagagcccagtgtagggggatactggagcagtggggcaggagagggtggatgggtgagggatcaccctcatacaggtaaagggaaagggtgaggggggatgttggatgaggcattggtggagggataaccgggaagtgggatatcatttgagatgtacagattggaatgattaatatatgtatataaaatcgggtcaatttccacccaagccaaggttaaaggcccactcatctacggatgacaaaatcatttgatcacctcagttaagtgttgccttatttaactt

SEQ ID NO: 3995 - DNA, 1000 bp, mus musculus
tctgaccactacaaatgaaagctagacaccattgtggcatcattgagatatgagaacaagatattgaggttatccactctcaagtatgtactcactgataagtggattttagccccaaagctcagaatacagcccacaaaaactatatgcagtttaagaagaaggaagaccaatattgtatatgcttcaatcctacatagaacggggaacaaaataatcacaagagctagagggatggaaggacctgggacagagagaggaagggaagggaaaaaaagggtcaggaacaggtattggtagatacaggagagaagtacagagggtcgggaaattgaaacatgtagccatgggggatggggaactgggagtagccactagaaagtcccagacttcagggaagcaggaggcttccaggacccaatggtgatgacttcagctgaaattcccaataaaggggagaaacaacctgtagagaccacctctagttgataggcatgatcccagttgagggatggggtcacccacacatctaaaaaattttaactcagaaatgttcctgtccaaagaaaggatagggacaaaaatggaacagagactgaaggataatctatccagagacttccctacctagggatccatcccatctgtagacaccaaaccccatcactatttctgatgccaagaagcacttgcagacagtagccggatatggctgtttcctgagaggttctaccagcacctgactaatacagatgcatatactcacagccagccattggcctgagcctggggaccccaatggaggagctagggaaaggactgaagaagctaaagtaaattgcaccccaataagaggaataatagcaacagacaaagagaaaactagattatgatgataaataggaaagagatggacaagaaggtgggaatattggatggacaaatatcactaaaggccacttgaaaagccacatgaaaacctattacctctctgaagaaa

SEQ ID NO: 3996 - DNA, 1400 bp, mus musculus
tttcagatcttggatggttttgttcaattccatcacctgtttggttatgttttcttgtatttcattaaggacttctacctctttagcaacattctgctgtatttctttattgagttattaaagcccttcttgatatcctctaccagcatcatgagatatgattttagatttgagtcttgcttttcgggtgtgtcggggtatccagaactagctgaggtgggagtgctgggttctgatgatggtgagtggtcttggtttcttttagtaaaattcttacatttgcctttcatcatctggaaatctctggagttagttgttatagttgtctctgttcggagcgtgttcctcctgtgattctgttagcctctgtcagcagacctgggagtctagctctctcttcattctcagtggtcatagtactctctgcaggcaagctctcctcttgcagggaaggtgcacaaatatctggcattcagacctgactcctggctgaagatgaaggcctgaaacagggcctttcccagaggatgtgttgcctctgcagtctgcacactcacctgtacagactggtctccaagggacatgggacacaagatggctttctcacctgctctggtggtcaggcccctccctggcagacacctctcctctggcggggaaggtacctggatgtctgtagctttaaatggggtctgtcccagaagctgtgtagcttctgcctgtcccagaaactgtgttgcttctgtagtctgctagctcaccctttgcagtctgtgagctgattgcacagactggtctctgaggaacccaggacccaagatggctcccccaggtgctctggcaaagccctcctgggcaaggcggactggaagggaaggttcccagatgtctggagcccgaaaagaggtctgtcccagaagctgtgttgcttctgcctgtcccagaagctgtttcacttctgtggtctgcactctcacctgcgcagactagtttctgaagggtccgggtcccaagattgctccctcacctgctcaggcagagacctcctgggcagacacctctcctctggcaaggaaggtgcccggatgtctggagcccgaaagggggtctgtcccagaagctgtgtagcttctgcctgtcccagaagctttgttgcttctgcagtccacttgctcacccttagcagtctgtgagcttacctgcgcagactggtctctgagtgatccgggacccaagatggctccctcacctgctctaaggctgttctttttaaatgaaagacagaaggggagtggatccagatgagacaggaggtggggaaaaactgggagaaatagagggagaagaaactgtgttcaaattatattgtattagaaaaaaaccctatgtttaacaaaggg

SEQ ID NO: 3997 - DNA, 1000 bp, mus musculus
actctccagagtgctgcaaccaatgaggggcagggatagttttctacgtctcataatcttggggccagctctccagactactaaacgtgatgaggggcatgggtaggagtaggaggaaggtatcacccaaacccatgcacctcatagcagatgagtgttggagctagctctcgtgtggtcctgcccttggggccagcttacctgtgcccctgtcactagggccaactctactgtgttgcccagggaaggtgcagggcacactcaccagagtgctgcagccagtgaggaacatggacctctcttctgctctcatgacccaggggccaggtctcctgatgtctgcagatggagagggctgaggagaggatggagatcaccacttctgtgcctcttggcagttgagtgggggagggagcagctctcacaagctcacacctttagggccagctctccaaatgtgctgttcaggcaaggtgcagggtctgctctccaaagtgatgcagatggggagaggtgggaccagctatgaacaacccttgtacatctatgtggttctagacagcagcccagaccagggatgtccacacggtctttggtggtaatatgaaccacagacattaagacagacccattttgctgcatgacaatggtcccagacatgacccttagcagcagcactggctgggacttcatcatgacctcaaaaggcaagggttaatactcataacaggcaattcctctctaccctcgctccagttcatctctcttcataatgctcagactgtcctgcctttctttctctcccatctgttcatcacatacttgcacattgtagtggctcctactgcaggcctctaggtgtcttttgatcacctgcaccactgtgtggcctgggatggatccccgggtatggtagtctctagatggtccatccttttgcctcagctccaaactttgtctctgtaactccttccatgggtgttttgttcccaattctaag

SEQ ID NO: 3998 - DNA, 3400 bp, mus musculus
ggattcctagcttaaagtctcagctagagctataagacagctgaaggaggtcaaggaaatacagataggaaagtaagaagtcaaagtaatcttatttttagatggtattattttataaataaaaaaacccaaaagattataccaggaaacttatacagatgatcatacttttagcaaagtagcaacacacaagatgtacacacaaaagtgagtagcttttcgtatatacaaattacaaacatactgagaagaaaaccagggagtctgtacttttataatagcctcaaaaatatatcttggagtaacactaactacacaaaggaaagacatatggaataaaaactttaaaacactaaagaaaaactaaagaaataattgcccaataaaatacatgtgatcataagaagaaatgagattgaagggaaaataaatgaattcagaagaacatcaagttaatgaaacagatgatgtcatatttgaacacattctgtgcctttttgttttgtcctatgttcatctctaagataaacagggtcctgttgcttgcccagaaaccacagtactgggcaagatgacggttcacactgtacaaagcaacccaactgtcagtaatagtgacaaagttagaaacactgttcctctggatccaggcccacaatttctgactcttgcttcctgctttaactgatgtgatttccagaaatggaaaaattcccagtcatgaggccacagccatgaacagaggccagctttcattactgttggagtcagttctaatgttcatgctgcgtttacccttgagccagtaataaagatggagctgtggtcttgggttgggtgtgtgaagtaggatgctaagtggtgtcttatattatacattagactataaatcaagacatctgggagcagcaggggtcccaaaatctatacagtcctcagagaagaaagaacatttaagataatcccttacagaagagaaaaacattaaatacattgaacacaattaatgtttgttttgacttacttgatgtcttgtgaattttgtactggggactaagaatcacgtgtaaccatgtagaggacagacacataaaccctcatgcaaaagttatgtaactatgagcattttgacaatgtcattttatatctcatccacatgctttcgtggaagataattagagtatttttaacaatctcatatttataacatgttccaataaaacatgcactagtgaaagaaccacatttcagtaacattatttggtaaaatcaaacatttcctagcatcacctgataagtttaggttttttgtgctcttgattatactaaaaatattacatggatagtttattgaaatcaaacctcagtaagttcaacatatttagtttatgaatctctaaggtttcctttagtttctattattgttctctccctcattttctcttatacaatctattaaatgcatttcctaaaataatcaggtgatgagttctactacccttccaagttggctggttctgactctcgggtatcgtttaacatagtcttgaacttcctgtatttactctaaggtgataatcagagggagctttattagatttcatcttaccttttgccattaatatataatgagcatcccttctaagcaatgctacacagtgggagtaaggcaaaagatagcaactaaaccacattgctatcaatcattataaaagtccccatggatatacatttgatggctttagcatgcaacatttattattttctaaatccagtttctcattggggttgtaaaactcctatctaattctctcattccttctgcgtttagtaggtggaattctgaaatacatgtcactttgaaataaacttcatgctctacctaaaatggttccatttctttattagcccttttcccataataataacatgatagaagtttctaaaagagtacagtgttgttagacatcacgtagctttgcataatgaagatatttcaagatgtccatcattatttcacatactaaaatgatcccacatttagcaggaacatctatacagactaatgtgactattgatgtcttctcatagtgatccagacctctgtcctgtattctagatggacactttcaacactagagtctaatctgaaagaggtgattaccccaggagtccttggtaacccttgtatgagaaacagtattttgtgaatactatctagatagatcctcacattgtatcttaaaataaaacaaagcaaaacaaaactggttgtttctagactatcttggaaatttatgctgatcttacctaaaattgtctattaaaacacaaatatgtagaaagaaatggcttcacacatcctcgccagcatctactgtcacctgaattttcgatctggcaaatacagaagtagatgctcacagtcatctattgggtggaacacagagcccctaatggaagagctagagaaagtatccaaggagttgaaaaggtctgcaaccctataggtggaacaacaatatgaactaaccagtaccctcagagctcctgtctctagctgcatgtgtagcaaaagatggcctagtcagccatcactgggaagagaggccccttggtcttgcaaacgttatataccccagtagaggggaatgccagggccaagaagtgggagtgggtgggtaggggagcagggctgggggcagggtagaggggacttttgaaatagcatttgaaatgtaaatgaagaaaatatctaataaaatttgaaaaaaaaaaagaaatggctttgtggaaacaatataaaccttgatcctcttgtaatgttattcctaaaaagaagtcaaaactgttgaacacttgacaatagaaaacagaagtcaatgaactgctgctttacagcatataaaaaaactgccttgttatgaaaaactgacaaaattgtataattagccacaaatgcacagctggaagagaagggggcatgagccagagtgaacagcagttatatatgaggatactacaggaccaggctctactggacctaacttgaggactccctctccttcatcagcccttcatttccaagcatgtgccattccctgaggagtggattacagactgaccttgaaggtgctggcaaagctccttttccttctttcttttggcagtgtagcttgatacactgtttgtatggaaaacatagatgtcacttaaatttatctctttttggtttttgttttttcagttttatatagttaaacttttcctacaataagaaaggttttcatgggtgacttaggcagaaaagaaaacataaatttgggtcatatgtagctgccagattaaatattaaaattatttaagttataaattctttgaaaccatgattactcctcaa

SEQ ID NO: 3999 - DNA, 1400 bp, mus musculus
tcccaaagagaagaagcggtccatgattttaaggcatttattgtagaaaggcagaaagagggagagagtagaaaagtagaggccatggccacgtggaggtgggagaggaatgtgaagagaaaggagagcaagggatcgagagacaagagtaagagcaagggagtaagagaaggaagaggggccaagcagctccttttatagtgttgccaggtaactgtgcgaagcatacctggctattgccaggtaactgtggggtggattccagacagaataccaggagcttggggcattgccctatatgactgatggccacacaactctctctgaggttggggggagctgtgggaggctgtagctgcagcaggagtcaggggcccaaggagcgtggccaaacacttgccattccttgcctgcagaagtcacctaccaggtctctggggctcaaagcctgtactcaaccagggaccatgctgcctgttcaaagctcaccgccccatgataaagtgcctgaaacttaacacaaacatgttgcttctagtaaatttcttgctgaataagactaattttagatatacgcttaatatattaaatgttgccagtctgtgctggtgccctgagcagatcatgggtactagtaccacacccagtcccacaacacctagaagaagctgactcccaggcaacccaacatgcccaggatcataggggaggaggccacatcatctgccccaacacagggaataactgggactatctggatccagggacacaggaaccctggcctggccagtggcaagggttccttccagtctgaacacatgcactgagcagacactgggtgctagctccacacacagtcccacaactcagaggaagctggattcctagttactctaacacacccagggtcataggatcacaagatcttgggagcttggccacaccaagatctcaggatcccagaagcagcttgacacccagaagctcttacacacccaagatatcaggatcacaggattcccagaatcacgggatcacagagataactggactctgaggagttctgacacaaccaggatcacaggagggaaaggctccagtcagagacagtgagggcaggtagcactagagataaccatatggtgagaggcaagcataagaatataagcaacagaagccaaggttgcttggcattatcagaacccaattctcctaccatagcaagtcctggatataccatcacaccaagaaggcaagattcagatctaaaatcacttctcataatgatgatagaggactttaagaaggacataaatataagtatatacaagtagaagcccttaaaaaggaaacacaaaaattccataaagaattatagaaaaacacaaccagacaggaga

SEQ ID NO: 4000 - DNA, 1000 bp, mus musculus
gtaataggataaatttgactttttgaaaaggatgctaatgtctttcatccagaactcttgccttccccaaattaatgcattctgtacaatttttccccttaactctttatacaactgctctcaatttccccttttcttgaagcactcccctccatgtcactttgacaattttttgacttttatgagcattccaaatgaaacacacatatctgaagattcaaagctaatacccacaaatgagaaaagacatgagatagttgtctttctaagtctgggttacctcactcagggagatagtctccagttccatccatgaaaacataggaatttcattattttacttttcttaacagctgaatgatatattcaattgtataaatatatcacaatttcataatctattcatcaggtcatgggcatatatactgtttcaatttcctgattattaagaatgaactaaaatgaacttgataagaaggtttctatgatgtagagtccagtagtgtcacagctctttggaaggtttttatctagaatattaaaataactaaaaaataaaaaataagagtccacaccaatacaaaaacaaatcatacagtcaaaatgggggatagagacaaagaacaaaagcagaatacagaagagtgagaaacaatgaaaaaaaatgtttaagaccctcagccacaagaaaaatgcaaatcaaaactactttgagatttttatcttatcccagtttgaatggctaagatcacaaacaagccaaaacaaatggatggcaaatggatgtgataaaagggggcacttagttatggttgctgcgagtacaaactagtggagccactatgaaagtcagtgtggacattcctcaaaaagctggaggtaaatctaggaagaaaaaatgaaaaatcatgttctctaaggcaaacatgagatagaaaaaaaagtccttcttctattctgcagttctcctgaatctagagtgcagtggatttctaggtct

SEQ ID NO: 4001 - DNA, 1200 bp, mus musculus
ggatgggcagcagcaaccacagcaggagaaagcagagcctgtcctggacggggctgctgcccgggctttctatgaggctctaatcgcagatgacagtagttcctctaagccccagagagctgaacctatgagggagaggaagaagaagagaagagtgactagggagcctgcagcagcaggagtccccagacaaggaagagcacttgaggatgaagacaggatagcccagcggatcctgctggcagcccagaatggggatctgacagaactccggaggctgctagaaccccaagaggcagtgggagctggagggaatatcaatgctcgtgatgccttctggtggactcccttgatgtgtgctgcccgagcaggccagggcgccgctgtgcgctatctcctgggcggaggagctgcctgggtcagagtctgtgacctgggaggcagagatgctgcccagctggctgaagaagcaggcttccctgaggtagcccgtatggtcagagagagtcatggagagacaaggagccctgagaaccagaaccgatctaccccctcctcgtcccagttctgtgaggactgtggtgcccactttgaagactccaaccactgcacatctactgctcacctgctgtcactgtccaggagaccccagccctccaaccttccccttggggtgcccacttccagtcctggcttcaggctactgctgagaggtggctgggaacccggaatggggctaggaccccggggtgaaggccttgccaaccctatccccactatcctcaagagggaccaggaaggattgggttatagatccccaccccaaccctgagtcacacactttgcagcgcgggatacccgggctgtgtctggaagagacagagtccctcgagttgccactctgagtcagagggagaacagaaatcgagaagaaaagggcagagcctgggagcgagatctaagactgtacatgaacctcaagttctgactgatacagactggccctggtctgtcactcgctgggcttgggcctctgacttggacacttggacttccgaacccttaggccttggctgttgggctctgattttagagagaagggcggagagttgggagataaaaaaaacttccttccttgtgaaaaaaaaaaaaaaataagtaaaacagataaagccaaaagccaaaacagtacaagtgtag

SEQ ID NO: 4002 - DNA, 1000 bp, mus musculus
tcttggtccatattcctgagaacctacctatacttttaaaactacaaatatttattgtgatgaccaataattttttgtgggactgataaagtattcacattacttgaagtattaatatatatcctttcaggacaatacactaacatttaagattttgaaaacacacaggaaaatctccactgttgtgttccagatataaaggaatgcaagaacttattgaaaagtgaccactgggacctggaagagcaaacaagttgcaaagctccctgcttcatattctctgcccatcctcacgtggcataccaggtcttggggatatccagacgtctgaatgcaagctgcatttgaaatgatccaaaagacttgggcttgcccagaataagaggggacattcctgcacacttccccatattgttccataaaacctggactcccaaacaaattgctttactgaaaccctgcgactgagagatgagatgttctggacattggtgagttgtcatatctgcgaccttcaagcctccatgtgaagggagagcacagggaacagatacacctggaaggatagtccacaaatgcctgacgttaatgtttagaggccctggtgagagccagaaggctaggattcctcagtattacttatgactttctcattgtccataactcttagactccactatccaacaaggagcaaggtgaggcctctaagctcagcctaagtaccctgcagcagttctctttctggttttctgtccttgttccttatcccaaatctatcaaggcagactcttaggagctcccaatactccctattaccctaaacgtagatcccagtttaagcaaagtttaagcaattgttcaagaccatttcagtgtccttcccattacaggcaagataatgttctcttccaatgctgtccatgttctaatccctgaatcagtggattctggaggtgaaaaggtacttgcagaagtcataatgctaaaggtcttgagatgg

SEQ ID NO: 4003 - DNA, 1000 bp, mus musculus
acattttcagagagttctaagcatattacaaaaagcagtcatgaatctgttaccaattctcctggccagtgagagtttgtcaagtatctctatgtttatcctgtcccattcatactgtttcagtttgcttgggggaagataccctgagaagattcctagactcgtggcctcatctgtgcttatcacagtctccagggcatgaggatgacttgcaagtagggccagataaagttatttccctaaaagcagaagagatagtaatttcacgactcttcaaaaagaactcagacataattttcttaggaagagacataaaatgaatcataatgcagaatgccccccaaaatgcagcacacagagaccaaagcataaaagtgagagtggacatttggctcatcgctgctggaactatgtcaaacctctgtgctggctttatagctttcgccatttccagtggatatggctgtgccaaagacccacactgcaaacagagataatgtcaacattaagcaagctcgtggataacaaagtgtataaagtgctgctgtgcaaaatgaggaaggcaaatggactaagagtcccacccctggatcaatgcagcagcaggagaagacctgctcaggaatagcaggttaccagcctggttcccagagacaggaaggaagggcctagcagcctccatttggagctggggaaacccatgcagtcctgggcagaaaagaaccaaaaaagtaactggcagcatggagtcctacaaaggtggggcgtgggaagggaaggatgggagaacagggaagagtttagcgaattcagaaaatgggacagcccctctggcacttattcttgcagaaacttttaacgcaataaagtgtcgttaatacatactatgccctgtgcttagagccaagttaacaacaacaaaaataaatgcattgactttgtcatctctgcagatgattttttcaaggaagatgtggagctaattctaacagttattgcc

SEQ ID NO: 4004 - DNA, 1000 bp, mus musculus
gttactctatctataatgattccagaagctcatgaaagacaaacaatatgccaagaaaatgtgtagcagaaaagtgaggaagagcatgaaaacacagcacagaaaacaaagagacagagtagggaggaggaaagactgaggggtccctgacaggagggctgctgtcacccggaagcttggagtcacctatggctgctttctacatccagggaaggctgcaaactgatttacatacatagctggctgatgtttaataaaacataaactgtttgccaacaaggtagctgatcctgtcgacctcgtggaaaataagggatgtcatttctgcttccctggtagaagcagccatggcaactgcctgacggcatgagcaaaagttactggagttcttctgacgtctcacctatgcctttccatcacacttcctcttctgcaggagtccacctctcctatgttcctgtgtatcctctgggtcatttcttcagaaacccttgcttgttgctgtatgcattcttggagcttctcgaatgatttatgcatatctgatagccatcctttccttggttcgttaatcctcaatttcactccgtacttttgttatttgtatacttgtttttaactttgattgcttttaacatagctttagtgctctaatagtggatatgagttgttagctaagcgggtgaaataaagctgaagaattcagtgaccttattgcacgttgtcttgataggctccggatttactctagaccagatgtgaggaacacagaagcaatctctggcccctgagaaagctctctcagggtgcttagcatcctctctgtctgtgcagcaattaccggtcctggcctgggaccccttctctgtctctgattggtcctaaaggaccagcaagaagccttgtctcaaactccaatccccttacctctcttattttcctacttgaaaactcttctttgatctcttttggtcagacccagagtgctttccctgttctg

SEQ ID NO: 4005 - DNA, 1200 bp, mus musculus
aaaaggacaggcatggtatgcactcactgttaagtggattttagccaaaaagtaaagaatacccacaatacacctcacaaaccctaagaggttagacaagaagccagacccaagtgaggatgcttcaatcacatttagaaggaggaactaaatatcatggggtgagaagagggagaaagggccctgagtaggagaggggagagggaggagaaaatggggacaagatcagatttggtgggagtcaggagagaagcccacagggccaggagaatgaatggaaatatgtggctgctagagtcggggaatggaaggaacctccagaaaatcccagagacccagaatgggggaggctcccaggactcactgtgggtgactttagctgaaatgcccaacagtgaggagatggaacctgaaaaaaacacctccagtagttagacagtgcccccagtggagggatggagacaccaacctaccttcaaatttttcgacccaaatttgttcctgtctaaaggaaattcagggacaaaaatggagtaccaactgaaaatatgaccgaccagtgactagctcaacttggaatccatcccatgagcaggcaccaaaccatgagaacttactgatacaatgctgtgctgtaggcaggaacctaagctgccctctgagaccagcagctgcctaagacagatgcagatacttaacagtcaatcgttgaactgaggtcagagacccctatgaaagaggtaggggaaggattgaaggaactttagtggatggcaatcccataggaagaccaacagtgtcaactaacctggacccctgggagctcccagagactaatccaccaaccaaaaagtgtatgcgggctggtcggaggtcccccgcacatacggagcggaggactgcctcgtccggcctcagtggaagaggatgcacctaattctgtagagctgatgtcccaaggactgggaatgtgggcagcatcctctcagagatgcaggggagaagggatgggggaagaactctgggagcaaggactgggatgtaaataaataaaatagttaataaaaaattttaaaatcatagatgccatgttaaagtttaaaacaaactaaactggaagtcattctataaacatagagcattttgtttattcttgtttttcagaattcttgagttacatcaagtcacttatttgtgacc

SEQ ID NO: 4006 - DNA, 1000 bp, mus musculus
ggttttacaacaaatgtctaggtagctacaaagcaatttacttatatgttcttcttcatatttatgctgactgcagacattttaggcttagagttcacattaaatgaagaaaccatagcagtgtaaacagaacagaacagaactaatgactgctaaagagataacattagaactggagctcttctaagccaaaaatgcagagggtgggtataaaaagttatgtttgctccgctcccttgtgatacaatgagacaagaagtctcttcattgctcccttcatgtccttgttcctcaaagtatagataaaagggttaagcataggagtcaccaaactgtagaacagagacagaagtttgttcttgtcctgggaattagaagatgagggttgtacgtacatgctaattactggtccatagaaaagagtcacgacaacaacatgagaaccacatgtattaaaggctttcttcttgccctctgaggaacgaatcctaagcacagttgctacaataaacccataggaaataagaataagtgacaagggaaccagagagtagaaagtccctacaatggagagcatagctatattgaatgcagtgttagcacaggacatcttgatcatcaccgggacctcgcagagaaagttgtctactttgttgtttccacaaaatggcagcttgacggtgagggttgattgaagcaaagagttagccaagccactcagccaagccatggacacgaggaggatacagagttgctggtgcatgatcgctgggtaccttaggggcttgcatatggcaatgtaacgatccaaagacatcacagccaggaggatgcactcggtagcccccaggaagtgaaaaatataaaactgtgtcacacagcctccataactgatggatttatctgggccccaaagattccgaagcagctgagggatggtggttgtggtgaaacacaggtccaagaaggagaggttggaaaggaagaagtacatcgggct

SEQ ID NO: 4007 - DNA, 1400 bp, mus musculus
gatgcagaggaggaggaagagataaacagaagatagagagatctcctatgctcatagatgggtagaattaatatagtaaaaaaaaaaatcctactctggaggatatcatcttgagtgagataacccaatcacaaaagaacacacatgatatgcactcactgataagtggatattagcccagagactcagaatacccaagatacaatttgcaaaacacatgaaactcaaggagaaggaaaaccaaagtgtagacactttgatccttcttagaagggggaaacaaaatacccatggaaggaattacagagacaaagttcagagcagagactgaaggaaggaccatccagagactgccccaccgggggatccatcccataaataaccaccaaacgcagacacgattgcagatgccaataagagcttgctgacaggagcctgatatagctgtctcctaagaggctctgccagtgcctgactaatacagaagtggatgctcacaatcatccattagacagagcacagggtccccaatgaaggagctagagaaagtatccaaggagctgaaggggtttgcagccctataggaggaacaacaatatgaactaaccagtaaccccagagctccctgggactaaaccaccaatcaaagaaaacacataatgggactcatggctctagctgcatatgtagcagaggatggcctcgccggtcatcaatgggaggagaggctcttggtcctgtgaaggttctacgcctcagtataggggaattcctgggctaggaagtgggagtgagtgggttggcgatcagaggggcgggggagaggatagggaattttcagaggggaaactaaaaaaggggacaacatttgaaatgtaaataaagaaaatatctacttttttaaaaaagccatcctacataaaatcatcaatagattcaataaaatccctttcaaacatccaacacaatctttcacagattttgaaaggacagttttaatatggcgggcgggggggggggggaggtgtaggggaaggaatagtttaaacagtcctaaataataaaagagctgctggaggatcgccagcattagtttttttgttttggggggttttcaggggggttgtttggttgtttggttggattttttttgtttgtttgtttgtttgttcatttgctatgttgggtttttattttggttttggtttggtttttggttttttggtttggttttgtttggttggtttttgtttgtttggtttgttggtttggtttgatttggtttgctctgctctgctctgctctgctctgctctgctctgctctgctctgctctgctctgctctgctctgctctgctctgctttggtttttttcgagacagggtttctctgtatagtcc

SEQ ID NO: 4008 - DNA, 1200 bp, mus musculus
ttcctctgattctcgttccattcatttatatatgcccagccaattcacaaagcccaaggtttgcactgaccccgtctaccttccccacatcatatgtagaagctgggaaaccctgcaggtcaacacctgcagcatttttcacacatatttactttaactttcatatctctcctcctttgtttggtattcctttcttattagcaacttgagtagtacaatttctagaatttcatttgacagcaaagctttataactccaatttctacatcttgatatgttaagtttttgtagtaaccattatgtgatttccatctaaatgaatgtttacttggtatatttaaagatattcctcagtgttgagtcaaattgtgtaacctttcccaataaagcctgcagttaaaggtgaataaccaaaagatgtcctgaaaaaatagtcctgtgtgaaaaatttatgtaactaccaggttgcagccagggtcaatgccctgtagaactctgggatgtttcctaggagagtgagtagcaggggactgtgatcccattggatgacttagagcctctgtgaccacaacatgggacctcagcacatctaatagagcatgcagcaaacttgtactagctgttgcttcagagagagatgggagaaggtgattaatgagttgttaagtgctgccctgaaatgaatgaagtttttgagttattggttcttaatctgtctgtatgcagtagcatacaataggttggcacacacagttgtgaggagggactctctgatctaagaggtcatggtgtcatttgcctctgtgaggccttgtgagcagcagttgtcagtttgctttacaacctcctttttgattttcttttccaacctgtttgtcaggcagaataatttgttctacatcagtccaagctgattccaggactcagacctcttctggatgttgctatttatgtttaaaagctccttttttatttctcaagtatttatggtaaggtaagctttgggcactttttctagaatctgaggaatctggatgcttcagtggctccttcctgctaacctcacaggattgccttaaatgtctttgtccttctgatctcatacctgatctttaggaaactagccttgttgctggatttcttttaggtggcttcatgactccagaaatttcagttattccttttcaactgcccctgcac

SEQ ID NO: 4009 - DNA, 1000 bp, mus musculus
acctggacagtcccttatacttaaaaaggttgatatcccttcccatcggtgccagcaccaacccaccttgggcacagagtctgctgacacccccaaggtcctcacaggactctccacgggatgttaggacctctggtgagtggaacacaactgctgctccaatccaattgcatgggacctgagacagcattaattagggaagcagaaaacctggcctgaccagggtcacaagtcccttccactaggcaccagcaccagcaccagcaccagcaccagcaccagcaccagcaccagggcaccttgggtgtggagtctgcgaacacccccaaggtccccagaggactctccacgggatcttaggacctctagtgagtagaacacaacttctgccaggaggcaggttcgaacaccagatatctgggcaccttccctgcaagagaagagcttgcctgcagagagtactctgaacactgaaactcaggagagagctagtctcccaggtctgctgatagaggctaacataatcacctaaggaacaagctctaaccagagacaactataacaactaattccagagattaccagatggggaaaggcaaacataagaatcttactaacagaaaccaaccactcaccatcatcagaacgcagcactcccaccccacccagtcctgggcacgccaacacacccgaaaagatagatccggatataaaagcatatctaatgatgatggtagaggacatcaagaaggactttaataactcacttaaagaaatacaggagaacactgctaaacaggtagaagatattaaagaggaagcacaaaaatcccttaaagaattgcaggaaaacacgaccaaacaggtgacggaattgaataaaaccatccaagacctaaaaagggaagtagacacaatgaagaaaacccaaagtgaggcaacactggagatagaaaccctaggaaagaaacctggaaccatagatacgagcatcagcaac

SEQ ID NO: 4010 - DNA, 1000 bp, mus musculus
agggcaccgtacatggtcagcaagcccactgccaactcagctgtagcccagaaccccaattttctgtatcagtggcttttcctagttctgaagtcaagggctcaacaagaagcaccttaagggaaaaagtgttggcttgaagttcgaagttactgtctatcttgatggggaaggcatggaggcaggactgtgaggtggatagtcatggcatgttgctatttaggaagcagaaaatggacatcaagtgatcaacttcctcccacaaggctctactccctaaagtgtccacggccttctaaaacagcgccaccagctggagatcaggtgttcaaacatttgaacctgttgggaacatttcacatccaaaacacaattatcacagaactccagaacaacctcagggtgagatggcttaatcccagctcttgggaggtgaaggcagcaggaccagtattcatgaacatcctaagctacaccaggttaggaactgggctgggctagataagaatctgtctcaaaatctgaaaaagaaaaaccccaggaactgagacttaagttatcgctgagtgggaagcaggtgtgaaggagcgagggggaaagcgtctgatgacacagactggctattcaattcctctccacctcgcactgtcccctgctgttcttagttgcctaactttggaggtgaactccaaaaccacctagtcagaagcagatgaggtaaaggccagaggtcacaagcaggcactgagagctgcttttctgagggctggagcaatgactaggtgattaagagtgcttttccagaggaccggagttccaggtctgtcagcttacaactgcttggaactccaggcctcgtctagcctggagcactcctcttaacgcaaccacctgcactcatgtgcacatgctcacacgcagatgtccataactgaaaataaccacgaagctgcttttgctgaagagcccaaggtgactcaagcaggaccagagcctgcaa

SEQ ID NO: 4011 - DNA, 1200 bp, mus musculus
ttagccttttctttaacttgtggaaaaatttaaacataaatttaaacctcaagtgtattttgttattttattgggtagcttgtgcttctgagactagactgataatgaatggagagtaattaaaataaaccataacattcttattaaaagttcaatggtaatgactcatactataagtcctggagcaatggcaccatccaggaattttttgtgtgggcaactggaagatgaatgaaaggaggaagtgcctgggagaactcatctgcacctagagcactgccaaggtgtgggcagacagcaaggtagtatgcacacatcccatcccctacctcgacttctctaggcaatcaagattgctgtggcaatgcagaactggtacagagtgaccaatgggaccttcactggggagaccagccctggcatgaccaaagagatttagcagtcacctgggtagtgctgggccactcggagacaaggcacatctttggggagtcagatggtagaaagtgatctatgcagtgattgcctgcatctgggagaactaggtgaaaggaaacctggcatcaccaagatggttgtttttgagcaaaccaaggtcaccacagataatgtgaagatggactggaacaaagtcatcctggcctatgaaccatatgggccattggtattggcaagactgccacacctcagcaggcccaggaagtacacgagaagctacagggatggtaggattccaatgcctgatgcagtgactcagaacaaccacatcttttatggaagttctgtgactggagcaacctgcaaagagttagcaagccagcctgatgtggacagcttcctcctgggtggtataccttttaagcctgaattggtagacgtcatccatgacaaacactaagcaccacccatcttccctactcacctgctaagccaggttacccagaggcttagtaaccgctcccatcagtcacatgcttctgaagatgtcatctgccctgtcgtgtgacccaatccacattgtgccttcctgaaccttttataagtccctgtaatggttcctgactccctcccctccatgacagggtgttgataagcccaatttatatcttgatgtcttgcttggagtctggaagtatctctgtaggctttggttcctgccaggttttcagctcacttgaatgctgtgcagatttctttcca

SEQ ID NO: 4012 - DNA, 1000 bp, mus musculus
cagtttccaggtcaatgtggagtacagaggaagttcaaggtcagctttacatagagagagccagtcacaaaaaaagggcttctgatgtagcgcagtggttggatgcttgcttagcctgaacacggtcctgggtttgatccttcacacctcctgtgtgccgagattatgtctagcttgagtttgtgcgggtcttgtgcatgctaccacagtctctgtgaggtcatacgtgcatctgctctgctatgtctggaagacattctttctttgaaaccatccattgcttctgattcttacaatctttctgcctcctcttctatgtagacacgttagcttcgaaatgagggatataatataaacatgtcacgtaggattcagggtctcaaggtctccttttctctgagtgttgatgagctgtgggtttcagtgttgactgacgtctaccacaagaagcctctgtgcaggaggagcatcacactgatctaaagttctgcttccaactccaggttcagattccaagtctcagattgtcgtggtgggtggggcagctccagctaagaattctaaatcacagcacactcgatggaaacaaacaaataaaaaaaattgaagaactatggtttacaagtttggaaagttattttcatgtgtgtgtgtctgtttgtctgtctatagggtacatgcaggctgaggcagatctacctggagctggattaagctgtaggatttggctgctgggaaccgttcatggatcctctgcaagagcagcttgtgcttgcacccatggggccacctctctagctcaggagaagccgttttaatgaccattggcaacattagtctcaggacacacaccatggagagaggtggaaatttggatctgtttggctatgtttctttttttttttttttttttcatttttttttattaggtatttagctcatttacatttccaatgctataccaaaagtcccccttacccacccacccccactcccctac

SEQ ID NO: 4013 - DNA, 1000 bp, mus musculus
atttcaaatgttatcacctttcctggtttctcctcgggaaagcccctattccatccccctccccctgcttctatgagggtgttctcccaccactcccacctccccacactggtattcccctacactggggcatcaagccttctcaggaccaagggcctctcctgagatatttttaacctttaatttttttgtttggtccatatccataaggttgtgagagttggctgctgctattcatataagaatattttaaagtattccaggtcatgaaatatgcccatttatagacactggctgtcttgattaattaacaagactggtactatattgactagtagtctgcctccattctctcatcatttttgtgtttatgcctctgtttgtgtatgtgtttgcatttgtgtgtatgtacatatatgtgtatctgtctgcctgtctgtggatatgtcgtatgtgcacctgtgtatgcaactctatatgtatgtgtatatatgtgtagctctatgtagcctcccccagcctgaagtgggctggtacagacctagtcaccactgaggtggggccacctgcggtgcagctttccaacttggctggtttcttttgactggctccttttgaagtgacaactgctatgagattctgccacttagagtctgaacctgtcttcctgagatgttcctgagatagctgactacctgtggaactggcgacttactgctaacagctctggcagactagtgctaacaacttggcaacaataaggaagcctggcaaccgagtgctgatggaatggctccaggcaccaagagtggactggcagagggatgggccttccccccttataggcacagtctcttaataaacttgagagccttgaacagggaatcattatctctctcgcagtctaagtctttttcagccccagcctgcctcccaggtatacctggttcaagtaggccgcggcatacgacagctgtatatgtgcttgtgtatgtgtatg

SEQ ID NO: 4014 - DNA, 1400 bp, mus musculus
atctagcatttctcaagagtacacccccaaactacctatgtcttttaacagtcattgtaagttgtgtgtaccttgaatatacttgaggcaacagggactccaggtagcttacatatttgctcctgtagcttacatatacacacaacggcatgccatcctactctttctaaaatggcatggttattgagacatttgttagatctcacttccaggaagtaaggacagaggaaactagaaaatttcatcctgtgtgaggtatcctagatccaaaaggacatgcatggtatatattcacttataagagcctataaccagaaatcacatgatacccatgcgaccctctacagattcaagttaatcaaaaaggaaggtccaaaggaggatcgtaaatctcactcagaaggcagaataacatagatgtatgaagtgtatggatggagtgaactgggtaggcaaggggatgggaaggggaatgggaggaggccttcagggttaagtgctgtgagggtcaggagagatggccaaatggccatgtgaatgtaaatctgtaactggtgagtaggaaggtagggacacctccaggacatgaaagagacctgggatagggaaggtacccaagaatcaatgagggtgacattatctgggcctcccagcatttcggatatggaacttaaatggccacctcctgtactcaggcaggaaccacagtggaggtatagggacaccaacccacccacaaaacttttaaccccaaatttatcctatttacaagaaatgcaggcatgcgagatggagccaagatgtagggactaatcaagcaattagtggcccaactagagacccaccccatgaacaagcacctgacactattaataatgctttattatgataatgacaggagtctagcatgggaatcctttaagaagctctacccagcagcgcagacagattcagagacccacggccaaacagtggatcgagattggcaactcatgtagaagagttgtgggaaggactgaggtcccgaaggggattggaactccaaaggaagaccaacagagtcaactatcctggacagttgggactctcagagattgtaccacaatctaaagagcatacatgggccggacataggccccgcagacataagtagcagatgtgcagtttggtcttcatgtgggtcctgaacaactgacgcaggggctatccaaaaagctgttgcctgtaagtgttctgactaggctaacttgtctggcctcagtgggagaggatgtgactatcccctcaagacttgatttttcagagctgggggttactcagaggataaggggaggaggagaggaagagaagagaaggaatatgggaaggggggacctgaaagtgagtagtgattggatgta

SEQ ID NO: 4015 - DNA, 1400 bp, mus musculus
attccaaacatgatgacatgagatttacagacaaatggatgaaactgattgaggtaacccagacctcaatggatatgtattgtctgcactctcttataagtggatattagcctgaaagatctggatataatacaatccacagactcaaagaagctaaataacaaggaaaacccaaggaaggatgttagaatctcactcagaagaagaaatattgtaactgtaggaggtggatggatggatggatggatggagccaggaaattgggtgtggaaggctcaaacacaaggcctaggataaagaatagaaatccatgtggagggacatctcaaggatgtaacagagagttgggatgagaggctgcagggagtctacgagggtgactccagctcagaatcatagaagtgaggatatggatcctgaactggttacttcttgttcccagttaggaatcccactgcaggaataagggcactaccctacccaaaaaaccttggacccaaaatttgtcctaccaacaagaattacagggataaagatgtgcagagaatgaaaaaatgatcaacaagtgactggcataaattgagatgcatcacataggcaagaatcaatccctcacactacttttgatattctgttatgttacagacaatagcctagcataactgccctatgagagacactgtccagcagctgatggaatcagatacagagacccacagccaaacattagatggatttcaagaagtcccatggaagatttggagaaaggttgaggaaggtggaggggataagaactccacaggaactataacagagttagctaacttggacctgtggggaatcccagagtttgaataaccaaccaaagagcacacacaggctggacctagccccccactgcaggaatgtgggaaatgtgcagcttggtctttgtgagggtctcacaaatattggagttgaggttgtctctgattctgttgcctgtctgtggatcctcttcaccttactgggctcccttgtctggtaaaagtggaagaggaagtgccgagacctccagtgacttgaggtgccattttacattggcacccaaggctttatcccttttaagaggagatgaggaggggaataggaagggccttcttaggtagggactgctaagaggaaactactgtaatatggatttaaggtgaataaataaattgaagacaaaaaagaaacaatactttcatttcaaaaataaaataattactatgataagtaatgcataccttacaagcacattcccagtagaattcacgttaccactagcagactcaagggaacctaatgactctgataccacatatacattcatgagcatacattcacatttgacacacatacatattcctacaaacaca

SEQ ID NO: 4016 - DNA, 1200 bp, mus musculus
gcttttccagtgtgttgggcaatccaggacttgctgtggtaggataaatagattttggtgatgccaagcagtcttggtttctgttttttattttcttgtgctcgcatcttgccatcttatctctaatgctacctgcccttgctgtctctgactgtatattgtgcatcctgtgatcttcattgtgtcataactcctcagagtccagctatctctgtgatcctatgattctggactcctgtgatcctgggtatgtcagagctccttggattcaagctctctctgggatcctgaaatcctggtatgaacaagcacctaagatcctgtgatcctgggcaagttagagcacctggaagttgatcttcctctgggtgttgagggactcagtgagaagccagtgcccaaggtttacttggggcaccagctcagagtagaaggaaatcatgtactggccaagctgtggttcctgattccctgggtcttggggggcccagttactcctggatttggggaagatgttttggcttcctcccctgtgaccctgggcatgtaagagcatctgggaattgagcttcctctgggtgttgtgggactgggtgtagagccagcacccaaggtcttggcaatattctttcataacctcagtcttaacaacaggagcagcaagtccctactgaatagaaacagtacccactaaaaatagttgattcacatttctgaggtttcaagactcatcatctgaaggaaggggagtagcaatgtttctttggctatatgaattgttccacttaagctaatgtggtaatgaaaacttctataatgtgaaaatttaaatgaatgtcttgctctgtagttgagagaagtagcaaaacccctcattcttttctttcctttcctttcctttcctttcctttccttttcttttcttttcttttcttttcttttcttttcctttctttctttctttctttctttcttcttttttttgttattccctccatgtttgtggaatatcacagatatcagacaattaagttcattctcagtactctgcagatggtttcatgtattgagagtttataactattcttccattcccaggtgctgcaagtgtttataatgatttagctgaatatctcaatatctcctagttgcagtttgaacactgtcttgacaagaacaacacagttcatttctatgctt

SEQ ID NO: 4017 - DNA, 1000 bp, mus musculus
agtatgtgtgacatacagtttttatttgtacacattaggcatgaatcaagagtaatatacaaggactctccacaagatttaggaccacctgtgagtggaacacaacttctgttccaatccaatcacatgggacctgagacagcattagggaagcagaaaacctggactgaccagggtcacaaatcccttccagtcagcaccagcaccgggtcaccttgtgtgcagagttggcagacacccccaaggtcctctagaggactcaccacactatcttaggaccaccggtgagtggaacacaaattttcttcaaatcaaatcacacgggaactgagacagcactagggaagcagaaaacccagcctgacaagggtccaaatcccttctggtcggtgccagcaccaggtcacctgggctcagaggcggcggaaacccccaattccctagaggacagcttctgaggcagaccccatttcggactccatacatctgggcaccttccctggcagagaagaggtgtctttgccagagcaactgggggagccattttggttctcagatcctctgagactagtctgctctggtgagagtgtggactacagaagctaacagctactgtgacaggctgaagcgaaacagcttctgggacacttctgtttcaggccttcatcttctgccagaaggcaggtccgaacaccagatatctgtgcaccttccctgtaagaggagagcttgtctgcagagagtgctctgaccactgaaactcagagaagacagctagtcttccaggtctgctgatagaggctaacagaatcagaggaacaatctctaaccagagacaactataacaactaactccaaagattaccagatggtgaaaggcaaacataagaatcttactaacagaaaccaagaccactcaccttcatcagaacacagcactcccacctcgcccagtcctggggaccccaacacaagcgaaaagctagacacagatttaaaa

SEQ ID NO: 4018 - DNA, 1000 bp, mus musculus
caacccacccactcctgcttcctggccttggcattcccctatactggggcatataaccttaacaggaccaagggcctcttctcccattgatgaccgactaggccattctctgcgacatatgcaactagagccatgagctttttcattgtgtcctggatttcttaaatgttttgagttatgaacttttccctttttgtaatttccttgactcttatgttgatgccttctatggtattttctacacctaagattctctcttctatctcttttattcttttgaatctttgcatccttgcatctgttactctctttcctacatttttccatctccagggccatctcctttcatgttttctttaatgtttctatttcaatttttatatcctgggatgttttgttcaactccttcccctatttgattgtgttctcctgtatttctttaagggagctatttatgtccttttaaaaagtcctctatcatctttataacatgagaatttagatctgaatctttccttataggtgtgttggggtatccagaacttgctatggtgggagaactgggttctgtggttgccaagttgtattggtttctgttgcttatgttcttgcacttacctctcaccatctggttatctctggagttaactggcctctctgtctttgactggagcctgtccttcctgtgagcctgtgatgcctggtcctggatgtgtcagaacccctatgaaggcgagctgcaattgggttgtgtgctgtgtgtgttttgattcagagcagagtctctgctcgaagcacaggtgcaaaccagaaggcacaagggactttgactgggccaggtatctgggccctggggtcccaggagacccagtacaccagatattgggatggggtttgaggtataacctgtgatccaggatgtgtctgaatacctgggaagtcaagctacatctggggtgtgagccatgtatgtttggatccagagcagaggtctgctcca

SEQ ID NO: 4019 - DNA, 1400 bp, mus musculus
ttaataggaaaaaaggacaaaattttacatgatccccaaaagtaatacagaataaaataaccaaaaatcaatatccaatgtccttcttgacaaaaacactccatataccaggcagcaaagggaatcaccacaacataattaaaaccctagacagaccactgcaaccaatggcaaaaagaatgaaaagaatcttcctttcagagctagactacaggcccatgagctagcactcagagtgacaggcaggaagatgtcaagtgtgaatctagactgagaaacatagtgaaaccctattttaaaaataaataaattaaattaattaattagaacttccagagcagcaataagcaaaggagaaaatgatgacagctccaggcactttattctatatggtgctgagaagcttggcaggagggctgcaaagcagcattccagccaggaaagcagggagcagcattgagagtcttcctctctctccctcttcttgtctaattcaatcccccattctcctcctcagctcctaggctgaccaccatcccagcctttcctccctttcattcccccacctccaggagaccacacagatcttcctttccaaacactcgtttctcctcgaggaaatctggccgaagccacttatcatttttccccagccccaactccagcaggcactccatgggaacttactcgacactctggccaagcaaataggtaagttaactgcaaaccctcctattttccctcctttcctctgaatccaatctcctgctctcgccccacagctgtgtagcaggccactgctgtggcttcctcctcctctcagcccccatctgcagtgaagaataactgatcttctcttctaaccttccttgccacacatctttgttatcccagcttccagctctagcataaaatccctgggcacctgccagctaaatgtgccacagaagcagagaggccagcccaaggccctaatgtcacccttagatctatgacagactagctgttgtgacctctcctcactttctggttccattcccaggggtctaagcagatcctgggagaacatactgttctcttcttacctgaggaaaccctcaccactgccaaagcccatcccttttcctcactgtcaacccccaatactcagaaacacatttgacccaaaacatccaatgacctcacctaacaggatcccaaaatatctccccaatagactttgtgcttacaatgcccccactacctcctaagaatcagagaagtcaacagaaagagaggaacaaaacagcctcccaaaacaggcacaaccagatatcaacatctagaattacaatctttccaagtcaagatgccaaaacaaaagtatatacacaatacaagtaggacagaatgtctctact

SEQ ID NO: 4020 - DNA, 1000 bp, mus musculus
gcgcctccctatcttctgcccttctgacatgggttaaatgttaaccagatgctctgctgttacctcgatctgcacgtatagtttgctgatgtttaaacggtccaattgtgtgaagccacgccaattcttcccctacccccactcttttcctatataaacccctaacttttgagcctcgtggtcaatatctctgtctctagcgtgagatacatgtcagcctggagctccgtcattaaactaccttgtgtgtttgcatcaagatggtctctcgtgattctctggtgtgtgttatctcatgactcgggtgggggtatccccacggaggtctttcaagatcaagtcaggatccagggactggattcaattcttaaaggtctgcttctagtgacctattttggccacctatatctggtctaccttgtaaagatttggcaaacctcaaaatagcaccccaactgggggaacaagtactgaaaatactaggttgggtggaacattttggattcataactggaccctagcactttccctccctgtctgcttcctgactgccatgggctgagtccctttcctatcataagctcttccatgatgggctgcattgtcacaggagaaacaggcccctgatgtgtactgaaatctccaaaactgtgagccaaattcaaccttcacacttcttaccccacttcttttcttcagtgttgaaacatagctgaaacccaggtttcgctgtcctgactagtatcatattttgacccatgagcaaatcaagtgttggtcccccttcagcaatgtggcatattggctctttgtctatgcttctcaggtctcttatctggctcccccagacttcccgtaacaccttgaatgtgtagtcaatgacaagatcccccatgttctcactctcagctttcccagtgcacactgcttcacacgagcctggatcttcacttatacgactatatgtgttttctccacgatgattcataaattaactggt

SEQ ID NO: 4021 - DNA, 1200 bp, mus musculus
ccccccatcccataatatcccacttcccggttactcctccaccaaccccgatcccacatctgccctccccccttcctcttgcctgtatgagagtgctcccccactaacccacactctcctgccccatggctccagcatttccctactctggggcatcaaatatccccgggaccaaggacctcccttcccattgctgtcaggcaaggccatcctctgctacatatgtatctggagctatggatctctccaggtataatccttggttggtggtctagacttcgggagaaacaggtagtcaggccagtttatgttgttcttctaatggggttgcaatcccgctctgctactccagtccttctgctagcacccccaccatttcctgagttcagtctgatggttggctctaagcattcttatttgtattggtcagttgctggcctgacctccccaggaactgccacacttggtttctgttcacaaccgagcgccccttgaccacagcaacagtgttgggtttggtgtctgtagacctgatgtatctccaagtgagccattctcagttgggccttcctccagtatctgttccatttttgtccctgttcttcctttggacaggaacatttctgggttaaacaaactttgaggctgggcggtggtggcacactgctttaatcccagcacttgggaggcagaggcaggtagatttctgagtttgaggccagcttggtctataaagtgagttccaggacagccagggctatagagagaaaccctgccaaacaaacaaacaaacaaacaaacaaacaaacccaaaaactttgagatgggtgggtggccccatcccttgaccaggggcagactgtctactggaggcagtctccacaggttctatctcccccttctctgcacgttttggctaaagtcaatcccgttgggttctgggagcctcatgtttctctggtgtctggaaccctccagtggctatccccagttcctcatcctccttgttacttattgttatttgatttcctgactttgtgcacccatctcacatctcctccagtttctgacactgccatccttatttcttcctcctcctctctccctgtcttgtgtccccctccttccacctctcacaatcattcttttcccccctcaatggaggactgaagcatccacccctttgtcttccttcttcct

SEQ ID NO: 4022 - DNA, 1600 bp, mus musculus
tactgatgagaaaaacatttgatcacctcagttaagcatggccttatttaaccttaattaataggggggggggagaggttggagaccatacctttagaagtgcaagcccttcacagcctcccaccctaaaaagccaattggccttgtactacggtgccagttgtcaccccctcctccctattccctgcctgtcatccaagaatgctgaggaacatccacatactcttcttcagtgttattcataataaagtgcctttcaaatttgtacactcagtcttcgacagggttccaacaccctaaaaagacagtgtagctgactacttggtattcagtaaaaatttcaacaaggaagttacctattcagtactaattagcattataaaagtcagagccaacagctcagggctagtctgctagttgtttagtaggacagaaaggacaatcttatctagatatgatttaccataagaaaagttaagaaatcccatggagacaggtttcttcattaagctctaagaattcaggcagaactaaaagacaaataaattttatgcctgagcctagccttttcttttttatattaacaacaggaaggagatataacctcccctccccagcctgaaacctgtttgctcaggtttcagtgttagagaacatgggggggggggcagagcttgctgcgctattgtcctgccactcccactgcctgcctcttagctgttccggagccatcatgtgttcacctgcaaccttactccaagatgatttggtgagaatcctcctgggaattctcaactcaaagatatggcttctggtttctatctgcacacctgaactaaccttgtgccaaggctctctgcaacacaattctgcccagagtataaacttatgcccaaggagtgctgacaaacctaatctcagggtcacaggctcacaggacttaaaaactccagtcagagacagcaagatcacctaacaccagagacaaccagattgtaagaggaaagcctaaaaacataaacaacagaatccaaggctacgtggcatcattagaacccaattctcccaccacaggaaaccctggatactcaaacacacctgaaaaacaagattttgatttaaaaatcacatctgatgattatgatagtggactttaagaagtacataattcccataaagagatacaggagaacacaagaaaacaggaagcagcccttaaagtagaaacacacaaatccatttaaaaaaataccagaaaatatacacaaacaggtgaaggaattggagaaaaccatccagaatctaaaagtgaaaataaaaccattaaagagatcagaaaataagacaacactgtatatagaaaaccatggaaagagaacaggagtcataaatgaaagcatcaccaacagaatacaagagatagaagagagaatctcaggtgtagaaggtaccatataagacattgacacaacagttaaacaaaatgtaaaatgcaaaaagctcctatcccaaaacatccaggaaatccaggatataatgaaaagaccaaacctaagaataaatgaaatagagaagaacgaagattcccagctcaaaggac

SEQ ID NO: 4023 - DNA, 1000 bp, mus musculus
aaatgttgctctaagtaacctaaaggcttgctaccattatgcttagcatcaagggaccagggctagataatgtgggaagtgggacatagtcaggtgtagtgatgcaggccagatgtcccagcatgagtcaggaggatcaggagctcaagatcaacatcagctagagttctaggccagcttgagctttccttccttaacagaggcaggatggtctgctgtgcacttgtctctcagaggctctgcttagataccctttaggtgaaggcagcacagcaggtggccccgccgacccatatccttggactccttggcagttgcaagcaaggagcagtgcctactgaactgtccaccctgagagagctaggactagaaggacacgctctgtttttgtttctgggcaggcctgacaaggagcagagcgagctccagcaaggcacagcgggccaggggcgggacttcgagcttagcacttgaagggtggcatccagccgggcgcatgcgcgttccatggagcttgtgcgacctggagctatggcgaccgcaacagttcgcccggcggcccagcggttgcggctgctcctctcgcccctgaaatcccggatctgcgtaccccaggccgaacccgtagccaccttcgggtaatggcgtgctcggggcagcgagggccactggccggggagggatacggacgcctggcgttgtcggcccttccttgctcaaaccccacgtccagatcccgcagaactggtgtgcgagcactttgatgcctggggttaggttctacgtgctgggtggtggtccagcctcctcagtgcacagggaaggaactggggaggaaggaaggggtggggggcttgctggcctcttagccatttgctgggaacagtaattattcctgccaaatcagaaatctgcctaacctgcttcagtggcaggcagggcccaagtttcctgagtccttttgcttgctaattttaaacttaagtgtgcaagacaatct

SEQ ID NO: 4024 - DNA, 1600 bp, mus musculus
ggatgttgattttgattttttttaaaaaaaacatttgattcaagacaaaatactgggctagcaccagaattttttctgcctttattgaatatcatgtgatgtctctcagtctctcctagcattgtggaataaataaataaataagcagcacaagtttgggggcttgttggtttgtgacaggttaactcatggaatggccagagaagccaagtaatcttatctgattcttaagtattaagcaaagaactgatttgggtatgcctgtaactttaattttttcaaaccttatttttaatgatggtcctcaaatgctttaacctcgcttctagtctaccactccccagaggtagtggaaaagaaaggatacaaggggaagtagacctgttcagaaatggttctttggagcaaatctcatttgtgtcaggaaatcagcaggtcagtttacaggagttagtagcagcagctccgtctactcttagacacttcctgatataccagcagtccagcttggcagaggcaggatagcacacaggaatcagcagcagtggcactacctagcagagattgccaggccaagcatcagtatgagtcagcaggagggaccaaggccaacaggaatgtcggggaagttctcagctatgcctctctcatcaaagcacagatcagtccaataagcattgcacagctagctctataagcaagccaaactcagcctctaccactgtccatcgagtcctttacattatgttatattatattttatttattaatcactttatttgtttatttatttcaaatgttatcccccttcccagtctaccctccacaaacactccacccctctccctcccctttgcctctaagagggtgctcccccaaacccagtcctgcctcacccctctcacatcccccttccctggggcatcaagcctccacaggactaagcacctcccttcccactgatgctagatgaggcaatcctctgctatgtatgtagcaggagccatggaccggcccaggtatactctttggttggtagcatagtccctgggatctctgaggggtccaattaattgatactgttgttcttcctatggggttgcaatcccttcagctcctttagcccttcccctaatttttcctagactcagtccaatggttggctgtgagtatttgcatctgtcttagtcaggtgctggcagagcctctcagaggacaattatgtcttttttatactccctccaaacatcacatgtcctccacaggccttgcctcagcatgtgagtctatctcagctgacttcactctgccaataagcccaaatccacagaagtgacaagaaactgcagcacaccaccagaagttttttggtgtgctttctctctgtagagtctcaactacacaatgtaaatggatcaatacatgcatatgattagcaaagaatcctttttttacctgccctttcatgtgcttgttttagcagaacatcctttctcctgtgtctgcttcagcaaaaacattccttaatgagtctgccttagtctttcacctgtctgcttcagtgaaatatgcttcacgtgtttgccttagcaaaacacca

SEQ ID NO: 4025 - DNA, 1400 bp, mus musculus
cttttgaagataccagttagaaaactggaagcatggtcagaataatgagatttccatctaattcattcagacaatccataatagaatttattgactgttcattataactttactgtattgtgctatccaagacgcaatttaatcctatgttttaattatatgttaatagtctacaatttttaaaaagttaggcttactctgaaaaattaacagaaatagaatttaaaagaattaagtccaaagtttcttttgttccttcctgttgactcaagttttatcccatatttccaggtatgggagaacacatgcttttaattccagcaatcgggaggcagaagctaggtgattgtttgtgagttcaaggctagcctgctctacaaagcaagttccaggccagctaggttacataatgaaaccctgtcttaaacaaacaaacacatattactaatagcttcattgaactacctctaactagattcctcctaaaatagtaccagtgacaaacaaaacaaaacaaaacaaaacaaaacaaaaaacaaaaaaacccttgtatttctaaatacaacttttgagtttgttttatttgtcaatgactttgaattcatcacaggactggttatgtaacctgatagcagtgggactatctatctacatctgttgggaatcaaacccagcatttcgcatatgcagcacaaacacaaatgctcatcctgcattccatacctgcatccccagccagcctggcaccatcttggaatgcttccactgttgtgctctgctttgaggggctggcccagccatccaaatgccttgctagttggcttattaagcaagaactactcttgaccattctcttctgtttgctcaaagtaaggtacatctttctgttgccatggtgatttagcacagttaaattactgtcaacttggtgttgtaaacagtttctatacgaagatttaaggattaccaacaatgcaattaactttgaattaattaggactcacagtcctgcttctgctagcttctgttccttttgcccagaaaatgtctgtcttctttttatttctcttttagtccgtgtgaaagaataattatgtaaacatcaaagcttggatctgcaggacagttaacaaatgttttgacagagaacaaaatggcacattggaatatggaaagctgtgcaaagattaattgcattttagtcatatttaattttttcttgccattttgggtggcattttccaatgtaaagctccatggtgtgttgttaatgagtcaatttacaaacctttattagttttctggatattttacagctctataaatccagttttcacaaacaagaaaaagacactttgtggttgtatatgtagataaaaataaataaagagaaaattcct

SEQ ID NO: 4026 - DNA, 1000 bp, mus musculus
caaagcagagagaggctcctatgaccgcatcacagagtgaactgccattaagacatccaaggttttatccaaagctgtttgctggtattagacagaaggcagtgtcgagcagcccttctggaaatgttgcatggccagtgctctagacgtgggtgggaaggtacagattcctaccgctaatctgagaagtgatgtggagggggggactgaggttacagttagagcttaaccagtttatttcacacatttgttacagaggcacaagatttacgtgatagaaatactttagaacatggaataaatgcaaaataaaacatgtttctgtgataccaggcacatgccatagcttaatgggcgatgctttcttcgtagacacacatggtgcatcctaatagatggttatttagattaagtaaaagtgataatatgtaaatttacttttcaagatagcagttatttattggagaatttaagtataaatcttacagtgttaacagttattttttatgaaatacttttaggttaaacctattggggaaaagttttagcgttgtagttaggaatctaagagctgtcttctcctttatggagaatgttatcagtccctcctttatatgaggacttatgttctgggcttctgttgtggagaaagtacttcacgaacagcaattcatcgacaagacctcaagagtactagggcttgagaaagtactggttgaaaatacctgcttggctgtgtaaaatgcctcttgccaggagtccatgtttgttctacccgaactttggactgttaactagagaagtgatagactgatgaaccttctagtgttgtctgctccatacgggaaatgagcttcaaggccaagctccttcctcatccttgttctttacagccctgtttaacctcagttgttacctcatccttcgctctggcagaggctggttgttaatcgtctactggcactgcccaaggtgagttcctgaagatgtagacagcgca

SEQ ID NO: 4027 - DNA, 1000 bp, mus musculus
taaacaatgaaacccatgtgacctttcctctgtgcctcctgtggaagtccagctgtcctctcatttgtcacactgagagatggcaatggactatttaaatgctgtagttaattttaagctttttcaattgtgtgtgtgtgtgtgtgtgtgtgtgctcatgcaccttcttgttataaattttaattctctcctgccttggaggacccatggactatgcagaacagtgacgagtcaccgtgtttgaatggtgccactgtctagattgtcgggcatggcaggggccatgtgtccagtgtggtgctagggacagtgctgagaaacactgcctggccttgtcccttcaggactttgggtccggtgtgtgtctttgcagtaaagtgaaatgaccactgtgtaaaagagaccccaggtctcaggcccgtggggatgaacacctgagcactggtctcagctttgtctcagagagctctagcacagtgactgcaggtccccacacatcagtcacatcaatagttgatgtctgaaactgttgacccacttcgttgttttcagccttggtttcccacttccaccacctacactcagtgtttcacatcctctctgactctcaatggttggagggggtcatcactggaaaatatgccagctgggttttgttaaagtaaatgaacatagttcttaatggactttggaatgttgattgacattctgactaaattaaaagaatatcttacaatatttataatagtattatgacggctagcattgttaacttgatggagtttagagtctccatggaaacaaacatgggcacttgtatatgggatttgctagatgaggttaattgaggcagccctacccacaataaatgtgggtggcatcagcctgtggtctgggcttgaggactgaggaaggagaaagggagctgggcgccagcgtttgtctgtgccacctcccactcctcctgccaggcttcctgccatgctctcatcttgacaca

SEQ ID NO: 4028 - DNA, 1200 bp, mus musculus
tgaaaggtattgcaggttttgaagggggctctctgggaggagttggggtacaaaagggaaagatgaatgtgaagtaagactatttactcaaaatatgctactaaatgttaacaaattcagatataaaataaaagagtttataaatcctactctcataatgttaaatactacaaatcaaccatgtttccttataaagttgctagttccttcatttcaagaaatgttgattttcgtatcagcattctttgtctatgtgtttggaagcttcaaagaaaggcacaagtctgaactgaagggagccctcaggcttatacccaggccttcctgcatgaagacaccgcactgctgaagagccgttcagtctgggagactgcctgacaaactgccccaggacaacagtagcaggtgtccacagtcttcccatgtgcactctacacagacttcttacatacactgcacacagtcttcccatgtgcactgtacacagacttctcacatacactgcacacagacttctcatgtgcactgcacacagacttctcatgtacactgcacacagtcttcccatgtgtactgtacacagacttctcatgtgcactgcacacagacttcccatgtgcactgtacacagacttctcatgtgcactgcacacagacttctcatgtacactgcacacagtcttcccatgtgtactgtacacagacttctcatgtacactgcacacagacttctcatgtacactgcacacagacttctcacgtacactacacacagacttctcacgtacactgcacacagtcttcccatgtgtattgtacacagacttctcatgtacactgcacacaaacttctcatgtgcactgcacacagacttctcatgtacactgcacacagacttctcacgtacactgcacacagtcttcccatgtgcactgcacacagacttctcatgtgcactgcacacagacttctcatgtgcactatccagataacttacatgtgtcctgcaaagattttcaattggaaaatcaggctcaggacctgtcctcctgtataaaatacaatgcagtaatcctgggttacagtaatattactcttagtttatctgtgccagatttctaaaagtatcatacgtgaattctgtcaataattttttatttgaaagtgacaagcttcatatgaccagtgcaggtgagccg

SEQ ID NO: 4029 - DNA, 1400 bp, mus musculus
tctattcgtcaacaagtagagtcactgaagaaattaggaagaaaaaagtcaaaagacacagaagttgtataataaatggaaacgttttagaagaatgtaatatataacttggtatcaattttatgattttaaaggaaataggttactagaaaagggtacctaaacgaaatggagctgagaatactaaagtagtctgcaaatttcaaatgaactaagtcaatatgtaaaatcagtatgatcttgtagtttaggtgtaaaatgagctcagaggttcacaagcaaaagcgcaggtccctggctggtggtgcttccggccattcggatgcttacatcatcactgaatgacctagctcattggtgagttctgagctgaaggagctgttaggagatggggcctggtgagaggaaatatgtggctttaggcacaccttggaagctcacatcctgctcctggtcccttcctcctcaccacgaggtaagccactctgttctcctacatcatccctcccaggtgttgtgccttacacgggcccagaagccatgaagccaggtgaccacagacatgatgagccagatagccttccctcaagttgtttctcaagaacgttttgtgaataacgaacccttaccaacacaaaacaatacctctcacacagaaaagcagcccttgccaaaccttcaagaaatagaaacaatgtcattttaaccagttccctccagaggaggacaaagacataatgacatatcccaccttgctcctttagataaaaggagaaaatatacatggtcactccagcaaactcagaaaaaaataggttacaaaatttagcataccgggactggagaaatggctcagggattaagagaaactactcttgctgaggacccaggttcccttcctagcacccacatcaggcaactcacaacctcctcttactccgttctagggactttattgccctctgacccctgtgggcgcctgcatatgcatggtacatatgaactgttgttggcatacaggcacaaaggtataagataaattctttcataaaaattaggtgctggggagatggctcagtggttaagtgcacatactgttcttgcgaagggcctaagttcagttcccagcaccaatattggaaactcacaagcacctgtgactttagctccatagattcaataccttcttctggcctctgtgagcacctacaggcccaggcacatacctacacagacacacacacacacacatacacatacacgcacacaattatgaatcatctataggcccaggaacgtacctacagatacacagacacacacacataattatgaatcacctacaggcccaggcacatacctacacagacacacacacacataattatgaatcacctaca

SEQ ID NO: 4030 - DNA, 1400 bp, mus musculus; identical to SEQ ID NO: 4029

SEQ ID NO: 4031 - DNA, 1000 bp, mus musculus
ggtcgtgagaacgcgtctaataacagaatgactccatttaagttggatcataggaagcctggtcatgtataataaccatgaaatacggaaacgatgtgaaaaatgagtcccagggaaagatgagtgccaccccttgtgtagggtgacccaaaggtgacctgtgtggcagcagatgagctgccattggctccttggctctctgctgagccttgtgactcactgttatgtaactttttttggaagctacgaggcaattctgtgccttctgtgggtggccatatggcctgggttttcatctcatctcagttgggggggggggggcgatttcctccctgaatcagtagagctggcttctcatccccagaggtgagcaggccaatgtcctctggcatttaggaacagtaaagacactcctgagagccctactacagcagatgacagcatttaccagcctcaagcatgacacaggagtccaacacctctgtgactacagccattatcaggtgtctgacctgggtgaggctgcaaccaatgaccaactcctgatctgctcagatcttctttggcaaaagcacgttgttcctccgtccagtggagcccatgcttaatgaggatctaacagagacaatgctaacatatctccaacacctattgtgctgataaatctatgcccagaagctatacagaaccccactgagctgccaagtcaggcagtcggtgggagcggctatacccacatatatgtgttcttggcagtgtgcttaaagaaatccaaaaataccctgagggcacaacacatgtgggttggtgcacacatatgtgtgcacatacatgcatgcatatacatacaaagcacacacacacacagttctagcaagcaacatttccactaagccctgtgaatttgctctaggaattcatctccctcacagagagggaaggtcgcattctggtacagagcagaactgtagtgtgtttatataaagaattaaaaaagcag

SEQ ID NO: 4032 - DNA, 1000 bp, mus musculus
acacacacacactccctccctccagctactggaggccagttggatgcctgcctttttcacccctctcagcagctgccaggctacagagcctgttttgtgaaagatcaagaaacaatgagggaaaacagcttcagcttgattagattagatcaatttatgtgcctggggaggggcctaggcagggctgggggaggggtgtcctgtgctggcagtggcccatgcctgcccattcggtcacttcataagtaatgaagctcccgtggtggctggaattgcaggaagggggagggaggaggtggaggaggagcatgtgaagagagatttctgcagtctgtctggagagctgcccagggttcccagccaaaaaaacaaacaaaaataaataaaagccaagtgctgaatgacacagattatgatattaaaaagggatactattgaaacattgccctgtttcctactgttgttggaaatgggtgtgtgcagaagcgaggggcggttagtgcactgtacaacaggccattccttggacacaaaagtccgtacaattaaattgtgaatgcccctcgccaacgtcccctcccccacctcatgccagaaattctgtaattttgatttgtctgcattgcaggtcatggaaatagcaggatggaaagctagtttcttttgccttttctcattttaattcatcaaaatggtaaaaagcggggagggggaaagtcagccagatgccccctccttttcagtgttcaattctcttccaggcacataaataatcttctctcccgactgtctcccctcccccttggcccccgctggtgttcggctgtcctattgccgcgcggaatctgcactgccgcttgcttattacgtacaggggaggattgttgacaagtgctccggagcctgcctcactgcgctctcccttcctccctcccttcctctgtccttcttcctctgtctctgcaatgatccggctctgaggatggctgctccacgggtc

SEQ ID NO: 4033 - DNA, 1000 bp, mus musculus
cctttctctttacaaagaataaacaggctgagaaagaaattagggaaacaacacccttctcaatagtcacaaatagtataaaatatcttggcgtgactctaactaaggaggtgaaagatcagtatgataaaaacttcaaatctatatcaaccaacaccttttctggggtctgatgagcgtcgacatcgggcgccttaacccggcgttcggttcatcccgcagcgccagttctgcttaccaaaagtggcccactggcactcgcattccacgcccggctccacgccagcgagccaggcttcttacccatttaaagtttgagaacaggttgagatcgtttcggccccaagacctctaatcattcgctttaccggataaaactgcgtacgtcgggaaagagcgagagcgccagctatcctgagggaaacttcggagggaaccagctactagatggttcgattagtcttttgcccctatacccaggtcggacgaccgatttgcacgtcaggaccgctacggacctccaccagagtttcctctggcttcgccctgcccaggcatagttcaccatctttcgggtcctaacgcgtacgctccacctccccggcgcggcggcggctttcggacgagcccctgactcgcgcatgcgttagactcccaaaggtccatttaggtgccagtctttgctttatgttttgagacagtatctacacacacacacacacacacacacacacacacacacacacacacacacacacatctcccaaaggtccatttaggtgccagtctttgctttatgttttgagacagtatcttatagaacttggatcttattgattgagttaggctggctgactgtcagcccctaggattcttatgtctctgccttctggagtgctgggattccaggttggagtcctggttctcagtccaactatttacatggatttgttggctcagcctcagggaagacctcatcatgcttgtgcagcaaactctg

SEQ ID NO: 4034 - DNA, 1200 bp, mus musculus
ttgggttttgtgtgcttgtttaccaggactgaaaagccttgaacccaatctgagcacctttcaaggaatgatagaaagtagagcaggaagacggggccattctgcaagatgtacaagtactggaggttcatactgactccccgcaagcacaaagccatggaggttacagaacatcagagaggtggggactagtcctccgccccaagagtcttcagccagactcctcacttagacaaggaaattgtgtcccacccaggaaaagtgccttggccaaagttgcacattggcatggctgactctaaaggtttctgacatcttaccagtgagcagccaaaactctaagaagaagaatgagagtgtgaactgcaggggaagctaaaggcggctctggtgatgccaagcgatgcgagagagtcaaatactctgattgaaactgaagtcatatgtgcttctatgtaaaaccagctcttatgggtctcccggggtggggggaatccatcacctggaattacttgaaggcttgtcaagtgctttacggctctacaaggagaggtgtgatactgagagacagggaaagggggctaacctttccccacagattgagttctgagttcctttcggatgtcttgtgggtgagggagttgagggggggcggctgcttccggaagggaggccctgtgcacactcattagcatacactctccacagttgattcagatgagatttcatcacagaaacctacttatgcattccttaatataaatctaaattgctctcttcaaatagcagagagcgctaagcttcagcaagggaaggagaagcggtggcattaggagtcaggctgcagtttcatcctgccttccaccctgtcgtcatcctgtcttgacagccttaacttacacacttcactgagctcaccccgggactcaggggaaaaaggctttctccaaggcagacaccaagttgtactcaatgctctggagcagtagggggcagtcattggtaagtgctaggagggccctggtgtattgccagaagagagagacacttcaggaccactcagttggcaaatgaccccatgctctgcaaacatgaggacctgagttcacccaagaacacatgtttctaggtgtggtggcatgtgcttgtaacaccagcattggggaggccaggcaggagattccctggggctcactgggc

SEQ ID NO: 4035 - DNA, 1000 bp, mus musculus
tgagagtatgctctatgtagtctctgtgtaaaggatcttgcctatttgaatatacttaagaaccaacaatgctgaacatttacttcaaggtaattgatatgcgtttttatccttaacatttatcatcctatggctattttcatttcgcacccaggaaagctgcatcataaagatgatgcatcacaagttcaaggtcacagagtgagagagcggcaacagcagactatgattcaggtagacagatgcaagtgggcgttgcaattatcattactctgtatcccttccaatgactactttatcagcgatttatactggctccatagtgattcttcttacagcaccactaactacaagcctgactccaaaaaggatgacaattaaaagaagattgctcaagggctaatgtaacagattgtaagcagagatgccttgggctccatttagggatagatttcagaggctccggagtgtcagttctcaacagggcaccgtttccattcaccgagacctggttacgggaaacagcaagttgtacatttcactgttgcgatgccttccaagggggctcaggacgtaaaggaattatatctataatgtgcctcggacagtcatagcgatcgtgggaattacttctgaaaagcttctgtaggagatgtggtggttaaccttcactgggaacgtgactggatttagaatctcccaggagacgccattctggcatgcctgaaagggtgtttgcacagaggctgaactgaggaagacccaccctgaatgggagtggcatcatcccaggggtcccagactgagacaaggaaggcaacaggcagagtaacagaatccattgctctctgtttagtgtctgtgagtgccacatgaccctcaaggggaccctcatcagagcttcagtgtccttccccgcattgatgaactgaagcttcaagccatgaatttgcccttctttaattgtgagagaagcaataaattcaagggcatagcttaa

SEQ ID NO: 4036 - DNA, 1000 bp, mus musculus
gaccttgtctcagaaaaggagaacaggggaggaagaggagctgagagcagtgaagacgggtgctcgttcagaccctgtgtttgtgtcgaccctgttcatagcagcagccaagacatggaagctgccgtgtaggtgcatggggaacgtaatccatcttaaaatgtgtgtgggcggccttatttggtttcttcctgaaccttggagatgcctgttgagaatagctgttgtccatatagctgccatataggtgccctactctgggtctgtagttgcttccctaagggaggtttgatgccattgggactttccccatggcaacagtgagtcagtggggcattagggggttttggacagatgttgcaaacataactcttgactgtgtgcacacatgcacaccactcccatacttacatactttgtcttgttcttgtcatgttttatataaaacgtgggcttagcctatagcagtgcttctgtgacttcctgcacctgtgggggcagtttttgaatgaaccacaaagatccttagaagtgatccgtggaaaccggtggcgtgccacgctctgtagtggaagtttaagtttccgtacgcttttctttcctgaggcagtttgtcagtgtcaaagaggtttgatgcctatgcatttgctctaggcttccagggatggtgccctccagcgaggttttaccgaggggacacagatacatgcatcttcttagtaatagttttaaggcaacttaattgttcatcagttgacttgttagaagtggtttgtgatatcttgatttaaaaaaatcagtggtggcatatgaaagtgtcaggggccagggatctggctaagtggagagcgagagagatattcatgttctactgcacaggatgatggtcacagtgttacatgtgcacgtgctgtaagagcccctagagggtccgctttgcttgttagaagatgaagagaagctagtgtgtgtgtgtgtgtgtgtgtgtgtgtgtgtgtgt

SEQ ID NO: 4037 - DNA, 1000 bp, mus musculus
ttaattttaaataatctgtccttatcaagtgttgtcagcaaaatccccaagcaacttgcaggcaagggaagggaggaggtgacgatgcagctagagctggaggccagcccccctgaagaggtgaccctcaccgatcattacatgatcctcaggaccctgggcaaaggcagttttgctgaggtgaagctggcctgccacctccacacaggggtttgggttgctgtcaaggtcctggaaaggggcgagaagaacgactctgttatcatgactgaaatcgacattattaagtccctggaccacccaaatatcatcaagctgttccatatcattgaaaccagagagcacacctacatggtgatggagcacgctgctgggggagacctggtgagccacatcgagaaggtgggctgtctgcaggaggaagagacccaccgcatcttcacacagatggtgtgtgccgtcaactactgccacgagaacagcatcgcacacagggacatcaaaccggacaacatcctgctggatggcagagggagtgtcaagctgtgtgactttggcctggccatcaaagtcacatccgggcagaggttcaaggggttctgcggcaccctggagtattgtgctccggagattttcactgacgtggaatacgacgcgcaggcaaacgacatctggagcttgggggtggttttgtacacgatggtgacagggcgcttcccttttgaggcaaagacctattcccagatgaaggagaagatgctgaaccccaagtactccatcccacccatgctctcgccacacattgcaaacctcatcgtgcagttgttcaccgtggacccagaccagaggcccaagatctgtgacattatgcagcaccggtggctcaggggtggtgaagacctttccaaactggcatcttctttggaggcatgccctagcaacccagcccccagcattgtagtggctatgtgggctatgggttacagtgccaaggacatcc

SEQ ID NO: 4038 - DNA, 1600 bp, mus musculus
ccccaatgaccatttatgcaaacttattcaagaaaatacttgcaaactgaatccaagaaaacatcaaagaaagcatccaccatgatcaagtaggcttcgtcccaaggatacaggttaaatatatgaaaatccttcaatacattgtaatccactaaataaacaaactgaaaggaaaaaaaaaacatgattatctcactagatgtctaaaaagcatctgacaaacaaatatcccttcctgataaacgtcttggagagagcaggagagaggcccagagggccaggagaatgaatggaaaaagcagtggtctcagttggagagggtgggcctaatcctgcagagactacaggggtgaggggatactgggacatgggggagagtgctgctgcctcaaaggctaaagggaggggatgggggaggaactctgtaagggatgatgggggcagtatttgggataaataactgaaaataaaaaagtctttagtgtacctgggtagatctataggctgatctataggctattccaagacagaattatacagagaaaccctgtttggggccaggagggaggcgacagttgttgtataaacacaatggcaagtaagctgcagtttaaaaagtcaaatcactctacctcagtcttcttcctcttccatcagcctggcctggtgcagcttccctgaccgtcctagggccttaaataccccactcaagggccgcccgcgcaggttcctgcagcctggacaatggccctggggcagcagagtctgagcattgctgagcttctctgtcagcagcagcaactaaacggggagcaagaagaaactgccactccaacgtctgtgaccatcggactcaacaaccaacttctgcacaggagatcaactgcttgaagacctagaaccctttcacctgaggatccaacttcacagtctgtccatgcccctacagaaccaccttcacagtcctgccctctgctctgagcccctccctaaataagaaagctccgcccacttgcccagttcttaagctctgggatcctgtgaaggggtggggatcactagccagggcagtggctctgtgaagggtctgcctcccagggactacgcctcctactggaggcagactagcaatgtacaactgaagctgcactcctgcaggatctagttctccagattctcagatctcagctgacaggtaacttcaggcctggtggtcccaggagtcattcgcctagctgcttgccccacgactaaaacacattggcatcgacctttaaaagctgggtttaacctgtaaatctctaggcagcctctgcagcactgtctgtttattcatctccaactgcaacaggtcaactgcttaaaccactacagaaaattattcagacggcagcttagtctcatatatacataaaaaaatgaaaatatacttcttctatggaccacatgaaatatggaacagtggtatacatagctatttacacacacacacacacacacacacacacacacacacacacacacacagagactgagacagagagagagagagaaagagagagagagagaaacgtgtatatgtatgcatatgtatatgtta

SEQ ID NO: 4039 - DNA, 1000 bp, mus musculus
gcatggtcagactgtgaagttggatcctcaggtgacagggttctatgtcttcaagcagttgatttcctgtgcagcacttcgttgttgagtccagtggtcacagatgttcgagcagcagtttcttcttgctccccacttagttgctgccactgacagagcagcttagcaaagctcaggctttgctgctccagggccattgtccaggccgcccgaacctgcggcgggtactgaagggccaaggccggtcagggaagctgcaccaggccaggctgatggaagaggaagaagactgaggtggggtgatttgactttttaaactgcagcttacttgccattgtgtttataaaacagctgttgcctccctcctggccccaaacagggtttctctgtataattctgtcttggaatagcctatagatcagcctatagatctacccaggtacactaaagacttttttattttcagttatttatcccaaatgctgcccccatcatcgctcacagagtcccttccccatcccctccctttagcctttgaggcagcagcactctccccccatgtcccagtatcccctcacccctgtagtctctgcaggattaggcccaccctctcccactgagaccagataatgcagccctctgctacatgtaagctgggggccttggaccagcccctgtataccctggctggtggctcagtcttctgggagtttcaggggtccaagttggttgacactgttcgtcttcctgtggggttgccatttcattaagatcctgcagtcgttcccctaacacttctaaagggtccccaacctccatccaaggttttccaatgttttgtgagtatctgcatctgtctcaggtgctggggagagcctctcagaggagctgctaggatagactcctgtctgcaagcacattgtagcatcactaatagtgtgcctgactatagaatgggtccaaaaataggcaggtcactggtcagccattcctttcatct

SEQ ID NO: 4040 - DNA, 1400 bp, mus musculus
agagcaggagcaaggcccagagggccaggagaatgaatggaaatacatagctgctgagccgggatggggtttgggagagagttctctaggaagctccagagacctgggataaggaagctcccaggagtcagtgtaggtgaccttagcagaaatcccccacagtaggaatatggaacctgaagcaaccacttccagtagccagacaggaccctcagtggaaggttggggacatcaacccacttgtaaaacgtttgatccccagattggtcctatctaaaagaaatgcaggcacagagatggagaagagatgaaaggaatggctgaccagtgacctgcctatttttggacccattctatggtcaggcacactattagtgatgctacaatgtgcttgcagacaggagtctatcctagcagctcctctgagaggctctccccagcacctgagacagatgcagatactcacaaaacattggaaaaccttggatggaggttggggaccctttagaagtgttaggggaacgactgcaggatcttaatgaaatggcaaccccacaggaagacgaacagtgtcaaccaacttgaacccctggaaactcccagaagactgagccaccagccagggtatacaggggctggtccaaggcccccagcttacatgtagcagagggctgcattatctggtctcagtgggagagggtgggcctaatcctgcagagactacaggggtgaggggatactgggacatggggggagaatgctgctgcctcaaaggctaaagggaggggatggggaagggactctgtgagcgatgatgggggcagcatttgggataaataactgaaaataaaaaagtctttagtgtacctgggtagatctataggctgatctataggctattccaagacagaattatacagagaaaccctgtttggggccaggagggaggcaacagctgttttataaacacaatggcaagtaagctgcagtttaaaaagtcaaatcaccccacctcagtcttcttcctcttccatcagcctggcctggtgcagcttccctgaccggccttggcccttcagtacccgccgcaggttcgggcggcctggacaatggccctggagcagcaaagcctgagctttgctaagctgctctgtcagtggcagcaactaagtggggagcaagaagaaactgctgctcgaacatctgtgaccactggactcaacaacgaagtgctgcacaggaaatcaactgcttgaagacatagaaccctgtcacctgaggatccaacttcacagtctgaccatgcccctacagaaccaccttcacagacctgccccccgctctgagccccaccccaaataagaaagctctgcccacttgccaagttcttaagctctggg

SEQ ID NO: 4041 - DNA, 1200 bp, mus musculus
tcgtggggcaagcagctaggcaaatgactcctgggaccaccaggcctgaagttacctgtcagctgagatctgggaatctggagaactagatcctgcaggagtgcagcttcagttgtacattgctcctctgcctccagtaggaggcatagtccctgggaggcagactcttcacagagccactgccctggctagtgatccccaccccttcacaggatcccagagcttaagaactgggcaagtgggtggagctttcttatttagggaggggctcagagcagagggcaggactgtgaaggtggttctgtaggggcatggacagactgtgaagttggatcctcaggtgaaagggttctaggtcttcaagcagttgatctcctgtgcaaaagttggttgttgagtccgatggtcacagacgttggagtggcagtttcttcttgctccccgcttagttgctgctgctgacagagaagctcagcaatgctcagactctgctgccccagggccattgtccaggctgcaggaacctgcgtgggcggcccttgagtggggtatttaagggcctaggacggtcagggaagctgcaccaggccaggctgatggaagaggaagaagagtgaggtagagtgatttgactttttaaactgcagcttacttgccattgtgtttatacaacaactgtcgcctccctcctggccccaaacagggtttctctgtataattctgtcttggaatagcctatagatcagcctatagatctacccaggtacactaaagacttttttattttcagttatttatcccaaatactgcccccatcatccctcacagagttcctcccctatcccctccctttagcctttgaggcagcagcactctcccccatgtcccagtatcccctcagccctgtagtctctgcaggattaggcccaccctctccaactgagaccactgctttttccattcattctcctggccctctgggcctctctcctgctctctccaagacgtttatcgggaagggatatttgtttgtcagatgctttttagacatctagtgagataatcatgtttttttttcctttcagtttgtttatttagtggattacaatgtattgaaggattttcatatatttaacctgtatccttgggacgaagcctacttgatcatggtggatgctttctttgatgttttcttggatt

SEQ ID NO: 4042 - DNA, 1000 bp, mus musculus
gtatattcactatatacatgtttagtatttaagtgtgtgtgtgtagcatgtgtgtgcctgtatgggtgtctgtatgtgtgtgtgtgtgtgtgtgtgtgtttgtctatgtgggcattataagcacttatctgagcaactcaaaacatctgggtccatggtaagagcagtaagtgctctggctgctgggccataccttcacccccttcccacattttctcctggccgttcctctgttgctggacaccaggtaaaacataaggtaaagggaaagcattatagacagcaggtttcagcaaacccagctgcttcccagggatggcccccaggcacatctggtctctctggctgtgctgtcatggggtctgcaaactggtgtgaatggcaggaggcaggggctggagggctggagggctggagggtgggagggtgggtgtagagctgctctttagggtctggagcagaaaggaaaagcaggtcgtgccttagttgcctagagcagccctagtctgtgtgcctgctcagggtatgatcaaagcaaggctcatggggaattcttgggcacacaggcctggctgcagcccggtgaacatccagctactctgaaagccggatacaggaactgggaggccaggcctcttgtccactgcttcctacagctgtctggtccttctcccttctcaggatgtgatggtgatgaacactccatgagaggtgagaataaaactagcaaaaccagcacagtctgtatcagagacgaattagcaccaagaacacagagcagatgacttggaaggccttttgcatgggctcacaacccacgcaggcttagggctgtactcacagaggtctgcacatggccccgtgctgctctaatcctgacggtctctgcaatgttaactactctttcatttagcgctggaaccaccaattagctagccatctctaataagaagggtaggcaaatgtatgctctttaattccaggcagctggcttggagcc

SEQ ID NO: 4043 - DNA, 1000 bp, mus musculus
gggtgcccaggagtcattagaatacgcaataatgacaggaaatctcttgtagtcttgcctttctgagctcacccatcacaggccatgcaaaaaatggtggcccactccaggaaagagacaggaggatcttgggatttgccaacccgccagactagagtatctggcaagctccaggtccaataagaggactgtttcataaaaaaggagagtgattgaaaacagcctctgaagttgacctctggcctctaaatgtaaacatgcagaagcatccacatgaactagcatgtgtgcacacatacatttccatactcctaaggtcttgcatgcataatttacatcctacaaggcctcaaaagagtgagagatttactgtgttctgatggctccccatatacctcacggcagcagagctacctgtaaggtgtgtgcagaggtaagtactggccaactctgggcacaggtacagtgaggtggagtagggggttgctttgtcaggactggggtcttactactttcctcaagttaatgcttttacaaagtggcttcacacacttgtcaatgtcaaactgcgcaaagatagtgttgcactgagaaggaagagcaagtgtctcaggactgttgagggtgataacagcattgtgagctatgaactctctctgccgtcagaagaggggagctcagatgtgacatgcaagccacagtggttggtacaatgagttcagtggtgcctggaggagcacacgtgtcaggacaccatgttacctgtgcccacatgacatctttgagttgtgcagccacatgggggaggatgactttcagagagaaggctgttcatctaactccatgtggcatgagttacacagcatatacacatacctcacatacacacaccaccgtgtgcctatgtgttcacacggtggtgtgtgtatgtgaggtatgtgtgtatgctgtgttaagtgtgttcagtgtgaggtgtgcttgtgtgttctgggtacatgca

SEQ ID NO: 4044 - DNA, 1000 bp, mus musculus
ggggaaggggagggctggtcaatctgaccaccgactgactgctcgttttctctgtctatgttcatctaacgagcagaggaagacctcacgtggacaacagcaacccctgaggccagatacacagatatcatcctgtatgtatcaggctcactggttctgcttgtgctcctgctgctggccggggtgtatcatcggcaagtcatccgtggccactactctcgccagcctgtcactatacaaaagctgtcccgtttccctttggcccgacaggtactgtgcctgttccccagcccccacccactgtacggctctcagcctgaccccagcaggcagaacgaatctctcactttgcagttctctttggagtcgaggtcctctggcaagtcaagtttgtccctggtgcgaggtgtccgtctctcctccagcggcccgcccttgctcacgggccttgtgaatctagacctgcctctcgatccgctttgggaattcccccgggacaggtacactgaggaggctaggactgagggtgccagctcaggagtggtacccacagtctgaggcacgggtcttcttggcctctaggttggtgctcggaaagcccctgggtgagggctgctttgggcaagtggttcgtgcagaggcctttggtatggatccctcccggcccgaccaaaccagcaccgtggctgtgaagatgctgaaaggtacacatggcaacctgggcaaggtgtgctggggccacgcaaggggtttacacggactgcccgtgctggggccacgcagtgggctatagggatagccggtgctagggccacacaaggggctacacagactgcccatgctgggaccacacaaggggctacacggactacatgtgctagggccacgcagcaggctgtagggatagcccatgctggggccacgcaagaggctatacatgagaaaggccccaggttttccacccttgggcctgaagcccaaccctgttgctggccctggc

SEQ ID NO: 4045 - DNA, 1000 bp, mus musculus
ttctaaattgattttcaaaccaaaattggaacagttctcgaatgctcccaggacctggggctattaatactatggaagcagaaggagaaactgagtgtgcaggcgctgatttatgagcaaaaggaagttgcaagctcggaaacttgtacgtaacccaatcatagcccctctggagatgtgccagggaggagttggagactgtaaaggaagagggtttctcagggctgtggatgcgttggggcgtgggggtggggtgggggtgatgctggaatgagcaagatgctgaccgagttgaacttctcataaacccagcttcgttcgggacagctgtcagcaatgcctgagaccggccacttatcctcaccttttctttctttcttttatttatctctcacattattttctgtcactgagtaggctaaatgacaggaagagagtcttcccatcagagtgtgggaccgtggccaccgccgcagcagcccgtggtcttgcctctggtgtcaagttctgaagtgttagggtcatagatccagctgctaaccgctgagaccagccacggttgggttggagtggtgtgacatgggaaagtgaggttggccagtcggatcccggcaggtgtgctgggggtggacacccgatctcattctttgtttcttatggctttttgaaagttatccttacttaaacaactttattgggatagatgtgcactcgatacttgtatttaaagtatttggtgtatgtgtagctctgtgaggaccacaactacaaccaagataataaacacaggcgttagagagatggctcattggttaagagcactcactgctcatcagagggtctagatgtgctcaacatccgggtaactcacaactcttgcaccctctgctggcctttgcgtgcatctgcatgaaagtaatacacaaactcatatgccggcacacatacgtggaaacttaagggtttttttttggagagtcagttgtgctgcatggtgttt

SEQ ID NO: 4046 - DNA, 1000 bp, mus musculus
ttctttgagaagatccagaagatagacaaacccttagcaaaactaaccaaagacagagagatactatacaaataaacagcctctaggaagtcagtgatatgctgtggatagagcagccctctgtaccaccaacactgaagtctgtaaaccttactcaccacacccctcaacagaggctctgagtcaggtcttctggtgggaaaaccatgacacttaaggtcatgcagagagcgatgcgcttcagatggcctcaggagccatggcaccagcagatgtgcctgaaacaaggcagcctccacagcagcgaaggacaaggggtcccagctgggcagtggtgacccaacatccccttactgtgagtcataccatgaccctctttcgctctcccaggagctgtgtatttctaatctgttcactaaatcttcctctgctcaggcacctggagtggcttctgcccttttggttgagttatgacttggtccccaccctgtcatttgctttaattctgactgacgctgggccggtgaatggagctgtcatccatgtgtgatgtgcagctcaagggctttctgtggaaatgcagctcatagaaggatgttctagaatgcatatctacattaggatggcatcccttcctaatgtgtgtgtgtgtgtgtgtgtgtgtgtgtgtgtgtgtgtgtatgttcatgtgggtgtgtgcacagccttgagtgacattcctcaggcagtttcctctttgctgctgagacagggtctcttgatgccctgcagtgtccaagtaggttatggtgactaggcaggctctgagggaaaccaaggtgctcttccctctccttagcccctttgttccaaatcatctctttcctctcttcttctcctttcttttctctccttctccctccctccttcttttcttttcttctttatttatttttagcagactctgctatgtgatccaggctgtcattgaacttgtgatcggttaccacatctcctaagt

SEQ ID NO: 4047 - DNA, 1000 bp, mus musculus
ttgatactgacacaaagaaatgatattctgaattttctctttttctctcaccaaaaatatctaaatgtaacttcttttggagggcagattggcaactgtgctgaaattttgagatgcatcctctgcctctggggatatatctgacaaccctgtgagtgtgcacatgaaattactcttccctgaatgttcttagcagtgtctacatttttgataggtgtcctggtgtctctgtgcacatgcataaacattgtgagatttgaatgctattagtagacagacagacagatttctgctccactgggtacaccccccagggggcagggacagaagtaaaagccagacagagaaggtgacccacccacaggaaggcggagcagggcctctgggtagaatgctggggcaggctggctccctttcctgactttgggtgacaggagtcactctgggatcctttcttcctatattccttagaccctgtgtagttcatgatctgtcatttgtttacaagcaaaacataaataagaagaattcacgggaaatgggaaataggatcctcttacatgtgtatagtacttttcatattgagaatctcattgattggtggctgtgtctctctgtgcacagatccctgatgtcctccctgcccgtggctgcctggcttttggagcgagtccaccttacccgctggcttctggaagcagtaacaccactcattgttggagagtttgccgtccttgaaggagtcgcacgagttgaagagaggcttgatgcagggctcatatttgtctaggtagatggcattgatctctgagtggtccagcaacaggtcatagttcatgtccaacttgttgaacatccaacccaaggagtccttgcaaatgggtaagatgctggtgtcaaaccctgtgagagaaaggaacatctcagcctgccagacatggcgcataccctgccactccctaactgggtgcctcagaggggtcagggtacatccaactgt

SEQ ID NO: 4048 - DNA, 1000 bp, mus musculus; identical to SEQ ID NO: 4047

SEQ ID NO: 4049 - DNA, 1000 bp, mus musculus
ccccacacacagggagggtgacaataacctagggtagtgctgacttcccaccaggacctctaccagacattttacacagcacacgatgtgtaaaagccaagggaagccactccacccctcggcttcccggtgggcaaagtggaagccagcatctcacgggaatcgagggtggaggaggaggtctggggagagtcagaagatcgcactactaattgcatggactagaggtgaagtgtggaccctgctggatgataaatacctagagtacatggaagttttactgccctagacaccagatcctgaagcaaagaaatcctcctccctgtcacaggaagaacctggcaccggctgctcttctgtgactccgggaaagcagcaaggcctccgtccagggctgaaggctacacgagggcttagtgtagggcatggtagtctgagcactcagccattagaagcagctttgccatcatccctgtcatctctttaaaggattcagaggataacgggcttcccttttttgtttgtttgtttgcttgcttgcttgcttatttaagtaaggttcgtgttatcccagggggctccacagtaccttctcttctgaggagaccgtcagcttgtcgctggatatcaagctgcacacctggtccagacttaagctcagaaactcttcccccagcatcacctctgggaagtgctgctctgctccaagacaagaagttaagacaacaaggttaggcctcgagtgaccatgggcaacctttgggggggggggcagaagctgaggagaaaggcagaggtctgaaggcgaggaggagctggagggcagaggagaaaaagacagacatccaggctgtgggggagaaggacttttagtccccaagtgaaggtgtgtgccaccctgtgttgtctcgtcctgaacaatggtggagaggaaagtggagcagagagacctgggtttatatttggtctgctatctgtgagacggatccaggcactgcag

SEQ ID NO: 4050 - DNA, 1000 bp, mus musculus
ccagggccaaaaagggggagtgggtgggcaggggagtgggggtgggtggatatgggggacttttggtatagcattggaaatgtaaatgagttaaatacctaataaaaaatggaaaaaaaaaaaagaaaaatagctgatttaaatactgcaatgaacttccaattgtagaattctacttaataaatgtcaaatagaaacaacaccttcaagtacttcagctgtagtgtgtaaagaccacaaataaaacagttacattaaatttgatgggacaacaagaaggaacttcatttaccatgataatagaactgaaagggcatatgactggtgtcagttgcaacagagatgggactcatctataccacagtgatcaaaggggaatctccagtccctgggatttgttcaacatctgttcctggcatcatacctacaggtgcagatgctcacagccaaccgtcggactgaatggaccgaatggaagagcgaggggaaggactgaaggagctgaaggggattgcaaccccataggaagaatatcaactaactggaccacccagagctcccagtgactaaaccatcaaccaaagagggatccatggcttcagctacatatatatcagaggatggccttatctgacatgagtgggaggggaggcccttggtccggtggaggtgctatgccccaacgtagggggatgctggagaggtgaggtgggagtgggtgagtgggtgggggagcaccctcattgagacaaaggggaagaggaatggggtggggtgtctatggaggggaaactgggaaggggatatcatttgaaatgtaaacaaataaaatgattactaaagttaaaggagaagaaattcagttattgccgtccatctcatacaggatataagttagaaccacagcactcagcatattgcagatgaggatatctaagttctcttattgaacatcactgaaaggacaatgatactggaaaatctgagacggaaacacttc

SEQ ID NO: 4051 - DNA, 3400 bp, mus musculus
acaatcattatcagggattatggaatcaccagtttgtcagaacacaattattacatgaaagtacatctttatattggtctttgaataatttttttccaaaagagtggggagatacccatgtcattaggctatgtaatagcattagtaaaggcatattagcactcataagccattatggaatgtaatctgtggggttcatacctctcaaagcatacccatcacagtcatgcaaaacagtgggccatctacagaagactcacttgctttccatagtatttctgcatggtttatgccaaataagtgtgttccataagtttatgtatgtggtgtattcattttcattcattattttattttttatttttgattattctatttatttacatgccaaatgttgtcctccttcccagcctctcctttacaaccccctcttccattccccttcccatttgcctcaagttgggtttttctctaccaacccacttgtgcctcatgcctctagcatctcccttcactgaggcaaaaagccccacagaaccaacagccttccctcccattgaagctagttaaggcagtcctctgctacacatgtagcaagagccatgggcccatccatgtatgctttttggctggtgatttaatccctgggagctctgaggggtccagttagttgatattactgttcatcatatggggttgcatttctctttagctcatttagtcctaccctaagtcttctattggggtccccaggctcagtcaaagggttgggtgagtgtctgcatctgacttagtcaggggctggtaaaggctctcagaggacaaccaaactaagctcctgtaggcaagcacttcttagcatcagaaatagagtcaggatttggtgtttgcaaatggaatggatcccaaggtggggcagtctctggatggcatttccttcagtctctgttccatttttatacatttgaagatgactctgatatgcaaaggctttaccacagtgagaccattcataaggtttctctccaatatatgttgttttctgcatttggtgataactttgatgtgcaaagggtttaccaccttgcttatgttcacagcgttttactctagtatgaataatttcatgatcatgaaggctacagaaatgtccaaaggctttacaatattaaatgcattcataagaggatgattctttgcatgcctttgaagataactgtgccataaaaaggctttatcacactgattgcacttggagggttttgctccagtatatattcttttacatagttgaagttttcctgaatatgaaaaagttttatcacattgcttacattcacagggtttctcttcagtatgtgttctttgatgtattcaactgtgtcataacaactggattatcatgtcaattatatttgtcaggtttatttctagcagtgtgtgtgtgtgtgtgtgtgtgtgtgtgtgtgtgtgtgtgtgtgtatctggagactactgtgacatgcaaagaattaaccatattgaataccatcctagtgtttgcctacagtatgaatggtttcacatctttactatgacgatcatatccatagtgtttctcaccagtatttttctttaaagtattcagagactgttttgtgaaaaggttttctcacttctatcatacttgtaggatttctctctaatgtctgttcttttctacattaagagataactgtgatgtgtaaaagatttaccacatttcttctgttcatatggtttctctacagtataattacttccatgatgatgaagactacagaaatgtgtgaagaccttaccatttcaaataccttcatagggtttctctcccagataattccttttatgtttctggagactattgtgattttccaagactacaatgattacatccgtagagtttcttcagcgtgattccttttatggtattggagagtactgtaatgtgcaaaggctttatcactttgattacattcaaagggtttctctccagtatgtgcccttgtatgtattatgagactattgtgttgtgaataggatttatcacattaattatatttgtaagtgtttttttctagtaagtgttcttttctatatttggagatgactctatcatggaaagggtttatcacattgattacatttgtagagtttctctcgagtatgtattactttatgtatttgaagatgactactttttgcaaagactttaccacattgattacattcataaggtttccttccagtatgtgttctttcaagtatttgaagatactggtattgtgaatacgctctatcacattgattatatttgtaaagtttctttctaatatctgttcttttatgtatttggagactactatgacatgcaaggacttccctatgttgaaagtcttcagaggcaccttcatctcagtcctttctgctggggcagagtcttggctggtctgctcccatgaagacaccatatcatgacccatcctagaggactcactgcactcagaagagttggtaagaagcaccactatccccggagtctcagagctgccactggaagacaggtggacttgggacccatcacacagcaaaacccccaccctcccaaataccactcctcttctgtcccttctgccacttcctcctggtactttctgctgaggcagactcctagctgctttgttcccatgaagacttcatatcctgactcatcctagaggactagctgcactcagagcagttgatgacctgctacattcagagtagttgaggattcactacactcagagcagtgaggatcaactaccctcagagcagttggacaacagcttgactgctccactgaagactaaacagtctgaggacctcccaggatatctactgcaaccagagcaacagatcaggagcttcactgcccctgtgaagagcccccagttggaaggccccacaggtggtctgctacagtcaaagctgcaggcctaccaggagacctgagcaacccagggacaaaagaggcagatttcagacagccacccaaaccaacaatcatcagggatgtccagatggcaaaaggcaggcacaagaccataagtaatagaagccaatatacatgggagtcatcacaaaccagttctcccaccatagcaagcaatgaatataccaacacacctcaaaatcaggaatctgtcctaaaatcttatctcatgaagataatagagtttttgagaaggatatcaaaaactcactgaaagaaatacaggaaaacacagaaaaacaggtgaaggaattgaataaagtaatccaagacctaaaagtggaagtagaaacaataaagaaaacacaaatggaggcaaacctggaaatggaaaacctaggaaagagg

SEQ ID NO: 4052 - DNA, 1000 bp, mus musculus
gagctcttgactctagctgcatatatatcaaaagatggcctagtcggccatcactgggaagagaggcccattggacacgcaaaattgatatgccccagtacaggggaacaccagggccaaaaagggggagtgggtgggcaggggagtgggggtgggtggatatgggggacttttggtatagcattggaaatgtaaatgagttaaatacctaataaaaaatggaaaaaaaaacacacatggtaagtagtcactgataataagtagatatcaggcaaaaggctcagaatacctaccatacaattcacataccatatgatgctgaagaggaaacaagaccaaagtgtgcatgctttagtcctactttgaaggggaaacaatataataaccagatgtagagggtgggagggacttgggaggaagagaagagggggagagggaagaggggcaggatcaagtgtgggaggaaacaggggagatgtcctgaacagaggttcaggaatttgaacagaggtgtgttgctaaagggggtatagggaactgagagtagccaccaggaagtcccagatgccaggaaagcaagagggtgccaggacccaacagggatgacattagataaatactcaacaaaggggaaagagaacctgtagagaccatattcagatgttagctatagccccaagctgaggcatggggccacctactcatctcaaaaattttaacccagaattgctccattctaaaggaaatacagagacaaagagtagagcaaagcctgaaggaaaggccatccagagaatgccctgcctggggatccatctgatatgcagccatcaaactgagacattatggctgatgccaagaagtacttgctgagagaagcttgatatagctgtctcctgagaagctctgtcagagcctaagcaatacagatgcagatgcttgcagctgaccatcagactgagcatggggagcacaatggaggagttagaggaaggactga

SEQ ID NO: 4053 - DNA, 1400 bp, mus musculus
taagtccatgaaataactcattcagttgtgaaacactgttggtgagtattagtgccttttctgttgttgtgataaactgtctaaggtattgtagaaaactgcaatcccaaaccaggttttccaccccagttttggccatttcttttctaggtaaaacacacacaacttttatatttgtaataaaccttaatcaacacccaatattggctgatatctatcctctattctatcacatctatttcccagccagtaattttgtcatataattttgccatatttcatctgggctatgcttaactccacttagtcaccccacatggccattattttattattgacctaacctaaggctacttttttctctgtctacttctccttgtggttctcctctgaccccaagtccagtatccctaatccctgtctatgtctggtctgcccagctactgtccagctattgattgttgtcatctttaaaaaccagtcagaagaaacttgagagcaaggtcacacaccttctttagggtgtgtgtgcagatcttgtcttctatggagcaatcagtttttagtttcatgcttttaacattacagtacatagcaagagacgaaaccccaacatgaaggcaattttttgaagcatttaaatttccttaaagttctaaagggatataggatcaccatgatattatcagggcaacaagtgtcatttgtggcagctagaggaggagctcagagctcacgtcctcaccctatagccttaaagagagagttaaagccaggtgaggtgtcactcacctttaatcccagcacttgagaggcagaggcaggcaaatttctgagttcgaggccagcctggtctacatagtgagttccagcacggccagggcttcacagagataccctgccttgaacaaaccaaaaaaaacaaagaagaaagaaagaaagagagagtgtgtgtgtttgaggaagtaaactctgaaattcaaccatagtgacatattttctgcagcaggcagacatttcctacatctccccacatgacattactaactgagaagtattgatttctctgccatcaattctctgtctgctttttgttatataagccaacttatgatgaagaaaatctccgtggataagcattagatgccacaaaccctgggttatagtagtcaatgtttatacaagaataacatcatgaataaaattttctttgcggaccaacgtcgtttaattttatttatggggtttgtctgcatcttcgggtgagtatgtgcatgtctatgctgatatccaagattattaagttgttgtatcttcttatggcagaagatacactaagatgtccaaacctgaccttgtccctgggaatgaaaatgtcttaattagttggccatgtctct

SEQ ID NO: 4054 - DNA, 1400 bp, mus musculus
caatgatgtttatctttttaaagagttaataattgatttcacttttttgtttgtttgtttgtgttttcaagacaggatttctctgtgtggtcctgactgtcctggaactcactctgtagaccaggctgacctcgaactcagaaatccacctgcctctgcctcccaagtactgggataaaggcgtgtgccaccaccgaccatgatttcaatttttgaatgtgattttctttaaatctatctctaatattgtctcttaattgttttcattctccagtacttcccagtcattaaaaatttcttttcatttttaaagagtgctgttgattatttatttctgtttagagcattatctcctggaccataggctggctcattctctgtaatttagaattaatttgaactttcaatcctgtctctgctgccacaagctcgggtgtcagtcctgcacctctcccagcctcggccttgactgcattgaaaggaaagataggccagtgaatggttgccgtccaacttctgttttctgttgggactgtccaatgaagctgcacctgtgcaagaattgaattttgtgaccaactttgagatatgtttagtcacagcccagaaagggtcagtacaaaaggaggtgataatatctctgctttgacagtacttaagattcacattgaggtaatcaattttagatgattgataactgtcctgctgacccatttttctatccaccccaggcaatcaagaatctggataaaaacctgaacttgctaaaatgtcaaattactgtagttacactagttctaccaagaataatatctaggtaatgattgtcttgctaccaaataagacatttttgtgtttttttttacagttttaagatgatcatcctgagggctggcaatatgactcagtgggtaagagcactgactgctcttatgaaggtcctgaattcaaatcctagcaacatggtggctcacaaccacccgaagtgagatctaacaccctcttttggtgcgtctgaagtcagctacagtgtacttatttataataataaataaatcttaaaaacataaaaaagatcctcctgagagaataagcctgagtaatacttggtgtgctctaatacacttccctcctctctggagaacataatcttcaagccttttccactttaaaaccatatttttccattatacttacagcatttctaccatctctcttctgtctctgaattccttcataaacaatttattgtttttcatgagggcaatttctccttgaacaacaattacagtttgaatgtgacctatgtttgcctgcaggacttcccagctatgaagctaattgatggctgaactgactgtagatgtgtaagagaatgtacacatgatgtatcctgttac

SEQ ID NO: 4055 - DNA, 1000 bp, mus musculus
tttgttaatgtttaatcatcaagattgacctccttttaggctccattcccataacaaaaggagataaccctaattaataatcagctattaagtacccccaccccccactcacacacacaaagaacaggcttttaaggagcagctcaaggggcagtgcagggttaaacccatcatctcctggtctgccattaagtccactgtaggaggagcgtaattctgtcaggtgggcaagattaacctgggtaacagttgttggaaaagagcaacacttacgaaacaaacctggcagtatctttgctgtgtaaatctcccgtctgcccaagtgggcagacttgaagtctccttcctgtctctgtttatattgttcaaagtgtaacctggggctgggaactaaaagatatttaagcatgacagcataaataatatgcataaacctatggtgtatatcagctagtgaaatctatttactgctagattctctttgggcattagctagaatcagacattctacatgctacactgaaggttttttctttattaatctctagcgagtagagtaattccacactgggattaatactataacaataggtagagcttattttcttatttgaaaacaaaattttggggaaactacttttagttttctatcatagaagggtgtgacttgcaactaacctctatatatccaaagaatgtttaggatttttattacaacagcagaagtactgaaaacagactttagttagcttattcttaaacatttgttttcagacaaaactttaaacatatacattcatatagttttgatctagcaattagtaaagatttatcttcatttacattatgataaaccagtacagtgaatttacctgtatacatttgtgcaaactaggaaaaatcaccttataatttgttttacacaacttcccttaaaataattttttatttcaaaaatgaatgtattttatacaacttcccttaaaatagtttccctatt

SEQ ID NO: 4056 - DNA, 1000 bp, mus musculus
catggaattcttgctcatgggatatccagatgaacaggtgctgcagacattgtgtgccacacttttcttcttgatttacctgggagcactagtgggaaacttcctcattatcaccattactactatagaccagcatctccagtcccctatgtatttctttctgaagaatttgtccctgattgatatctgttatatttctgtcactgttcccaaatccatcatgaactctgtgactaacacccattccatctccttcctgggatgtgttttacaagttttctgtgtaatatttttggcaggcactgaatttgccttgcttttggtgatgtcctatgaccgctatgctgccatttgctttcctctacactatgaggccataatgaataaagaagcctgtgttcagatggtggcagcagcatggctcagtggatgtgtctatgggtctgttcatgccacaggaacattctctgtccatttctgtggtccaaatgtagtgtatcaattcttctgtgatatcccatcacttcttagacttgcttgttttggagaccaaattctagaatatgtgtttattattactagctgttgttttgccttcatgtgttttatattgatggttatttcctatgttcacattttcactataatcctaagaattccttctatacaaggaaggtttaaaattttctctacctgtataccccatcttactgtggtgaccttatttctctcttctggatttgttgcatatttaggctcagcagtaaaatccccatcatcactgaatctctttatgtcagtgttttactctctgttacctcccagcctgaatcctgtgatttatagctttagaaattcagatgtaaaagtggccctacataacatttttggtgaaaaaatgaccacacgcttctaaatcttgaaaatattagctactatgaaacaaactatataaaattatctggtaatccaaacctgtaataaaattatttggtatatg

SEQ ID NO: 4057 - DNA, 1400 bp, mus musculus
ccaatgttataaacagaatgattctaatgctatacaaaagtctataatttaacttaatcctgtaggtagtaaagtgtgaaatttttcttcttcttgtatatcctctttcttttccatcctctctggttataaaatgacaaattttacacgtgtctcagagtttattctacttggattcagaggaggtcctggtatacaaatgttgctatttctgatttttttatttttgtatgttatagcagtggtggggaattttggcatgattataattatcaggatggatgcacacctccatactcctatgtatgccttcctccagagcctttcctttttggacatctgctattcttccacaattgctcctagagctctgataaactgcttgaaacaggatcatacaatatcctttagtgggtgtgccacacaattcttttttttgtctctttttggtaccacagaagcatttctcctggctgccatggcctatgaccgcttcattgctatctgtaaccctcttctatactctgtgagtatgtcccactgggtctgtggattgttggtatcagggtcctattcatggggtgcagtgaatgctgtcacgcaaaccacaatgaccttcactttgactttttgtgggtccaatgagatcaatgacttcttctgtgacgtcccaccactcttatccctctcatgttcagacacttttataaaccagctggttcttcttgctttatgtggttccattattgtcagtaccttcttgactgtttttgtctcatacatctatatcatttcaacaatattgaagatccgcacagtgcagggacgacagaaagctttctccacgtgtgcctcccacttgattggtgtctgcttgttttttggtactgttttcttcatgtatgcacagcccagtgctgtctcctccatggagcagagcaaagtggtgtctatcttctacactattgtcattcccatgttgaaccccctcatatacagcctgaggaacaaagatgtcaaacaagcactgaagagaagcaagcagagattttgttcctgattctctggatgtaggtctcgcaaagtaacctggacttcacgccaattcattgttactctcatgatttatactctagtagtggttcttttttttttttttgaagtctttaagaaagagaatatattttatttttatatatttatcaataaatgaaatcatgctgatgatttgctgatgagaaataagatgtaaactgggaaaatggataattgctttggtatgtgtttattttgcctcatatacaggagcctaatcaaatttcatcataaaaatgattatacaatcagaaaatatttatcttgaatgtgactcatgaagtagtaaaacagatctttccaaa

SEQ ID NO: 4058 - DNA, 1000 bp, mus musculus
taatcattttatttgtttacaattcaaatgataacccctttccctcttccccctccacacaccacccattctatccccctctctgcctccacccactccagattcacactgctctagcatcaccctacactggggcatcacgcctccacaggaccaagggcctcccctcccactgatgccagatgaagccatcctctgctacatatagagctggagccatgcatctctccatatatactctctgataggtggtttagtccctggatgctctttatggtccagtgggttgatattgttcttcctatggggttgcaatccccttcagttctgtcagtcctttcctcttctgatggggtctttcctgtctttagacagaaatgattctaggttaaaagttttgatatggatgggtggctcaatccctcaactggtgcccgtgcctgtctactggatgtggcctctatacgttctgtgtctcctctgttggatattttggctaatgtcatttcccttgggtcctgggaacctctcaattccctggtttcttggactttctagagcctacccccagttccccatcctctagtgctacatatttatattttctgatcctctgtacttctctcttgtctcttcccatacctgatcctaccctccatttcattatgtccccttctacagtcccttttaggtacccatgaagcaacttcattggaaactttgccccaaggaatggcttatagctttccattatgtaaaaaattttgttgctgcttcgatacaagaagtcaggacattgaatctttcagtgtctattgttccttatatggatattttatcagctgatccctctgaaggagtttttactacaagccttgtctctgatacaaggagctttaaaattttggagtggttgttgttcaaaggcagtatcttctggcctcctccaagaggctggcttcaagtctccagctctgccctctgcagcactctaggctca

SEQ ID NO: 4059 - DNA, 1400 bp, mus musculus
agcctagctagaacttgaatgtgtgcaatagggaaaagacaatttctaagctgaaatcatggcaaaaatcgtaaaattgtaaaattatttctgcatgagaagcaaggaaagcgaaacttgagagcacaggctgtagggaccagggagtccctagacttaagaacctccgatgtctctgggtaaaggccctgctactctcagggtcacaatcccatgaagatgtgggagtggctcatcagaagactgggctaaacttagctatggtgtttattattatttattattattattttgagaaaacaaacctggtgatctttatcacactcctgtagaccatataaagttagaggagagaaccggctcagagtcgtcccatgattgacacatgaaagttcactgagagccaaggctagcccattaagatggaccagcaaggtccagggatttgcctgtctctgcctccccaggactgagtttgcaagcataggtcctcaggctttggaagccatcattggctgacccttatctcccagcccaggtgtctggtctttagctaagctctccaaaagagaggacacccaagtctgtcttcattgaaccacctgtcccatacctgcttgagttactgtgggatctaggacctacgggctctgcacagaggtgtcagccagtgtccactggagttggaggggtggaaatgtagctggtttatgccacctgtagtttctttagattccctgtgggcttcagtggagacaagggtttggttttgtataatccaaaataaattcaagaccacctagccctttttccctctgaagggactttccaaaagatactagcaggccaagtgcagagccagataaggaagcaggccgactaaacaatgctgagaaaaaccgtaagggcaggtggagtgagggactaggccaaaggtagtcactctattcaaaccaaccaatgcctgaaagggttacttgctataccaattagaataagccagttagacctgttgcctaaacctgccccttccaaggaataaaaagtgtgttctttgtttgtttggggccttttctcttgcctgtgtgttgaagggtgttccccaacgtgttggatcaattaaaaaaacctcttgtggtttgcaacaatgtctgtttgtggtctttgtgaaagagggtcttttggtggactcctacagtttctgttttactgtcacacaccccatgcatctcaagagcaaaataaaacaatgtccgatggtgtggacggctctgggtgacacagggacaaagctgcccacccagcaaaagatcccgaccctgagatacagatgctcagatctgcctcctttatgtctttggacactaaaggattctctaactttgtgtccatttaagtat

SEQ ID NO: 4060 - DNA, 1000 bp, mus musculus
cttcatgttctgttgtagtcatcagaaaaatattaatttgatataatgtagacatctttcctctttttattaatcattttatttgtttacaattcaaatgataacccctttccctcttccccctccacacaccacccattccatccccctctctgcctccacccactccagattcacactgctctagcatcgccctacactggggcatcaagcctccacaggaccaagggcctcccctcccactgatgccagatgaagccatcctttgctacatatagagctggagccatgcatctctccatgtatactctctgataggtggtttagtccctggatgctctttatggtccagtgggttgatattgttcttcctatggggttgcaatccccttcagttctgtcagtcctttcctcttctgatggggtctttcctgtctttagacagaaatgattctaggttaaaagttttgatatggatgggtggctcaatccctcaactggtgcccgtgcctgtctactggatgtggcctctatacgttctgtgtcccctctgttggatattttggctaatgtcattccccttgggtcctgggaacctctcaattccctggtttcttggactttctagagcctacccccagttccccatcctctagtgctacatatttatattttctgatcctctgtacttctctcttgtctcttcccatacctgatcctaccctccatttcattatgtccccttctacactcccttttaggtacccatgaagcaacttcattggaaactttgccccaaggaatggcttatagctttccattatgtaaaaaattttgttgctgcttcgatacaagaagtcaggacattgaatctttcagtgtctattgttcattatattgatattttatcagctgatccctctgaaggagttttactacaagccttggctctgatacaaggagctttaaaattttggagtggttgttgttcaaaggcagt

SEQ ID NO: 4061 - DNA, 1000 bp, mus musculus
tttatttatttattcccacggcgccccgccccctgccatcactctacccacagccccgccctgcgcgggtgcggccccgccccaaggctcctacacccaccccaatcccccccccccccccgcactgggcccggagcaagattaacctgcgcatttttagactctggcggcaacagcaggagcgcggaagtgtgaccctctgagacaccttgtcaacttcgcagttctcttcccggttactcacaggggtgcgggagcgcccactgctgtcaggaagcaccctcgccttcctccccctcccctcgtggccccgtgacgtcacacacagcctccttagacctgctccctcaaccttcaccactcaagtgcggatccgggatcacagagccctcgcgtggcgtcccgcccctcccgtgatcccggagactccgccccgtccccctgcaactgccagaagtcccacagctgcttccagaaccgcgacaggaattggaagtcccagccacccgccagcgctgcccgcttggggtcatccaggtcgtggtgcagggatgtggcgcgcggggcggccacgggggtccggactgagggataagggcgtgggcttggtgctcagcggtatccatgcggtgaatcaggcagcgcggccatagcgaagagttcaggggttactaagatcacaatccctgtccgcagctcattactccctggggtccaccgagggtgccctcctgctcccaacatctctcattcccctgctgcccgcgtcacgtgactctggccaggcggggcaactgtagtggggggcgaggctaggggtggcaccaaagcgcagccagggatcacactgtgtttcccagatggctttgtgacccctgacaccaagggtgacatctgacctatcatgagaaccccaacctcacgcctgacccctacatcacatgtgaactccgaattcagaccccaacatgacctctatagtgttttctgattcagactc

SEQ ID NO: 4062 - DNA, 1200 bp, mus musculus
atatgatgaagaagactacagaaatgtgcaatggcttcactatattatctacaatcacagggtttgtgtcttagaatttccattgctaggaatagatttcataaccaaggcaactcttgtaaaagcaaatatttaattggggccgacttacagttttagaggtttagtcgattttcatcatatcaggaatcatggtaggcatgcaggtaaacataatgctgaagaaggagctgagagttctgcaccttgatccataggaagtcaggaagagactgtcttctagggatcacacaggagggtctcttcagcactgggtggaacttcaaagccaaccctaacagtgatgcacttcctacaacaaggccacaccttctgacaatgccacaccctgggtcaaccgtattcaagatactacattccacttgctggcctgcatttgattgttcaaacacgtgggtatatggggaccacacttaaacatagtataatacaaaatacatgagattcaacttcaaaaggactcatcatctatagcagtctcacaaataaataaagtccaaagttcatcatctgagattcatccaatcacctaactgtaatcccctacattttcaaaaacaaatagcacattatatcattgtatacctccaaattcacaggatgtacattgccattcttttttttcttttcttttgttttgtttttgtttgttttgttttagagacagggtttctctgtgtagccttggctatcctggaactctgtaaaccaagctagcctcgaactcacaaatccgcctgtctttgcctcccaagtgcttcgattaaaggcgtgtaccaccactatcaagctactttgttatttctaaatagcattgtgaggaaatactggaccacaagaaggcgaatctccaaattctgcatatccgtgtctgatttcaagtgttcttcagttcttcaacacctttctgcttagttcactccagcacaattctttctctttggctggacttatttcaggaaagcagttttcctgagtaggtatcccatagctctagcatctcaaaatcttggggtctccaaggttactataatattacatcttcatgttccactggctgggatctacacatgatcttttgcactcctcaaaagaaagtgggtcacttttccagctcttttctctatagcaccctaggtt

SEQ ID NO: 4063 - DNA, 1800 bp, mus musculus
ctgcgtgcctggtgaagtggtgtggcctgctgtgtgtggatgggaactgagagtatataagagtgagaggcccgggttagagggaggattattattcgagagaggattattattcgagagaggattattattcgagagaggattgttattattgggagatataaacaagggagatataaacaagggagatataaacaagaagaaataggactgaataaacgtgtgcagaaggatcctgttgcagcgtggttcttcctggccagttgagcgcgcgcaagagaattataaaaaagtacctttgccacatactaatcaaaacactaaatatataaagaattataaaaaaaactacaacagaaaaaattaataaaaacaaaacagaacaaaaccaagtaacacatgagagcagacctattaggtttatacctgtcttctcaatgtctactgtaaaagacaaaagggtttgaacacatgtggtgcagactcaaagaaaccagccttgtttctacaagcctatggtccaaatgttttgggcagattcagaatcagccatgatagggaagctattcagaggtcactgcctgatctagcaagtgaggagcaacacaagggacctcacatatggcttatacttgccatcccagagaggacccaccacccagctcccattgctacctgctcctctgaattgtgggcagtgaccctgtgtctcaacttcagagcttcgctgaggtccccttacaacacccaacacctgagctcagagcaggacacagagagccattcaagtctgcacagccatagagaacttgaagaaaggcacctggaagatcccgcctccttgtctaactggcatgtcttcctggaggcgtttattggccaatgaatcttaccctgcctcaaggttaaagtatgcttcaggtccaggacctgaccttttccggatttgagcagtgctttgcattccattagcatttgtccttgccctccaagggattactcacccaccctaacctgggggaaaactcaccagaccagtttaggctattcagctgcctgctcctccctctgtgagcaatgatcctgcacttaccagggcctgacttcagaccttgcctgagctttcctcacagtacttgccctcctcttcctgaaatcaaggtgaatagctcacatagcccattactcctgtgcagtgtaggtaacaatctgacccactgagtggaagggtgcctaggcaattaatattaaagaggtattttaggaaacaagagttttgatttgtggcttcgtgctgggctcagggaaaccacagctccctttcaccagatgataggaatcaaacaaccctgggagaaaagccagaaacataagggaaacactgttgtgccctcttattagacagcacatcttcatcagtggcgaaatagagaaaaaccacagttggattagtacaagttctctagataaacatatctcaaatcatacaatgaatgtatgtatatagaaaggaaatttaatagaatgtcccaataaaggctctcagccaaccgaaattagaaaaatcaaggactggttgattgcctgctgcgggtttttatagctgatgtaccagaattctaaagaaataagtactttttaatgccagttataaaaatcacacgagcaaatcacctttgttttatgaaaaagaatggcacgtaagaaaaaactgaaagcactaccctgttcaatgtctttcatatatgcaggatgcctaaagaatctattgcctagattaaaggtggatctgaacatctc

SEQ ID NO: 4064 - DNA, 1400 bp, mus musculus
ccctatgattgtaataaatgtgttaaagcctttgcatgtcactgtactcaacacatacttaaatggacacaaagttagagaatcctttagtgtccaaagacataaaggagcagatctgagcatctgtatctcagggtcgggatcttttgctgggtgggcagctttgtccctgtgtcacccagagccatccacaccatcggacattgttttattttgctcttgagatgcatggggtgtgtgacagtaaaacagaaactgtaggagtccaccaaaagaccctctttcacaaagaccacaaacagacattgttgcaaaccacaagaggtttttttaattgatccaacacgttggggaacacccttcaacacacaggcaagagaaaaggccccaaacaaacaaagaacacactttttattccttggaaggggcaggtttaggcaacaggtctaactggcttattctaattggtatagcaagtaaccctttcaggcattggttggtttgaatagagtgactacctttggcctagtccctcactccacctgcccttacggtttttctcagcattgtttagtcggcctgcttccttatctggctctgcacttggcctgctagtatcttttggaaagtcccttcagagggaaaaagggctaggtggtcttgaatttattttggattatacaaaaccaaacccttgtctccactgaagcccacagggaatctaaagaaactacaggtggcataaaccagctacatttccacccctccaactccagtggacactggctgacacctctgtgcagagcccgtaggtcctagatcccacagtaactcgagcaggtatgggacaggtggttcaatgaagacagacttgggtgtcctctcttttggagagcttagctaaagaccagacacctgggctgggagataagggtcagccaatgatggcttccaaagcctgaggacctatgcttgcaaactcagtcctggggaggcagagacaggcaaatccctggaccttgctggtccatcttaatgggctagccttggctctcagtgaactttcatgtgtcaatcatgggacgactctgagctggttctctcctctaactttatatggtctacaggagtgtgataaagatcaccaggtttgttttctcaaaataataataataaataataataaacaccatagctaagtttagcccagtcttctgatgagccactcccacatcttcatgggattgtgaccctgagagtagcagggcctttacccagagacatcggaggttcttaagtctagggactccctggtccctacagcctgtgctctcaagtttcgctttccttgcttttcatgcagaaataattttacaattttacgatttttgccatgattt

SEQ ID NO: 4065 - DNA, 1000 bp, mus musculus
caccattttgtcttgaaccatatggttatattaactaaatctgtggtgaagacacatggcctatgctgtattgatgaaatcattatcaaagaagggcaccaagttccatgattgcttccatcttatgaggatccccaagtgaaacttagatcaaccaatgcagtagtggttttctgttctatgtgaattgggccccttggtaaagtaaagaaatttcccatcaggaagttccagattcttggataacctactttccacttttctgggggcaggaaaatagatgatgatatgaaaaagaggactagtaaggcagatgagagaaaagataaaagctgattacacatagcatagcaaatccattgccctaaccctgagcctagccctaaccatgatatttcttctttgtgtaacaggatactattgactcagtagaaccatcaaaaataatggtggccaacttaaccctaaccctgagcctaaccctgggacttacccccaacctcttaccctatcttaaacctcaacccttattttcctaaccaccctaaccctaatcctaacaacccttgagatccatctttaatctaggctatggtttcttttggcaatctacatatattttaaaaagcctcctgttttctaaaattcctttttaatgttaatagcctggccactcttccattcctgggtcagattgatacctacaatgcagctagagtaatgcgctattcaagctactcaccttgatttcaggaaaaagaacgcaagtgctatgaagaatgttcaggcaaggtctgaagttaggatcattgctcacagaggggaggagctggcagctgattgcctgagctggaatggtggattcttcccccagggcaagcacaaatgctaatgagctgaaaagggctccagagatctggaaaagctccagccttcgacaggaagcacacttcaaccttgaggaggggtaagactcactggccaatcaaggtctccaggc

SEQ ID NO: 4066 - DNA, 1000 bp, mus musculus
ctgctctcagcttcagtcctctttcctgaacttgccctaggattggctgttcaatcaggtctcagctagggactttacaggtatgtatgtggaagataaagacagaaaggtgacccatttggaaggcactgcaacagtccaaacaggtgttcatggccactaagatggttgtttagctttgggaggcaaagtgaatctggtgaaagtagttcagttgcaggtataccctccagatggagctgggcaggctcggagaggtgaggtgacaactactccttttaattcattcgattccttatcctgatcatttccggattaagtggtctgcccctggggatagcttctccaactttttatcagaccattgtttgagcgcttgaaaacattaagttcatcacgtcacatgtaacattctgtattagagttctgttaactgtgaagaagcactatgacccctgcaacccttataagggaaatcatgtaattggggctgccttacaggctcagaggtttaggccattatcagcatggcagcatacagggatacaaggtgctggagaaggagctgatagagaattgtacatttggatctgcaggtggcaggaagagagtgatagtgggcttgccttgagcttttaaaatcttaaagcccacccccagttgtgtacttcctccaaaatgctgtacctattgcaacaaggctcctaagtgctactccctatgagcctatgaggccattttcatccaaaccatcaccacatacctctgttttggttctccagccttaagtagagtgtgcctgggaaggaagaccctttgccatgtcattccaggcacccatggctattcacaagctccttctgtacagggacttggtctgcattctgaaaactgggctgttcagctttcctttgctgaccacgattacttgtcaatcatgattacttgtcaataaagggaagctgatcccgactctagcttgagtgtcacatctctctct

SEQ ID NO: 4067 - DNA, 1000 bp, mus musculus
aggcaaagaccttcacccagccaacactgcccaggcaatccttgaacttacaagcttctccattccttgatttctgtcagtctaacgcaggggtcagtcccaccaacccccgcagcgccctctcaccagccctgtccagaaagctcctccaaatcagctcttcccagctcccattccatccggtccctgttccttccggaactatgcaccccgcacagaccctgggatgactgaaccctggaccaacctccatgtcagagatccaacgggagagcacagcaggaccagagtctggcccagctttggataagagccgcacatgcttactaaaagatgaactgtttactaaaagtgcagacctgtgacgtcaccgtgctgcagactacatttcccacaagtctgtgcgatggcgttgcaggagtcctaggagagtgagttgtattatttaaaggtcctggatttctacattgatgtgtgtctgcaatgtagtgtcacctacttaggaaacaaggagaccatgaactgtgtccagttctaacgagccgaatgtttatgtaaggtgccgcttttccggattttcactgtaaagttcttaattccttaatttccgtggagtttacagctatttgaggaaccacctcactgccagttaagtggcaataagctagtttgcagaaaccagaccatgcgttaatcatttcaaaagagttttacaattttctggaggagggaagttgccaggaacttatcttttagtaatttaagagcgggtgcccggcacacaataaagtttcctcacagaggacaaagagcaaaagcagggactcaggctgcttttgacattcaagattcacagcctgcggtgtctttaatcccagctcactgcaagcaaattcaggcacctctgagttccaggctgccttgtttacagtgagtccctggcctgccagggctacacagtgaaaccctgtctcaaaacaaaacaaagaacaacaaaacc

SEQ ID NO: 4068 - DNA, 1000 bp, mus musculus
ttcaaaataaaagactatggagatgttgctctcggcagagcactagcagtcagcatgacacacattccgtttttcctgttctgtgtgtggatgagacccagcactgctttcaggggcactttatgcagtgagcaatgatctgtccagacagaacaggattgcctccctcaggaagcctccctgaggccagtatatgaagaaaatgttcagggaaccaatcacattgtttcaagtcagttactaacctttgcaagcatttactgagggctaacctagcacgattacgtttccaaagttgaggtaagcaattgcaacaaatcaagcccagggttccagcattggtgcttcaagagctcaggcaaagacccctgtgtcacccaccagtgtgacttggccaatggaagtcaagtttaaggcttctcggaggaatggcctttacaccttattaatctcaataggttttcagatcattaggtctagtttctaactccaaagagcactgtatgtaaatggctctggcacatctaaaaacatgttgggcaaaatgctccagaaacttctcttgcagtctctagggtttccatgttaccatggggacatgagattcctcttagctgtacttttctctctgtgtgggacaagagcctcaaaatcaaagcaagatcactgttctcaagactgcaggaaaggcaggtggcagagtatctgaagtggccatgttcatgccagtaaaggggccacaagtactcgttctcactgaacctctgcaagacacacacatcttcctgactttcgatttccactcctctctagctctcagagcttttctctctgctcactgacctgttccttttgtacccacctcactttatctggtgatggcccagtttccaatcacaaaggcacataccaccaaagcttatccttagccatgttctcttctggctttgaacttcctgtgtacattcctggtatctgtctgttgttctgcctgacatcc

SEQ ID NO: 4069 - DNA, 1000 bp, mus musculus
tgcacttagcaaagtggagattgttgccatcaatgaccccttcattgacctaaactacatggtctacatgttccagtatgactccacccacggcaaattggccacagtcaaggccgagaatgagaaacttgtcatcaatgggaagcccatcaccatcctccaggagcgagatcccgctgacatcaaatggggtgaggccggtgctgagtatgttgtggagtctactggcatcttcaccaccagggagaaggccagggcccacttgaagggtggggccaaaaggatcatcatcttcgccccttctgctgatgtccccatgtttgtaatgagtgtgaaccatgagaaatatgacaactcactcaagatggtcagcaatgcatcctgcaccaccaactgcttagcctccctggccaaggtcatccatgacaactttggcatcatggaagggctcatgaccatggtctatgccatcactgccactcagaagactacagaagacccctctgaaaagctgtggcatgatgatcatggggctgcccagaacatcatccctgcatccactggtggtgtcaagactgtgagcaaggtcatcccagagctgaacaggaagctcactatcatggccttccatgttcttacccccaatgtacctgttgtggatttgacttgctgccaggagaaacctgccaagtatgttcacatcaagaaggaggtgaagcaggcatcccgagggcccactaaagggcatcctgggctacactgaggaccaggttgtctcctgcaacttcaacagcaactcccacccttccacctttgatgctggggctggcattgctctcaatgacaactttgtaaagctcatttccaggtatgacaatgaatatggctacagcaacagggtggtggaccggcctccaaggagtaaaaaaccctggaccacccaccccagcaaggacactgagagcaagagagaggctctcagttgctgtggagtccctgt

SEQ ID NO: 4070 - DNA, 1000 bp, mus musculus
gtgtgtgtgtgtgtgtgtgtgtgtgtgtgtgtgtgtgttaacagaaacacatacataaataaaagagactttcccactgagattgcataccaagcttctttagaattggggcacaccagaggctccctgcgtgttgcttccgcttcacaggctcttgcaagattctacatggcttccagccatttcaactcctagtgtgagatgaccacacagaatcaccagctttagcaccagtgcaaggcagtaccgataatgtctggaactagcatgtgagaacatctgggaagccaagcttggggaacttctagcccaatccacagatctttggaccccatccttcactcctcttagctaaggagcaggccaatggaatcccttcttcagactgggagttaaatatcctgtgacatcaatgacaacatccatagccatataacccatgacatcatcttttaactgtaatttagtcaatgacgttatgcagtaaacatgatggcctatgagatgcttccacagtccagggtgacctgacgtctatcattgaacacccctacaatgacttgcctctctgttggtagaacaggaggaaggcaagggtcacctatgctgtaacacaagttcttggagcttctttctccttccttgtacagctttacaccagatgtatggataagacatggctgcatccccagcttatgcctgtggtcaacaggtcactatgagcagcctgaattaccccatgtcagtttggcaacacagcatattcactcaaacatagttatagtctgggagaaaattatttaagtgttgaagaccagctcgctactacctactcacagtacataaaattccaagcaaagaaacatcaagtgtatacaggtgagaatacagaacacagttattgatgtctatgttaaccccctgcaaagaataaagtttggggcccgtgagacaggagagatccgcaattaagaatgcttcttggtcttgcagatgaccc

SEQ ID NO: 4071 - DNA, 1000 bp, mus musculus
tccatctggggtctatggtatctttctagcttcaccgagactttatgcacagatctaacagaaggcccaacagccagagcatagacttcagacaaaggcagatgcccaacctctgtgtccactcacatgcaaaggtgccactagaagaaggtagtttggccaggccaggcctcgagaaatagtttccatgtaggagcgttctcttatgttatccactgtgtttaagtaaacgtgtgctgctctctgagcactggcatcttaatggtttgtttttatttaacagatcaaatggcctgtgtgatgtcaccacaaggcatctgtaaaccccagagtccttgagacacaccacactcaccctgcagagatctttatcacagcatcctagcctcggcatcaacatttgaagtattggcatgcagaatacacaaactcgtgaatttgcatgtgatttaggaagagggagaaatagcttgaaagctgcacttcagaagaggaactgataggaaagaagagacagactgcaaggcgcacgtgctcgacacagacatgacacctcctctcctccattccacaggagcgtttccttctcagttcttaaaattagaagcctgtcttctaacccttttcccacccagtctctgggggcctgccaatagtttaagttctcaaagcaccagctctcggttttatcagttttctctattgtttaatctgtttccagttttaatttttgtggtttgattggatttttatttccttttctgtttaaaacttcttgtgaaggaagaaagtgtttgattctcagcttctcggtttttaccatcagttttttgaggctacgtgctcacctcttgctgcggctttggctgcagccaacgcagtctgatgtgttcctctaaaactaaaaccccatgtttccctccctgcacctggcatttcagtagaatctcataaaggctaacagtttattaagtgtgttctttgttgttttgtagttata

SEQ ID NO: 4072 - DNA, 1000 bp, mus musculus
caaaagcagaaaaaaagaagtttctagataaaaagacacataaaagaaattctacctggtgtaggtatttaggacccatgtcaagaggctcacaatctcgttggcctcaaggtcctctgatgcaaggtcctgcatccgagtgctcaaggcctggtggtacatgctcaggaggttcttaaagatctcatagtgaggagggaagcactggaccatcaggttcttggcaacaatgagatcatccaggacatacttcctaatgatctccaggtggcgcacaagccacatcttgtcagattctctggtgtctgcctgtgtaccttcgattctagttgtcacagttctgtccaagatggcaaacattttttctttccagtttttgggccttccaggaggaacaaacccagtttgcttttttcgatcaagtatccgcctgtcaattttttcttccctttcaatgattctgaccacggagaccagcaaggtaggatcccggcggacagtgaccagtgatctttgcagcaccatccacagctgcttagccagctcatcagagagcccctgtgtgctaccaaagtagccatgaatgagggtcatgtcccgtttgttcccactgtccatgcggtactgctcacacattagcccatcccgagagcactccagatccattagcttccggtgggcttgcaggagggccccttgctcgatgagatcttgggtctccctcacaatctcaggcactagaaaaaggtacaagttgatttggtgaaaacacagagatgacagcaggtaaagcaagagggacctggcatccatcttcccacctggacagaagccctgacagaccctaatggctttgatctatggagtctatgaaaggctagaaatcttcataaacctagccataaaaggcctgatggaaagtgagttatggttaattcagctacatgtgctttttctaaggcactgaattccttctttccagagctaaagtaggcttcag

SEQ ID NO: 4073 - DNA, 1000 bp, mus musculus
cctatcattttcccaacatatctttcatctgttatctgtctattctatatttataaacttgttgtctgtatctacctatttatctctgtcacatgaaaaagatagtgtgggggctatctcatgagcatcaagcacaatatgtagaatatcttaatctcacctcaccctgtgagatcaaaatagtctgtatcaacctgggtagtgcagaatctgaagactgtgttcaatcacctagacagtgttattcataaatgtttcagtgtatagctttgaaacgcagataattggagatcatctccttgtaacacatttcctttaatttttaatattgtaggtacttcccacttttttcaagtcagttcgttaggtgataaattagattttgttttcatagtttttatttatttgattattagtaagattaaaaacattccatgcatttactgatagactgtttggcaaatgacctatgcacgtcatgtaccaatttctctgtgagtgtttatacatgttaatagatgtggtgagcctcaaagcatgtaattgcagaaatatcagcaatgaatcccgggaatctgaaatgtttattacaaaagaaagaagagataagcacacttcaaaaactgaagagaagctaactgtatctcatggaagccgaaggaagaagaaataaaagtaagtggaatcagtggaatggtttatggccctctttatccctgtctagcttttaggcagaaaaaaattgtggatcagatttttttggctgggttggtgtccccattcctccactggaaatctttcctggttacaggaggtggccatttcagggtctatatctcctattgctaggagtcgtagctgggatcaacctcatagattcctgggagtttccactgtcctaggtttctagctcctcccagagatgctccttcccctcaggattccagttttctctcccttcatcctcctcaaacttgacccctctagtacccctctccac

SEQ ID NO: 4074 - DNA, 1200 bp, mus musculus
gaattataaaaattgacaaaagactacagagaaagcctttggaatacatggatctgaacctgcttatgtcaatacaggataggtctagagctgaagatgtttaaattagggagacttgacaagaagtttgctaataagcatggcaccccccccccaaaaaaaaggagggtcaagagttatagagaataaaaggatgactttctttggatgctgattttgtggcttcaaaatcttcactgggacatataatccttttcccttgaaagaaaagtctgtggtaaaaaggtggaaaacataacactttactgtagttggtctgatactgcctgcattctaatgctaaatactggtttctcaagatgtgctctcccctttctgcacctcccccaccccccacccacccaccaggactagatcctcacgcaaaatgatgctagatgaaccttttcccaattttaactggtcaataaaaggttagagtctgtgattgggcagtggaggaggaaagtaggaccaggacttgagcttcaagtgagggctttgcaggtagagggagaagaggaggggggaaaagatgtgtgtggaggaagccaccatggaccacatggctgggagaaacaacaagctggggaacaagttggtataactctaaatttgcccaatctacacttatggctggtaaataaattaccttgaccgtgtgtcttttatatgggcttgttaggattatatattactttcatactttaccatgtcaatctattaaaacaactgttttccagatttatagaaactgctactctttttttctagttaaaaaacaattgtaatcatctcaaagaaacagtgactcacagtacattttcagaaaggcttcagaggtttgcctctagagtaactcctatgcaagcttcaggtttcagaaaggaacttcctttaaattctgttagagggatcttcaccgctgagttttcaaacacaatgttctttgccagtcaggagtggtggaccaacatccacaccaaccactcaccaagcacctaaaaccgaagtttgccattgctgtgcctgtcatttgagagaagcaacaccaccttgtgttactgaaacttgttgtaacctagtcttcatgattgcctgcatttaacaaacaggaccaaaaagctaatcttgtaaggaaatgccaaagacaggaataac

SEQ ID NO: 4075 - DNA, 1200 bp, mus musculus
tgacctctttattaggttttccatttccaggtttgcctccatttatgttttctttattatttctacttccacttttaggttgtggatcactttattcaattccttcacctgtttacctgtcttttcctgtattttttttttccagtgagttattgatatcctccttaacggactttttttcttcatgagataggtttttaggacagattactgattttcaggtgtgttggtgtattcagggctagctgtggtgggaaacgtgggttctgatgatgcccatgcattttggcttctgttgcttattggtcttaagcttgcctttcaccatctggatatccctggtgtttgttgatctgggtgactgtatggagtctgcctcttttgtccctgggttgtttcaagtttcctggtaggcttgcagccctagctgtattagaccacctgtgaggccttccaactggggcctctttacaggggcagaaaagctgctgatctgttgtcctggctgcagtagatctcctgggatgccttcagacttttgggtattcagtggaacagtcaagctgttgttcaactgtgctgagtacagccagtcctcaactgctctgagtgcagcgagtcctctaggatgtttctggatacggattcttcatgggagcagaccaactaagagtctgccccagcagcaaggactaaatggaaggagttgtagggatggagggaaggggagtggtattgtgaaaggtgggggttttggtgggtgatgggtcctgaggtccaccaggctcctagcagcagctctgggacttgagggccaggggtggtggtgtgtgtgatggtggtggggtggttcttaccaactgctctgagtgcagcaggtcctttaggatggattgatttattcatatgttgccccttccttgagccttcatgaatgtgctgatggataaagcagtgaacggaacacagtgagtctagcatagcaatggaatctaacaatgggccgctgggcttttctgagtgagttttttgttttgtttttgtttttgtttttgtttttgttttgtttttgttttttgagacagggtttctctgtgtagcactggctgtcctggaactcactctgtagaccagactggccttaaactcagaaatccacctgcctctgcctcccaagtgctgggattaaaggtgtgcgcc

SEQ ID NO: 4076 - DNA, 1000 bp, mus musculus
taagtggatattagccccaaagtttggaataccctaaatacaattcacagaccatatgaagctcaagaagaaggaaggccaaagtgtggatgcttcagttcttcatagaaaggggaacaaaatactcacaggaggaaatatggaggcaaagtgtggagcagagactgaaggaaaggctgtctcacctggggatccatcctgtgtacagtcaccaaacctagaagctactgtggatgccaagaagtgcatgctgaagggaacctgataaggctgtctcctgggaggcactgccagagcctgacaaatacagaggcagatgctagcagctaaccattgaactgagtgcagggtacccgatggaggagtttgcgaagaaactgaaggagataaggggtttgcagccccatggagggagcaacagtgtcaactggccagaacccctggagctcccaacgactggaccaccaaccaaagagtgcacatgaagggacccatggctctggctgcataagtggcaaaggatgaccttgttggacatcagtgggaggagtggcccttgggcctgagaggggggatcccagtgtaggggaatactagggcaggaaggcaggaatgggtgggtgggtgttggaacaccctcagagaggcagagggagggtgaatgggataggggggttctggatagaagacctggaaagggggtaacatttgaaatgtaaataaagaatatctccaataaaaggaaaaaaactatagcaggataaatttaaccttctataatccacaaatgagtgtttctgctaatgaatcattactgccctttccctccagttcaaatctcaagttatcacagtctcctatatggcttttctctcctactattagttcacgcatctcttggctcttttcccattgatcatctctctatccctatctgaaatcagagcctcacaacttcttgctggatactagcaatgccctgcctattagtgtctacagt

SEQ ID NO: 4077 - DNA, 1200 bp, mus musculus
ctttaagggatttttgtgtttcctctttaatgtcttctacttgtgtagcagtgttctcctgcatttctttaagtgagttatttaagtccttcttgatgtcctctaccatcatcatgagatatgcttttagatcagggtctagcttttccggtgtgttggggtgccctggactgggagaagtgggagtgctgggttctgatgatggttagcggtcttggtttctgttagtaagtttcttacgtttacctttcgccttctggtaatctctggagttagttgttatagttgtctctgtttagagattgttcttctggtgattctgttagcctctattagcagtccttgaggcaggcttcctcctctgagtttcactggtcagagcactctctgcaggcaagctctcctcttacagggaaggtgcacagatatttggtgtttggacttcctcctggccgaggatgaagtcccaaaacaggacctttcccagaagctgtgttgctttgacgggtcacagaagctgttagcttctatggtgcacactctcacctgtgcagactatgtttggtggagttccagaaccaagatggctaccgccaatctagaggcaaaagcctactgggccgggtggacacctgtcctctggccaggaaggtggccggatgtctggggccctaaaagggtgctgcctcagtagctctctggctcccgcctgttccagaagctgtcagcttctgtggtgcacactctcacctgtgcagactaagttcagtggagtcccggaaccaagatggctcccgccgatcctgaggcaatgggctcccgggctgggtggacacctttcctctggcctggggggtggccggaagtctaggggccgaaaaggacgctgcctcaaaggctctgtggcacccgcctgtcccagaagctgtcagcttctgtggtgcacactctcacctgtgcagactaagttcctaagttcggcagagtcccggatccaagatggctccatcagatcctgaagctaagggctcccgggccgggcagagacctgtcctctggccgggagggtggtggtcggatcacctgaagtctttttttttttttttttttttttctgtgttttagtatttctttcttttttttttttttttattattaggtatttagctcatttacatttccaatgctataccaaaagtc

SEQ ID NO: 4078 - DNA, 1000 bp, mus musculus
tcagaaaattacttggttaattgaagaatgaaaggatctatagaggagatgtttatattagtctgtttttttattacatattttatttacatttcaaatgttatcctctttcttggtttcccctttggaactcccctatctgatccccctcccctctgcttctatgagggtgctccccaactcaccctcctcccccctccctgccctgtcattcccctacactggggcatcaagcctttccaggaccaagggcctctcctcccattgatgcccaacaaggccatcctctgctacatatgcagctggggtcatgggtcgctgcatgtgtactctctagttgttagtttagtccctgggagcttggggcgggggtggggggagagtctggttgatattgttgttcttcctatggggttgcgaaccctttcagctccttgggtcctttctctagctccttcattggggaccctgtgctcagtccaatggttggctttgagcatctgcatctttaagtgtcagcctctggtagaacctctcaggaaacagctatatcaggcttcttttagcaagcacttcttggcatccatagtacctggcttgatgtctgtatatgggatggatccctaagtgggcagtgtctggatggtctttccttgggtctctgctccactttttgtccctgtatttcctttagataggaacaactctgggttaaaatttttggcatgggtcgatggccccatccttcaaccagggactgtgcctgacctctggatatggtcctccttctcctttattgggcatttcagctgatctcatctttgttgggtcttggtagcttcttgcttttctttcatctggaactgtgtttttcaagtcactaaatatatatcgccaactacctagcattcattaaagacattatcattttgtcaatacttatattcttacttgaatagtttgcagcactattcaatacagaaaatgtttctgcttagtt

SEQ ID NO: 4079 - DNA, 1000 bp, mus musculus
agcttcacagatttttgcttatttattatatatattatgttatatataacagataccttaagggagggagcattttacattagtgtgctatttttaatatggatattgaaagaaaaatccaatattttaaaataatttgtttcaatatctacagatacaagtaaataattatacatttgtagctataatagcttttatttgtaagtcatcaaaatcactttaaaattaactttttaaagacactaattttagctttgtaaatgaaatttgggattagggtgtatttaaggctattttttaaatgaacttaagatgccaaattgacagatgaccaatgtgtcagtcctgttttgcctgtccttcttgtcacacactggtggatatttctccacttttgttccactttaatataaagcacacagatgtttcagaacaagacttgacttctgaccttgaggccattagggtcagggtcctcggggcctgtgaaattatcacaagctgagctaaagtttttctccagcacaggaagtaactagtaagtaagaagttaaaaaggagctttgtctgagagacaagatggtcccagtaagggtcagcttctgtagtctgctgtccctgtaggaggccatgcatgggaggaggagataatgtaacctctgcagatctgtcagcctggagcagagctgagaagtctatttaatatgaaataccttgcttacatcttaaaatattaatgattatcatttcaaattcttgtatttgatacttgtgcaacaaatgattgcagttgtaaggcaggagcattacgatgcaaactgaagagagagtgaccccatcctaaagagcaacttacaagcaaataatacttgcactgctgtggtcttcactgtaataaacgtgataacatggagcttcactaggtttttatttcaaaatgctttttcaaagaaagcgttgggacagaaaagcaagctctatgatgcttataagcttgttt

SEQ ID NO: 4080 - DNA, 1200 bp, mus musculus
tcactcaacagcctttattttttattaaacattttgttcatttatatctcaaatgatatcccatgtacaggttacccttccaaaaatctccatcccacattttccttttcctccctcccctttgcctctatggaggtgatcccctatctacccaccctctcccactccaccactccagtatccccctaccctggggcatcaaatctccacaagaccaggggcctcccctcccattgatgtcagacaaggccatcttctgctatatatgtatctggaaccatggatccctcctggtacactcattggttgacggtctagtccctgggatccctgggtggtctggccagtcaatgttcttccttggggttgcaattaccctccactcctcaagttcttctgccagctcccctaccgaggtcctcaagttcaggctgatggttggctctaagcatctgcatttgcattggtcgggtactggcagaacctcccaaggaacagccataccaggttcctgtcagcaaagaaggttccaggatggccctttaaagcagtaattctcaacctgtaggccaagaaccccaaagacctttggaaaacacagatatttgcattatgaatcataacagtagcaaaaattacagttataacgtagcaatgaatataattttatagttggggtcatcatagtatgaagaactatattcatagcattaggaaggttgagaacctctactctaaagccataacctatcacagtggacctctaaggctaaaatttagaggcccgtgtaaatgccatccaaaagtgctaagagtggcactcaaggcatgcttctcactgaggttctgtgccttccttgtgtgaagccatgagaacacacaagtaatttggattagagtgcagtaccaatcactgtcatttcttctctgtttcattatggacttcaatgagtaaaagcatcactccttcaacatgctcagatcagtcctaaacatccatgaacctgtatatctatcttgtaacatctataattccttggcctcacccacaggcacagcacctgtagaaagataaaaacatgttcaactttctccagtggtagaaattctcttcttgctttttttccactgaaaaggtgtcaagagtggtttataattataaatgttcatagactttccctggcatcaaaagtatggtgt

SEQ ID NO: 4081 - DNA, 1200 bp, mus musculus
gtcatttttgtttctaaaatagtaatttttcattggaaagcacttttttattaaagtaatttattttttacactccatattgcattccctgtccccctcccccaaaccaccctccaactgctccacatcctatatctccttcctaccctactgtctccacgtggattccccgaccccccaccccacctgacctctaaactccctggggcctccagtctcttgaaggttaggtgcatcatctctgaatgaacacagaccccgggtccagatgaattgagactgctggtcgtcctaaaggatttacttctcctcagcttctttcagccttccctaagtcagccacaggggtcagccgcttctgtccattggttgggtgcaaatatctgcctgtgactctttcagctgcttgttgagtctttttgggggcagccatgttaggtcccccaaaaagcatgagtattccatagcctcggtgatagtgtcaggccttggggcctccccttgagctggatcccactttgggcctgtctctgaaccttcttttcctctggctcctctcgatttccatccctgtcattcattcagacaggaacaattgtgactatgggatggcaaccccacccctcactacatagcctgtcttcctgttggagttgggctctttaacttccctctcactactatagggcatttcatctaaataccctccctttgagtcctgagagtctctcacctcccaggtctctagtgcactccggggtgtccccccaacctgttatttcctgaggttgcctgtttccattctttctgctggccttcaggacttcagtcctttttcctcacccaataccaaatcaggttctcctctccctcatccaacctgtccactttccctcccagatccctccctcctcacttgtgtttgctttcttctctctcccaagtgggactggggtgtcctcacttaggcacttcaggttgttgacctttttgagttctgtggactgtatcttgggtattctgtacctttttttggggggggggctaatatctacttattagtgagtacataacatgcacgtccttttgagtctgagttacctcactcaggatgatattttctagttccatccatttgcctgcaaaactcaggatgtcctgggtcataatagctgagtattaattattccactgtgtaaa

SEQ ID NO: 4082 - DNA, 1000 bp, mus musculus
agcactgctgggagatcagctccttccaggcagaatctggatatggagagctgtggcacagggtcagccctggagcacagggtcagccctggggcacagggtcagccctggggcacagatggaaaccagaatgattgggtctctggctgttccttggttcctgtgtcctgatgtctttggatgggtccctcttgggccaggtatgtgaacagaagtggtggtcttacctgtgttctcaggtgtgttagcactccttggaatcctgctctcccctgtcaggatctaggtatggagatctgtggcacagggtcagctccaggagcagatggaaaccagaaggctgttggtgagattttatgtgtgttgcttttgacatcactggaagacacaatcacacagcaaactttctcatcttatgacacttataatctttttttataatagatgttttcttcattttcatttcaaatgctatccccattcctagtttcctctccaaaaatcccctacaccctcccatctccccctgctccccaaaccacccagttccacatcctggccctggcattcccctatattggggcatagaatcttcctaagacaaagggcctctcctcccattaatggctgactaggccatcctatgctacatgtgcagctagtgacatgagctctggaggtactggttagttcatattgttgttcctcctataggactgcagatcccttcagctccttaggtactttctctagctccttcattggggaccctgtgttctacccaatagatgactgtgagcatccagttctgggatccactatgaggcactggcattgcctcacaggagacagctatatcagggcctgtcagcaaaatcttgttggtatatgcaatagtgtctgggtttggtggttgtttatgggatggatccccaggggggcagtctctggatggtccttccttcagtctcagctctgaattttgtctctgtaactctgt

SEQ ID NO: 4083 - DNA, 1000 bp, mus musculus
caaataataagagctttgtacgactcaggagcacaagagaacaaagaggaaataaagaggaagaaaataaagatagaagctagctgaattttggtgctttcaagattcagatcctgatgttgaatatgcaagtgtggaatgtatttgtttaatttaaagcatgtagtttcattcagaaacccaggaaaaaagctgccgagtgctggacgtcaattaatattcttccaaatgactggcaggaagccacagtggacgtctagtcagagacagtgtgtcacactactgttgactgtaaaattaattaccatttctaaacacgaactctgtggtgcatattcttctggcatactatacggccctcctggcattaaaggttacaaatagttattttttttaaagtactctttagagaactcacaagtgaaaatattaacaatcccaataatgacaaaaaacacactgcatggtgaggcaagtcgacattgtgaaaacagggctgaatattaagaagtgtcacctacctaaagtaagtgttagacattcacatgatggcatcagctgctgatccagggcatctggagctgccctgtcaccaaggcattgctaaccaaggcagggacacagacaaagctgcttcatcattaatgtcagtaaaaggatctggaggaaaaatagagtctctggagaccttgtctggacttcttggagcccagacaacagtttttttttttttttttttccaacaacagtcttttccaaccttggagcagctgcaacaaaaggaaaaaggagagcattgactcaagttgtcactaagttcaaagaggtgagaatagtcatctgtggtgaacctttataggcagagttattaattgggaattcttttttatggctttttgaaaatatcacatttatgaacagtgttaaattatcctgggttattgtttgacatatgttgaccagtcaggttcaagctgataaaattaaaatctatcattgt

SEQ ID NO: 4084 - DNA, 1400 bp, mus musculus
attgacccttcatagtttatctagggttgctttcatgagcatgggtgcagagttatttactcaagcatgggcaaatgaccatccttgaggaaaaataactcactctcactttgaagatattaatgcccaatagcacctcagctagaggtgagctctatgagcctctcttccatccatactggaatgttgatagacttgatattgtgcaggctttatgtagataaccacatgtaatgtgagctcacaagtacagcagtcatgtcatgttaagaagattgcatttcatagcatatctctcttgttttaaagacattttctttatttacatttcaaatgttatctcctttcctagtttcccctctgaaaattccctatcccctcccccaccccctggtccacaacccacccactcccgcttcctgtccctggcattcccctatactggggcatagaaccttcacaggaccaagggcctctcctcccattgatgaccaactaggctatcctctagtacatatgcagctagagccatgagtcccaccatgggctttctttgattggaggtttagtcccagggagctctggggatacaggttagttcatgttgtttttcccccaatggggctgcaaaccccttcagctccttgggtactttctctagctccttcattggggaccctgtgcttcatccaatggatgactgtgagtattcacttctgtatttgttaggcactggcagagcctctcaggagacagctttatcagtcttctgtcagctagatcttgttggcatttgcaatagtgtctgggtttagtggttgtttatggggtggatccccaggcagggcagtctccagatggtcattccttcagtctctgctctgaactttgtctctgtaattccttccatgggcattttgttcctccttctacgaaggatcgaagtaagcacactttgttcttccttcttctaggggagtaaaaaactattctcaacaataagagagcctctggtggaatcaccatgcctgatctcaagctgtacttgagagcaattgtgataaaaacttcatgggactggtacagtgacagccaggtaggtcagtggaataagattgaagacccagaaatgaacccacacaacaatggtcacttgatctttgacaagggagctaaaaccacccagtgcaaaaaaaaagacagcagtttcaacaaatgatgctggcacaactggtggttagcatgtagaagaatgtgaattaatccattcttatctccttgtagaaagctcaagtctaagtagatcaaggaactccacataaaaccagagacactgaaacttatagaggaggaagtgggggaagagccttgaagataggggcacaggggaaatttttctg

SEQ ID NO: 4085 - DNA, 1400 bp, mus musculus
taaaaataaaatcataatatagaaagagacatgggctgttgctaaggcaaaaaatataatttatagctcagaacttcttgagatacttctaagaactgtacagcaaacaaaacctctattgtttataatcttatagtcttgtcaccaaaattgctagacacaattaaaattatactgcaaagaggacatgtaataatatgttaccaaaagaattcaggtctatatattttctaaatgtgttttcatccgagcctcacagctaatgaacaggcataacatgggctcaagagatttaaaacagtattaacactaaactacagatgaatttatcatgttaattaatttttaaaatttctcatttttatttttttatttttttttttaaagatttatttatttattatatgtaagtacactgtagctgtcttcagacactccagaagagggagtcagatcttgttacagatggttgtgagccaccatgtggttgctgggatttgaactctggaccttcggaagagcagtcgggtgctcttacccactgagccatctcaccagcccaatttctcatttttaattgatcttatttacattccaaatgttgtgcccccatcctggttccccttctcagagttcttcaccccatcctctctcccctttgcttttaagagggtgctcccccagccacccacctacccacctttacctcacccacttccttggagcatcaagtctctacaggataaagtccatcctctcccactgagaccagacaaggcagtcttctgctacatatatttctaggaccttggaccagcccatttatggtttttggttggtagcttagtttgtgggtgctcacagggatctgggttagttgacactgttgttcttcctatggggttgccatcccctttaattctttcaatccttcctcctctttcctaagggtccctgacctcagtacagtggctggctgtaagtatctgttttatgtttttatattacatcatttttgcaggaaagcacataatatattcatcatttcaattgactaagctttatatgtcttagtggaaaattaaatgcctaaaaatcaagccataaataaaatacgtggtttaatttaatgcatttcccagcataatgtaaatagtgggtttaggcatccagctgtcccattcagttttttacatttcaaatggccactttatacatttcaagtttttgtcatttgctattgaaagccaatcctatgcttttttaaacaacaaagaaaaaaattcacacttgattcttaaattgtgtttacttccaaagaattattatattttcaactcgtttgcttttgggaatatcaaataaatccaattattttataacagaatttttttttccat

SEQ ID NO: 4086 - DNA, 1000 bp, mus musculus
taaagccagctactgtgtcattttggctcattttcttgacagtgccatcataaatccatgcagctgcggggtaactgtcgactgcctcgattatcttcatagccagaatgaatcttgaaatgtgtgtaacaggcaatgactgttatggatcaggcacaagggccattcccaatccatcctgtcagtcctgtgaagcaatgcctcctacaaagacagttcctaaactactgtcatgtaactgagtaaagtacctgaactttgagaaatattgaggttttgctagggaaccatgagccatgtccagttactacaggaaccttactataagaccacattgatttctaacgggacatttttgaaggtaaatagcacttcttgacattagatatatgaggacaatgactatttaaggagataaaattgcaattatttgtttgaggaagagaaggcacttgcctattttcatataacaacacagaaggccctgttaatctttgttacagttttcttttaactttggactgagttctgataattccttggccatgcagaattgcctaagtgctgaagccaggttgctcttgggctttcacccaggaggttccacatttgtcttcatccagtgaattcttcataatgtcatttttctttgcaaaaatgttaacccatttttaaagaaaccatagagtatagttgtactaagttgcccaataactactaagtgaatgtatttaatatctcaaatgctaaattttcatcaattttaaaactaatctaccattctcacactataatttccagttacagtgtgtagaaggcctgctcttaatgattagtacaagtctaatggaggtaggtcaccagcaaatatctccactttgactttgtagtgaaatttttcattcatttcttagacactacctcatgaagaaatactatgtgattaaattactattctgcacaagatttgatttattaaagaatttttgtacaaaacaat

SEQ ID NO: 4087 - DNA, 1000 bp, mus musculus
aaaatatctactaaaaatgtcttggaaagataaggaattcaaggtccatatctaagcataataaaagcaatatatagaaaaccaatacccaatatcaaactaagtagagagaaacttgaagcaatctcactaaaacagggactagtcatggctgcccattctctcccaggaaagttctagcaatagaaattagacaacaaaaggagatcaacgggatacaatttggaaaggaagaagtcaagatattattatatacacatgatatgatagtatacttcagtgaccccaaaaatttcaccagagtacacctagagctgataaacaacttcagcaaagtggctggatataaaattaactcaaacaaatgagtagccttcctctatttaaaggacaaatgggctgatatagtatcccaccccatgggatttagttatttgtgggtgcaagggggacctcaaacctggaagaaaatgggaggaagggaaggagaagcagaataccatgcaaatagttgtcaaggtctccttaggctgagatgcctggttttaaagcatacatcacagggaataggagaggggttgagggggaattaaaaaagaacaaagaggtgggcatctgctgacatgagggccgaagtcaggcgccaggcagtgggcactctgtgtcttatctccggaacatagatcctctttaacagccttggatatcaggccgggctcaggtgtaactcatgtccttggatgttgtgggaactcaggaagagatcaggaagaggggactataattcagcttttacagcctcaggtgccaggaaaggaacagggaggagggagtgacaactggctcctatcacgaggtcatttggcctgtcagggtgggagattgtgagaagctcgctatctcacggtatagtctctgacaatatagaaattagagaaattacaccttttaaaatagtcacaaataatataaaatatcttggtgtgactctaaccaagca

SEQ ID NO: 4088 - DNA, 1000 bp, mus musculus
aatgtgtagcatataaatgttttgctatattgaagaattaatgaatgtttataaaatttaatttttggagaaagtttgcttttctgcatagtaaaatttatgatcagatatattcagcactataaacctgctttaccatttctgcacaaaattgacattcaaccatgttctaacagctcagatactggcaacgtctacaaagatgccactggaaaatatatatagtgcatacttttcatttctttgctgtcagggtaacatgtgtacttcatatgctttagtgaagtctagcagtacaaatgtgtcaaaatatcataaaaaaattgtcttctatgactaacattaaggatttaggaccatgccttttgggacatttatgttttagaaggaaaagataatgtattcttgaacaaatgcatatacataatgtttaacacacacacacacccttttgggaacataacaaaatgacattagctgaagttgccatactctgatgtttctaggattcctcagtatttgtttttttgtttatttgtttgtttgttttttgtttagttgtttgttttttctcattcagtcatcatactaaagtagactggaaagttataagatatttaaaaattgtacttttcgatattgagatatttcttcagatatttaaaaattgtattcaatatggggaaatacatatattttatattatataaacttatattcaggaaaatgaatacttttttaactgagatgcttttattgagtgagacagaaaatgaactgtttactgttatcaaaaatgtagtaactctcataaatgggaagttgaagaaggaaactggtgtgagacagcaataggaatgagattagcaattatgctatggaatctttgcttagctcctgcctcagctagacaccatttcaaactcctgtttgacattcttgccatggccatgaactgctgtgggcctcagaaccttgtataaaggttgttttctaagtt

SEQ ID NO: 4089 - DNA, 1600 bp, mus musculus
gttatgtaatgcaaactgatgagttgccccaagatatcatgatccaatattactttaaaaaatttgtcctgatgaaaaagactacaatggagaatctgtggataatattttctttcttcttatagttaattgtatgtgattgagaatttctaagtagattaactagcagtcatttccttctaaagagtgaaatgtgcttgcagttgcttgcttatcagtgtttattagtgatttcttattttttaaactttcttttttgttcttgtttctttattcctccttttaaaatatttttgaggaaataggtagaaaatattgatgtttctacaaccagggaaactattacaagaaatttaagtacttcaaatcttaatggctcaaaaattattactccttttattaataagatagatgagtcatagttttataacttgctcagatatatgcagctagtaagtagtgacttcagaattccacttcatattccaaattacttcagaaaccagttctctatcttacatgtaataggtaagcacttacagatatatatatatatatatatatatatatatatatcatatatatatgattcaataaatattcatgtctaagatttttcatgttctatgaaaaattataggttttagaattagtatttctatttttcttttttatgggggaggggcgttgaaacagggtttctctttgtagccctggctgtcctggaactcactctgtagaccaggctggcctcgaactcagaagtccgcctgcctctgcctctcaagtgctgagattaaaggtgtgcgccaccactgcttggctcagtatttctatttttaaaatgtctatagcaaatagtgggatgtacatatatagaacaaaattctatttctgcagatattaaaatttatttgtgtatatattgtggtttaaataagaatagacatcatatgctcatatatttgaatgtgtaatacccagaaagtagaactctttgaaagtattagaaggattaggaaatctggccttatggaaagaagtatgccactgggttttggagttgaggtttacaaagcctattttagtcccattctctttttatttatgctttttgcggatcagggtataagctacttctctagcaacctgtatatctgcaagcggccatgcttatgctataatgataatttacaaaacctttgtacttataaccaagattattaaataactatggaaaatgtgttcaacagaattacaatgacatcaagtaggacaagactgtagagaataatattacaaaatacttgccacatagcaaaaataataactcctatccacatcttccacttgatggttttgggaaaagacagctataactttgacaggatgagtaggaataccagataagaatggattatccagcctccactgtacagttactaaaaagtgtataacatactctgttgtcacattaaatctataatgggcttcttgaatctggggaattatttactacctaaaccagtatcatagaacaagttttatcatcatatttctgaggtactagcttaattttgattgtggattaaaagttttc

SEQ ID NO: 4090 - DNA, 1200 bp, mus musculus
caacactatattcagcaccccttcctgtctagagtttgagtagtatatggattaccttcaacccctggacacacatgagccccactgtagggttctattgttctgttggagtgaaatcgatgtgaatggctatttttttttattagatattttctttatttacatttcaaatgttttcccctttcctggtttcccatacaaaaaccccctatcacttccacctctcaatcctgttttctggccctggcattcccctacactgaagcatagacccttcacaggatcaagggcttttcctcccattgatgaccgattaggccttcctctgctacatatgcagctgtagccataagtcccaccatgtgtactctttcgttggttgtttagtccctgagaactctgggggtactggttagttcatattgttgtttctccttggggctgcaaactccttcagctccttggatcctttctttagctccttcattagggaccctgtgctcagtccaatgtatgactgtgagcatccacttctgtatttgtcaggcattgacagagcttctcaggagacagccatatcaggctcctgtcagcaagcacttgttggcatccacaatagtgtctgggtttggtgattgtatatggggtagatccttaggtagggcagtctctggatggcctttaacaaaagaacacacaagatatgcattcactaataagtggcatttgtccagaagctcataatacccaaaactcaattgacaaaccacatgaagctcaagaagaaggaagaccaaagtgtgaatacttcaacccttcttagaaggggtaacaaaatacccatggaaggagttacagagacaaagtgtggagcagagactatttttattcattgactatgctctgagaagtctagtactagttacattgtcatattgctagggtctacttattaagtctatcaaataccaaaatatcttgtcagtagcacagaattatagaatatgccctacacatcctgcctaaacacaactaaaatttctgataaaaatttaaaataatcagagatcattttaatccattttgtttacatactacccgatacaatttgataccatatttggcatatgtttgcttgcttgtttggctggctggttggtcgatagcttttacacctttaaaaatgcatttaaaatatag

SEQ ID NO: 4091 - DNA, 1000 bp, mus musculus
cctcggggccatggctgtaggagaaagagggtagtgggagagaacacacactttccatgtggccccgaatagacatctggctgttttaagccactgaccccacatggcacgtggtagacaaggagcagccccaggtaccaggttctcagactctggcatcccacactgtatatggcagatgacctgagaacagaataggggccccgggacagcacttggccttggacatgaagggagagaaaagcagggaagagaagggggcactgggtggttcccaggcaggcgagagtccttagtccagtccatggctacagcgtaggaaggccttctggctggagtttagactgcagctcattaggagaaagcccatctcatccatccttcaagtatggtgggccttgatgaatagagacagtctatggttttagagctttattgtagaaaggcagggagaaaggagagaaggtagaaagagagagagactggcaatagccatgtggagagaggggggaagggaaagaaaaaaacaagagttagagagtaggaaaggtggaagcttaaagagagagaaaggtggggccaagcagcccctcttatagtgggctgctctatcttgctgttgctaggtaactgtgtgtaggagtctagccaaaatgccagaagcttggcttcaaattgtctacctgactgatactcacacgcctcttctgtagtggttgtgggggtgttaactttgataggagccaggagcccaggagacatgtaggtggaaattaccacccatggggtcccactggggtccaggacctaatttcgactggagaccagtcggtctgtgtatagcccatggccccacaaataactacaggcaactgaggaatactgagaactgaagagagagttgattatccaacactaagtagttatctctgaaattatatataaataataggggagctgaaggaaggaaagggaagggaagaatgtgatataatctcat

SEQ ID NO: 4092 - DNA, 1400 bp, mus musculus
ggtgatgcttgcatctatgactcctaatctctttcctaagttttctatctccagggttgtccccctttgtgatttctttattgtttctatttccatttttaggtcctgaatagttttattcaattccttctacctgtttggttgtgttttcctctaattctttaagggaatttttgtgtttcctctttaagggcttctacctgtttacctatgttctcctgcatttctttaaggaagttatttatgtccttcttaaagtcctctatcgtcatcatgagatttgattttaaatcagagtcttacttttctggtgtattgtggtatccaaggcttgttgtggttggagaactgggttctgatgatgtcaagtaaccttggtttctgttgtttaagttcttgcccttgccctttgccatctggttatctctggtgttagctggtctcgatatctctgactgtgacttgtccctcctggaagcctgtgtgtcagtactcctgggaaaccagttctctctgggaggaatttgagtactgagaactgagtcacagggttagcttcagggtgcagacagaaaccagaaggatccaatcccaggcttttccttacttcctgtgtcctgatgattctgggtgcgaccctctcgtgctcagaatttgaactgaagtgtgtgctcacagatgtgttgacactcctgggagaccagctctctcctggcagtatttgggtatgtagcagtgtggcaaaggattcgcttgggtgctgtgtcacagcatcagccttgggcacagatggggtaaggcaagttgtgagagttattttttgaacttgtgaattaggactagagagatagacatcttgatggttaagggcacattcttctcttgtggaggaccgggcttcatttcccaccatccatgagggactgttcaccatcctttataattccaggttcagggtgtttcatgcctctggcaactgagaacagcctccctgacaggctcctgcaggtagttcaagaacttgtgaattcctccttaccatcttctcttcttcctgttctggacactgctgcctttcactctaatccagcccatgtctttcctgaaaggtatgtatgaggaagagttgctctagtcctccctgacaaactcaaccacctcactacagtgtggaagaaacctgtggagacaaaatgaaacagatattattgtattacaaattcctttcattttcctgaatagcaatttcttgtcattatatacctaattgtttgtcttagtcttttcttttaaattattataagtaagaatcaatagaattaagtaaatatattacttaatttattacttggaatggaatttttttctggttagtggttgtggtcggtgtcacagatttt

SEQ ID NO: 4093 - DNA, 1200 bp, mus musculus
aatagagtcagacaataccagactttggagttcaaggtgataaaggagttaaaaacagctgttgcacaatatggccctacagctccttttacacaagcattattggatactgtcatggagtcacacttaaccccccccccccccaagattggtagactctatgtacagctactctgtcaggaggagatttcttactttgggattctgaatggcgagaagccagtaagaaaactgccgctttaaatgctcagacaggtaatccagactgggatattaacatgcttttaggagaaggtcgatatgaaggcaatgctaatcagattggttttcctgttggagtgtacgcacaggttgatatggctgcccgccacccttggaaacagttaccaggtaaggggatcttggtggaagtttagccagcactcgtcagggtcctgatgagctttaccagaactttgtggataggctactaatagcagctagtaggattcttggagacactgacatgggaagtcctttcattatgcaattgcttacgagaatgccaaagcagtgtgtcacgctgctatccaaccacacaaaggacagacggatttagcgggatatatccatctttgtgcagagattgggccatcatataatcagggtttggcttttgccacacctttgcaaggaaccaatgtacaagcaatgctttcacagaaatgagggaattatgcatgttttaagtgtggaagtttggatcattttaaaaatgactgtcctaagaatagaggtgctgagagtgggcaagcaggccgtgctccaggagtttgtccttgatgcaggaagggcaaccattgggctagggtgtgtaaatccaagtcagacattccaggctgtccattgccaggaaatgagaggaggggccagccccaggccccaaaatacccacagcaagcagcttatggggccatgaagctgttgcccagccaaagaaatccgttttttaacttgtcagggcaaccccacgaagtgcaggattggacctctgttccaccacccacacagtattaaccccagaaatgggagttcaaactctgcctacaggagtttttgaacctctacctgcagaaacttgtggatttcttttaggacaaagcagttctattgtaaaaggtctgcagatttatccaggtgttatagataatgattatgagt

SEQ ID NO: 4094 - DNA, 1000 bp, mus musculus
tcacgagagcttcttggaccatgagctttcctgttatggttcccatccatcaaggctaagaagataatgtaataaattactaaaacccttccccaaacaagtcctgcttgccaagcagttcataaaagaaagtagctgccaccatgagcccttgactcaagattctattatgtttaacaaagaatcatgcagaaactttaaaaattaacttgtacctcaaaatgtaatagtaagtgtgtttattgtagttttgggggcacactgagcaacaggtatttatgctagcgctggctttaaatttcatcttttttacattgttgctgtaggtgtgataggatacaggctaagttgggacagtgttgacctggcgctgattccacttaggggttgacagccgaaaatgggattagaaaattctaaacaggcatttgtctgcagtcttcaagagctgcttcaggtgagaagagcagcggaagttgacataacaatagagccatctaaatgggaaggctacaccccaggtgatctcatattcagtggcagcaaagtctgaatcagcctgcttcaaggctgagggaggctacagggagctgtcttttttttttaattagatatgttcttcatttacatttcaaatgctatcccaaaagttccccatgcccttcccccgccctgctcccctacccacccactccaacttcttggccctgtcattcccctgtactggggcataaaaagtttgcaagaccaggggcctctcttcccaatgatggccggctaggccatcttctgctacatatgcagctagagacatgagctctaggggtactgattagttcatgttgttgttccacctatagggttgcagaccccttcagctccttgggtactttctctagctcctccattgggagccttgtgttccatccaatagatgaccgtgagcatctacttctgtatttgccaggcactatagaccctgattgttattttctagaaa

SEQ ID NO: 4095 - DNA, 1200 bp, mus musculus
taagaatatgcaggtagataacgtatttatgaacatcaccatgatattgactctaatacctttatcaagaaatgctgaaatccatctatagcatgactcaccttctgcaaaagtaagaatgtctccagcacccataaaatctaaaccttcagtagccgttccaccaacaacgcgccattcgaccatgacctgccccaggctgcctcctgtcctgtagataaccagttccacagaagtttgtggctgttcctgcacttccacacataagccatcttccgaggtattgggactaacactgtagataatgaatactccaaaggcatcgccattcagtcctatgaccacagcggaagtattcggatgtcctatggttggctggtttttaaaactgtctgagatgttcataaggtgaacttcaaggagagaaattaggaaactttcatccatctcgggagcatcgtcaggaagtacagaaacagtgagatttgcaaactcatcaccttccagtatcacggcccactgtcttgtcacaggctcgtagtcactaccagcaactgcctggccactgaaaagagaggccaccctagtcatgttcttcttgtaggtttggaagtcagagctgttcacagttccgctgacccacgacgtcatccagaagcaccgagggccctcggcaccactgacaactgaaaacgctgagcaggcacgttctttgagacacaaagtggcacaggtatactgtgtctcctccactgcagacacgttcacccaagttctccagagtgggtcgggcaccccttgagtcggtgattcatagtaggataacacatcttcaccttcctcaactgcacgagccactacatcaatatcagaagtaccatagcacaacagcaggcgaccaaagtgtcctccgctgaaatgtgtgggcagtgggaaagcggttaagcactcagactgatgtgggaactgcacacacacagagaacaatgctgattgattgtggttttgagaagtgttttcttagtaatattttaaacactagtactaatacaaccttatttcttaattatgtttgtctttcaacactttattttctggtgtcaactatactgcctagttttcaaccagataaggctcacttgtactcatgctctcgaaatacattgcaagttaggcaagttgtatccatctcagagttcc

SEQ ID NO: 4096 - DNA, 1200 bp, mus musculus
ctttaagggattttttgcttcctctttaaggtcttctacctctttagcagtgttctcctgtatttctttaagtgagttattaaagtccttcttgatgtcctctaccttcatcatgagatatgctttaaaatctgggtctagctttttgggtgtgttggggtgccctggcctgggcgaagtgggagtgctgggttctgacaatggtgagtggtcttggtttctgttagtaagattcttatgtttacctttcaccatctggtaatctctggagttagttgtcataattgtctctgtttagggattgttcctctggtgattctgttagcctctatcagtacacctgggagactagatctctcctctgagtttcagtggtcagagcagtctctgcaggcaagctctcctcttacagtgaaggtgcacagatatctggcatttggacctccctcctggcccatgatgaaggcccaaaacaggacctttcccagaagctgtgttgctttggcctgtcacagaagctgttagcttcggtagtccacactcacctgtgcagaccactttcagcagagtcttgtaaccaagatatcttcctccgatgctgaggcaaacaaagccctccagggccgggcagacacctatcctttggccgggaaggtgaccagatgtttggagccctaaaagggggctgtctgaaaagctctgtggctcctgcctgtcccagaagctgttagcttttgtagggcactctctcacttgtgcagactactttcggcagagtcttggaaccaagatggctcccgccgatgctgaggcaaagccctcccgggctgggcagacacctgtcctctggtcgggaaggtggccggatgtctgtagcctgaaaagggggctgcctcagaagctctgtggcacctgcctgtcccagaagctgttagcttctgtagtgcacactctcacctgtgcagactacttttggtggagtcctggatttctgtgaattatggatctagtcagcaaagagccagccacatcaaccatgacaggatatttattatcatatttcatattatcatatttactatcgtatttcccttattaatctacttttttctcctgtggttgactatgagttgggcacaagcatgctccaaatttcagttataactattatgaaagataagtttttggaaacaaaatgtg

SEQ ID NO: 4097 - DNA, 1000 bp, mus musculus
gaaaaatcaccgagttgatcttcagacccctttaaacacatgcatacaacagccacagagtttagaacctttgagccttgtaaataagggacttaatgatataaaaatcacggacacatccctttgatagcctagtgattctagtgcttgggtgagaaaacttcactgaagtgcttgcagccacattcctggtcaacactgataatattcctagtttactgatcttatgctcaaaaataccttgtaggcaaataattctgaagtgtgactcttttaaagttaatgacgacaagatgcagagagttaacaaatggatattcagaatgtggaattagccagtacttctccagttttaaatgtggagacataagaggcttgctgtcctgctgaagaacaggagggaacagcgcactgttagtggaaaacacaatctttaagccagacaaccttgaattgaaagctcactctcctccttgcaatgccagcacctaacctctgaactctggccttccgtaccatctcttctaggagagtcatctttgtgtcatcagcttttcagtgttaagctgcatctgtgcttgcaacattgaaactgctgaatgtaaaagtctcctttgagagacatggagctcttatggtaaaaaggcagcattgtacaaaatgctaagttctagtataatatggtttgcattttagttttgtagtcaatgtattcaggtgtgcctggcacactgggggcacttgttaaatgacatatgaaataattctaactcaaataaaaatcttagcatttaaggagaaattgagtaaaatggaaaacataatgaacaggaaagagttcctcagtactttaaaatatctttatgtctaggataattgcaatgtttacttttttataagtcagaatgactactgtaggtttcttaaaccttaataatatttaaagtattttgtgcttgagtattagcatgactatcagtacaactttcattgctaacga

SEQ ID NO: 4098 - DNA, 1400 bp, mus musculus
atggtttgagaaaaattagtatcaggtctcagacccaaaaggacattcatggtatgtattcactaacaagtggatattagtttaaaaaaaaaaagtaaaaaaataaaacatgacagaatacccaagatacagtccacaaaatctaaaaggatcaacaatctgaagtgcccaaatgagtacatctcagtcccacttgggggagagaagaaagatatctcacaagttgggtagaggggagggaggtatggagggagggaggaagggacctgggaggctaagtgaatggggtgcaggaggagtggggaggaaaggggaatctgatctggtattgggtgagggaaaaggaatgaagccctgagggccagcagaaagaatgtaaacaggcaaccttaggaaataggaggttaggagaacacccccagaatgcaccagagacctgggagttgagagactcccagtactcaaatggagggatctcagaagaaatgcctgacagtagggagaggaaacttataaagcccacctccagcaccaagaaaggatatcaagtgagggatggggttgccatcccacagtcacatctctgacccataattgttcttgtctgcaagaaatgcaaggatggaaatggagaggagcctgagaaaaagaagatccagaaacaggcccaaagtgggatccagctcaaagggaggttccaaggacactattactgaggctgtggagtactcacaaaaggggatctatcatgactgccctctgaaagactgaacaagcagccaaaagagtcagatgcagatattgcatccaaccaatggacagaagcattgaattgaattagggaagtctgaaagacgctgatgagaaattcaatcctgtaggaggaccagcagtcttaattaatctggaccccggagatatctcaaacactggaccaccaaacaaacagcatacaccagcttatgtgaggccccaacacacatacagtagaggactttcggatctgtgttcattcagagatgatgcacctaaccctcaagaggctagaagcccagggagtttagaggtcaggtaggttgggatgtgggggtatccatttggagacagggtagggtaagaatgagatgtgtgatatggagcagatggagagtggatggggtggcagggaatggaaaataaagtgtaaaaattaaaattaaaaataaaattaaattaaaaatgagaaaaaattaattaaacatgaaaatacttcttagaaaacaatactgctgtagtgcttgctagctgtatacataataatcatgtaagtttataccatcagataaaattaattaagactttaaagataaacttgagatctttcaaagtatacagcagaatgtcaatagattgaaaatatg

SEQ ID NO: 4099 - DNA, 1000 bp, mus musculus
aaaggacagaaagcaggcagcacaacacaggaaagtgcctgggacagaatctgtcctaagaacaaacctccagtgacttgttctatccaacaaagtcctacctcatatttttagtcctcttagtaatgtgatcgtgcattgagtctaacaaaggattaatccactgattatgctagagcgctgatgcttttagtgtttctaggcatgacattgtagatccaatgagaggtatgctttattccctttttgtttctcaaaaccaccatttgacagttaaaattaaccatcaagccaggcgtggtggcgcacgcctttaattccagcactcgggaggcagagggaagcagatttctgagttcgtggccagcctgatctacaaagtgagttccaggacagcccgggctacacggagaaaccttgtctcagaaaaaaacaaaaaacaaaaaacaaaaaacaaaaacatcaaagcacatatagcaatacagacagaaattatatgcagttgatttaaactatatttattatgataaaggaaacgacttcattgttattctttactttaaatgtagacttttaagattaaatccattgcttgagagtttcatcagtgtgtataatgtgttctgatcacagtcactcctcagcctctcttgtcccacatccaatttcatgtgctggagtttgcaaccaactgagggccacccatgcaggcatgcattttagcagtggaattacccactcaagcactggggactcacgagtagccacattactactaacaccctcctccagaagccatcaacagtcaaaggttgcccaacatttgacagggcctatgggtccctcctccatccatgattgttgacaagcctcgtcttgtacaggaggtgtcagctgctctgagctcaggacgacaacttctgtatcaagcctagaagacagtcagtacttcacagtgatcctccgtagcttccaagtattatgttcttcctacttcatc

SEQ ID NO: 4100 - DNA, 1000 bp, mus musculus
acttataccaatagacaaatgagtgtcccactccagacattactaacagtccagagaggccatgtttttcatattgtatagtgtaatgcagaagtgatatctagcacacatgcagcagaacagagtactgcccttagatccttcttgaacagaatgctacattaggcattccatgagttcccccttcccaggaggcctgtgcccagtctagttgccatagatggccatcagacatttgcaatgacatcaggagactatctgagcagccactgccctaaagaatctgctagcaggagactggggatatcagtgtcttcttggccgacaactgcattccaaaggtcaactggggtgaaaaggatgggcttggagcatctggtgcgttttcagccacaaggcagctaacaagcagagagcagccgccacgagggctaaaagtagcctggagaccacacacctgtgaaaaagtcaacctgacccaggaaaacaggattttaagtctagagagatttccaattcttcaaaggtaaaatttcagacctgtccccatcctgaatcaatcctcaagtctctgatgacccacttacttttctatgacaaccactgcaggagtgagtagggacttggaagtgtggaagtgagaattgttctcacagaattactgcagtttgttttctcagccctgttccttgtcaagcagctcattcattcctcatagcaaagcatggatgatatcacactagagtccacatgtggagtatacctgaggaaaccaagtcaccgagcaagaagcttggggtgtgagtgatcagttagcctgtgttccctcagttgatgtttggctatattcacttcagagtcccatcagccttttcacttgtaggctatggagaagctgaacagctatggagaagctgagactttcattgtctgcagagcactgaggcattttcatatagcatcttagatttcaggtagtatgccaagaatcctttcaaac

SEQ ID NO: 4101 - DNA, 1600 bp, mus musculus
ttcatcacacttcaagttttcctgaatgttaaaactaaatgtaaggtgctagagccactgtcgccaagcccaggccacgctgcttctgctcgcccgttgccccccatcgtgcactagcggtctcaaaagattcaaagtccaagatggcaaccctcaaggaccagctgattgtgaatcttcttaaggaagaacagactcccccagaacaagattacagttgttgagggttggtactatttgcatggcttgtgccatcagtatcttaaagaaggacttggcagatgagcttgcccttgttgtcttcatggaaaacaaactcaagggcgagatgatggatctccagcatggcagccttttccttaaaacaccaaaaattgtctccagcaaagactattgtgtaactgcgaactccaagctggtcatcatcaccacgggggcccgtcagcaagagggagagagccgactcaacctggtccagcgaaacatgaacatcttcaagttcatccttcccaacattgtcaagtacagtccacactgcaagctgctgattgtctcaaatccagtgggtatcttgacctacgtggcttggaaaatcagtggctttcccaaaagccgagttattggaagtggttgcagtctggattcagctcggttccgttacctgatgggagaaaggctgggggttcacgcgctgagctgtcacggctgggtcctgggagaacatggcgactccagtgtgcctgtgtggagtggtgtgaatgttgccggcgtctccctgaagtctctgaccccagaactggtcactgacacagacaaggaacagtggaaggaggttcacaagcaggtggtggacagtgcctccgaggtgatcaagctgaaaggttacacatcctgggccattggcctctctgtggcagacttggccgagagcatcatgaagaaccttaggcgggtgcatcccatttccaccatgattaagggtctctatggaatcaatgatgatgtcttcctcagtgtcccatgtatcctgggacaaaatggaatctcggatgttgtgaaggtgactctgactcccgaggaagagacccgcctgaagaagagtgcagacaccctctggggaatccagaaggagctgcagttctagtcttcccaatgtcctcgcacttcaatgtccaggctgcagcagggattctagggagaccacacccttctcttctgagctgtggttagtacagtggtgttgaggtggtgtggggaaacatctcactccccacagctctgccctgctgccaagtggtacttgtgtagtggtaacctggttagtatgacagtcccactgtcttcgagacacactgccaactgtgcaggcttcgattaccctgcgagccttctgcattgctgccctgtgcaccctcatcaagcatgcctaggccaacgagtttccagttagtcataacctggctccactgtgtacgtccatgattcatatcttgtgcataaatgttgtacaggatattttatgtattatatgtgtctgtactgtgcattacaatattatgtgagatgtaagatctgcatatggatgatggaaccaaccacc

SEQ ID NO: 4102 - DNA, 1200 bp, mus musculus
atgttctttgttgttgttgttgttgttgttgttgttttaattgggtatttatttcagttacatttccaatgctatcccaaaagtcccccacacgctccccaacccactcccctacccacccactcccacttcttggccctgtcgttcccctgcactgaggcatataaagtttgcatgaccaatgggcctctctttccactgatggccgactagaaggtgtttgtaaggtatctagttttccctggtgctggttaaattatcctgaaggcagcaggacttcttagggaaggtggaaggagctgtgggccagacaatggacattaggataccctagtctgttagctgtgcctctacaggtcccattctgtaggttgtgtcttagtcagacctagatggggtggcagatagatacaactaggatgggtggttgggcagggttccaagctggttagttttcaggtttgcttccaaggagaggcaggatattcttggggttcacaaggcacctctggaccaaagagcaagaccagagctagacaataatgctcaggggattgcttgtgtttctcacttctccaggcagacccagatgaggtggcaggtagatccaactagaatgggtaattgagcacggttccaagctgtttagttttggggacccaaagtattccacagggaggcaggactctgctagagtcctgcaagtctcccgtggactgagaaacaaggccagaactagacaatattgctcaggggcctgtgcctaccactcacctctgcaagctgtcataatttcttttgttttgtttttaaagtaatgtcaacagctgacagatttgcaactggcagagactaggatggtgttgctcgagagcacgcagttactgacaaagctaaccagactcttccagcagaagaacacgctgtgttcatcaccctgaagaagtatgatggtcacaccaaacccattccaagaaagagttctgtgaagggcctcaaggcagcagaaaacaagtgtcggttaagagctatgggtgggaaagggaagattaggactgaggtgagtcccacagaaatgactatgatacgctctataatattgttgagtagaaagttgccagcagttttccccttttgcttgaaaagaaaaaagtaccatgtctgtggaattaatgtctcagaagctgcagaaggagtgaa

SEQ ID NO: 4103 - DNA, 1200 bp, mus musculus
ccattcactcaacagctctaagaacccattaagataaatggagtgtttatctgaaggttggagaaatagtagccaggaaaactagcccttactggtctctcatttaaatgtagttggtagaatgttacattttaaaatactgtagggaagtgtagaaagtcaaagaaagcagtggggtaggagtggggtgccagagggtggtatgggtacttttttacaagtgaccagtaaacacacttgtgacagtgacatttaagtaaaactgcaaagtctggcaaatacagaagtggatgctcacagtcatctatcagatggaacataggggcccccaatggagacgctagagaaagcacccaaggagctgaaggggtctgcaaccctataggtggaacaacaatatgaactaaccagtacccccagagctcttatctctagctccatatgtagcagaagatggcctagtgggccatcactgggaagagaggccccttagtattgcaaacttagtatgccccaatacaggggaatgccagagccaagaagcaggagtgggtgggtaggggagcagggcagagggagtgtatagggaactttcgggatagcatttgaaatgtatataaagtaactatctaatttttaaaaaatacaaaaaagaaccctgcaaaatcacccatgggaggaagacagtacaatagcaactatgcagggcccaggcaagaactaatgtggttgaggactgggcgggttagggaaggaggaaggggagagaaatgtgcacacaaggctggaggaggcaacccaagactgctgtcaaggcctgagagaaaatccagacaccaagacctctgacttgaacagaaggcctaagatctttgcaaaagtagtttcaaatatttttagccagttttgactctggttaactaggtacaaagtcattgatgtggttttataattactttgtaggtattggcaataaggcatattttctcttaaagaaccaagaagaaccactgtacaatgatttttttatgtctccatataaaataaaattaatggtccctctagcttagtgtttgtttgagggggtcattatattagagggaagataattctcgtttttgatgactaagcaaactgattaaggataaataacaggtaagctgaaatatgatatttaaatggaataaaaccaagcatgca

SEQ ID NO: 4104 - DNA, 1200 bp, mus musculus
ttttaagggtcttccttccaggatttctgtctcagcccattgattattttccttttgtttactattcactttacatttttatcaaagcactcctccctcctctcctttcagtcccatcctcacacccctccccttctcctatgagaagagaagctccacccagtaggtaccaaaagccctggcacatcaagttgcattaggactaaacacaccctcactcgagtgaggccagcaaggcagctcaaatagtgaaaagggatacaaatggaggcaacagaatcagagtcatcctcccaccacttgttaggggactcacatggagaccatgctatgtatatgctatatatgtgtaggcagcctagttacagatctctttggttggtggtccagtctctttgaaacccatgggcccaggtaatttgactctgttgaccttcttgtggtgcccttgatccctatggccccatcaattctttctcctattttttctccaaactctcccagcaatatccaatgttcagttgagcaactcagtatctgcttttatcagctattggatgaagcctctcagagaacagttaagctagacacctgtctgcaagcatagaggagtatcgttaacaatgtcagggcattgactctcccatgtgatgagttttaggttgtaccagtcattggctgcccatcccctcaatctctggtccattttatccctgtacatcgtgtaggcaggacaaattttggatggaataatttgggggtcagttggtgcctcctccatacactggaagttgggactgattacataaggtgagcaaatcagcctctatgccacccactgctaggtgtgtcatcttgggccatccacacagattcccagaaggctgcaccaacccagagttgccccaacaacattttcccttctctctcctagccatttaaatgtcttccctcttcccacacttgatcaccactcctgttcagttcgccaaaccctctactccccagtttcctccatctatccacctctggtgtctattttatttccccttctgaataagattcaagcatcttccttgttacttagcttctttgtatctatggaatgtagcatggttatcctgtactttatggttaatttccacttataagtgagtacataccatgagcatctttcccagatttctgagaaacctccat

SEQ ID NO: 4105 - DNA, 1000 bp, mus musculus
ggaatcttgcttttcttgcatgatggcgtgtctagaacttgctgttgtgggagaactgggctctggtgatgctaagtagccttagttattattgcttatgctcttgtgctttcctttaaccatctggtgctacctgcccttgctttctttgactggagcctgtctgtcctgtgatcctggttgtgtcagaactcctcagttgcctctgtgatcttgtgattttgggatcttgtgatcgtgagatcctagatgtgtcagaactcctgggtgtcaagctgtctctgggatcctgaaatcctgctgtgaccaagcttctgagatactgtggcatcagagctccttgaagtcaagctttcgctgggtgttgcaagggttggtggggagccagagccctacgtttcctccaggcatggatgcaagctggaaggaacctgtgcctgtggctaggctgggattttgtttccctgttcttgtgggggttccagttacattgcatgtagggaaaggcattgtggtctcagttgtcatcttgagtgtgtcaaaactccagtgctcctgggtgtgtctgatctcttgggagctgagattcctctctgatcctgtgatcttgtgatcctgggtgtttcagagcacctgagagttgggctccctttgggtgttttaagattgggtgcagagccagcgcctcaggtctactggtgcaagttcaaactggaaggaatccatgccactgtttgtttgtggggtttctgtgtccctgaatgccggggacccaattactctgggagttggggcagatgttgcagcctcctcacctctgatcttgtgcatgttagagtacctgggagttgagcttcttctgggtggtgtgggactgggtgaggagccagtgcccaaggtctgctagtggcacagtgtttagactggaaggtccactgcttttcctaatccaaagttccaaaatccacatttctgcaaaaagaaaaaaaaaaaaaaggca

SEQ ID NO: 4106 - DNA, 1000 bp, mus musculus
agtccctttcccaactcctccattggagacctccacgctcagtccaatggttgactgcaaacatctgcttctgtatttgacagattctgggggagcatctcaggagacagccatatcaggcttacatcagcaaaaatttccaggaatccacaatagcacctggttttgatagttatatatgggatgaatccccaggtggggcagtctctgaatggcctttccttcagtctctgcttcacacattgtctgcatatttcctcctgtgagtatttagtttacccttctaagaagcaatgaagcatccacattttggtcttccttcttttaggcatcatagggtctgtgaattgaatcttgggtattttgaacttatgggctaatatccacttatcagtgagtaaataccatgtgtgttcttttgtgactgatttacctcactcagaatgatattttcaaattccatccatttgtttgtgaatttcatgaaatcattgattttaatagctgaggagtattacattgtgtaatgtaccacattttctgtatccattccttggttgagagacatctgggttcctttcagcttctggttattataaatatggctgctatgaacatagtggagcatctgtccttattacatgtcggagcatgttctggttatatatccaggaatggtaaaactgggtcctggtatttttatgttattttttaaactgatttataaattaatttttttgacactccatattttattccctcacccccatccaccctctgactattccacattgcatacctcatcgccaccccatccccggtctctacatgaatttccccatcccataccccacctgacctctaaactcccgggggcttccagtctgttaggtgcatcatctctgaatggacacagaccaggcagtcctctactttatttgtgttaagggccccatatttggtggtgtatgctgcctgtttggtgtccagtgtttgagag

SEQ ID NO: 4107 - DNA, 1000 bp, mus musculus
aggaccacagacctctccttccattgatgcctgacaaggccattctctgctacatatgtgattgaagccctgggttttttgagacagggtttttctgtgtagctctggctgtcctcaagctcactctgtagaccagactggcctcaaactcataaatctgcctgtctctgcctcccaagtgctgggattaaaggcatgtgccaccactgcctggcaagaatatattttctctcttctcatttatatttagtccagaagagtctgatatcacactaccacactccatataactagcttagtaactactaaattgccaatctcagaataaacaacagaagatcagaagaagtcaatactgtctcattaaataatctcttgccttttctgatagatgacatttcttttactactacgttcttgtttcctgcaccaaagttaaataattatgacaatattttctataaagtattaaattttattacagtaagctgtttctgtttaattttattatcatatgtactccttggttggtagtttagtccctgggagctctaaggattcaggttggttttgctcttcctataaggttgtaaaccccttcagctctttcagtcctttctctaactctcccattagggactctgtgctcagtccagtggttcactgaaagcctctgtgtttgtcaggctctggcaaagcctctcaggagccagttatatcacggtcctgtcaacatgcacttcttggcatccacaatagtgtcttggtttagtaactgtatatgggatggacaaccagatggggcagtctttgaatggcctttgctccacatattgactccgtatctgctcccatgaatattttgttcccctttctaagaaggaccaatgcatccacattttggtcttccttcttcttgagcttcaagtgagcttctgtgattggtttcttaggtattctgagctttttggataatatccaattatcagtaagtgcatat

SEQ ID NO: 4108 - DNA, 1200 bp, mus musculus
tttgtagttttagagcttttttttttttggtgtgtgtgtatgtgtcagcctttgcatacacacacaccgtgtgtgtgtgtgtgtgtgtgtgtgtgtgtgtattatataatatatatttctcatgatttttacttgcatgttttattctgctttttacatttttctgagagagagacaggaggagagggagaaggagagagagagggagagggagagggagaaagagagagagagagagagagagagagagagagagagaagcatggagctaaatggtagtgagaagggcaggatttgagaggagatgagaaaaggaaaactgtgatccaaatctattacatgaaaaatggttaaaaaaaaaaaaacaaaggtgggggggagggagagaatgaagcataggcttccttatttatttacatcccaaaggatgtctccctcctggtccccctctcagagttcctctcccctacccactccatccacctttgagaggacatcctcctccatatcccccaaccctgttgcatcaagtctctgcaatattaagttaaccttctaccactgaagctagacaagactttcctctgtacctatatgccaggagaattggaccagtacctgtatgctctttggtttgtggcttagtccctgggagttctcaggggtacagcttctttgacattgttggttttcttgtgcatttgccatgcttttgagagcatttaatccttcccctaactcttccataggcattcctcggccctatccaatgtttgactgtggatctctgcatttatctccactgtctactatgtataacctctcagagggcagctatgctaggttcttgtctgcaagcacaacagagaatcattaattgcatgagagattggtgcctgcctgttggatgggtctcaggtagagctgatttctggtagactattcctcgagtctcagctccatctttgttcctgtatttattttagacaggaccaattttaggtcaaaaatgttataggaggtctttgtgttatggtggagcatctttagggtatatgcccaagagaattatatctgggtcttcaggtaaaactatttccaactttctgaggaacctccatattgatttcctgagtggttgtaccagtttgcattccatcagcaatggaggagtgttcctctttttccacattctcacca

SEQ ID NO: 4109 - DNA, 1000 bp, mus musculus
ttttctagtgttttggagaaaccaggacttgctgcggtgggagaactgggttctgatggtgctaagtagtcttggtttctgttggtaagattcttgcctttctggttatctctggtgttagatgttcttgctgtctctggctggaacttgttcctcctgtgggtctgtaagcctgtgccagcactcctgggagaccagctctctcctggcagaacttgtgtacagagggctctggaatagcccaagctctgggtgcagatggagactctaagtatcccatctcagctgctccatggatcttgtgtcctgtgtgctcctggatggagttattggagagaaagtggctgtgtcacctcctagcccaggagtgaaaacactcctgggagaacaggtctttcctggtgagacccatgcacagtggtttgtggaatagcctcagctcgcaggtgcagattgcggaccagcctcatttttaataccactggctggaatacaaacattctcttagtacatacctttaatgtaaaattagtttgtagaaggaagcagccaggttttaaagtgacatctaattgaagggcagataaaatgacaactcagacagagatttaacagaatgagtcagagatagggtatggccatttctcttgtatgccatggacccagcacttgggaggcagaggcaggtgggtttctgagttcgaggccagcctgttctacaaagtgagttccaggacagccaaggctatacagagaaaccctgtctcacaaaacaaaacaaaacaaacaaaacaaacaaaacaaaaaacaaaaacaaagtatgccattgaaagagggagagtcaatcagttggcaatcagtgcagtgagtacagtacagggtaattgagacagtttctgagttcattccagttcagattaggtcagcagaagcagttgaagtcagagaataagaaggagccagaagattgtgagaaattgtcaaagtaactttgaggcta

SEQ ID NO: 4110 - DNA, 1800 bp, mus musculus
caattttatttatgttactttatttgcaaggcagtgtttgcttagtcacattttctgttttagtcattgacctcagaactgtatcagacattggcttttcaatttgagtcaaatagatatatgaaacagttcttacttctagggcaacaaaagtcatttagaactatattacatctgttgacagtaaataatttggttcaattttcaagaaaataaaataattaataatgtaacttagaactaatccttctcattgttttctgtttattaggggatagcatttcattatgtaccacagactgggctaaaacgtgactcttctcccttagctttccaactgttgggattattagtgggtgccaccaaacctacttgttaatcctctgattaatccaggaaccttaatagatattgtgtagtgaagatcatattcacgctgcttattacataaacaaatgaaatgctgagttctgctttggttataccgtgaaggcttagtacagacatctgacagcatgtatagaacatacaataactcaaaattaagcatcagggaagcaatcaagcaaaccagcaaacaaaaattaaagcttaaatggaggcatggatctaaacagggaattttcaaaatattaaatacaaatagttgagcaacatattttttaaaatatatatattatttttaaaaactgctttttattttattttatttttattggatattttctttttataattaaggcatgtttaaattagatatttaaattagatattttctttatttacatttcaaatgctttctacaaatccccctacaccctaacccagccttgctccccaacctacccactccggtttcctggccctggcattccactgtaatggggcatatgatctttgcaataccaagggcctctccttccactgatggctgactaggccattatctgctacatatgcagctagagacaaaagcatccactattgtatttaaaaggctctgccagggcctcccaggattattttattttatttttctcaaaaaggatttaatcgttttttctaaatacaatcagaatggatgaaagaagaaaaagaagaagaagaagaggaagaagaagaagaagaagaagaagaagaagaagaagaagaagaagaagaagaagaagaagaagaagaagaagaagaagaagaagaagaagaagggagaaggagaaggagaaggagaaggagaaggagaaggagaaggagaaggagaaggagaaggagaaggagaaggagaaggagaaggagaaggagaaggagaaggagaagaagaagaagaagaagaagaagaagaagaagaagaagaagaagaagaagaagaagaagaagaagaagaagaagaagaagaagaagaagaagaagaagaaaagaagaaagagaatatatactggcttggatttagaaaaagggaaacacttcactgtcaatgttactaaaaacattatagacagctctaaaaaagaaaaatatatattttgtgtatgacacatcttatcacttttacataagatatagaaaatcaaagcattctaaagccaactattgagagacttcccttgtttatgtgcattgttgcttcattgacaatagtcaggaaataaatacactctcgtttcagtgaattgtcaactgataaatgaatagaggcattgtcttctccttagttcttgggttttgaaacaactgctattgcagaccttaccgttgtatagtaaatttttcaatgaggtctaaattcaggattttaaatgatgt

SEQ ID NO: 4111 - DNA, 1200 bp, mus musculus
actgaatcagcatataaataatgcattcctccatatgttaaatggatgtgttcttattatacaaaatttgaaatgtacagaaaataattaatgacccaaatcacctattttattttatagatataactacctttggcattcatatacatagaattcctctgttatatatgtgtgtgtatatgtcacacacacacacacacacacacacacacacacacacacacacctccattcatgaagtttcaaagaaacaatgtaacagaaacaaaatactcctaatttctaaataaaatatgtttcgtgtaattttaaaacattcttgcttttttgagagctctgcacaagctctctcaacctctcctggccagctctaccaagcagccaatggccaccacagtctcactaatacctctcccagtctcactcagctgagccaatccaccagctcatgcttttctcataaacacagggcgctaccaccactctataccaaccaaccaaccacctggcagctagctatgctaaacctctaaggacagccctactgctgtgccctttctcctgcctacctgaatcaccagagatggaaaacaccagacaggcttaatattttaaaaccagccagataactcaactgctgggcaaagaatctattgctctaaactcatcgactatcctatattataattctgatggtggcagaagccaccacctgttctagtagccaccagaccttgcatcctcctctctcaaaatcctgacccccaaaaaaaaaaaattgctatctcttttcttcttcttcctcctgggacacagaaagcccacctctttacaattgtccaatgcttagcttttgcagtctttattggcatcaatgtgaggggaggcccttggtcctgtgaaggcttgatgctccattgtagaggagtcctagagcagtgaggtggtgtggttaggtgggtaggcgaatacctcaatagaagcaggttaggagggatgtgataggggttttacagaggggaaaatgagaaagggaatgacatttgaaatgtaaataaataaaataatagtaatagataatgaaaataataaattaaaaatcaagaaacaactacggaatcagatttcagtatcagctcttcctcttacaaaaatatatatgttgctgaggcttgtgaagtttacagaattgcctgtgtt

SEQ ID NO: 4112 - DNA, 1000 bp, mus musculus
cttattgctttttgtaatttgttttactgttgtctcaatgtcttctatggtatcttcgattccgtagactttctcttgtattgtgttgatgatgctctcatctatgactcctgctctctttcttaggttttccatctccagtgttgtgtcccttcctgattgttttattgtttctatttccagatttagatcctgaattgttttgtacaattccctctcctgtttgattgtcttttcctatatttatttaaaacatttatgtgttaactctttatattttcctctaactttttacctatgttctccagcatttctttaatggagctgtttatgttcttcttaatgctctctatcatcttcatgagatgggattttagatcagaatcttgcttttcaggtatcttgggggtacccagtgcttgctgtgttagaactggaatctgctgatgccaagtagcattggtttctgttgcatatgttcttgcacttgcctcttaccatattatctttgccgctagttatctttggtgttaactggctttgctatctctgtctggacactgttcctactgtgaacctggttatgctgggccttcttaactcattctgtctctggatatggagggagtctggaaagcctggccagtgggcctggctgagtcagaactccttggagtcaatctgtctctgcataagtgtcatgttgggggatagggcacaggatcacaggatctgctccctgataaatatgtgagctggaaggaaaaacacgtgtcaccaactagggatgagttattgcttcctctggtatctgggcttgtctctgtgaggctaggtattgtgccagtgttgaagcttcacctgtgaccccaggtatgtcacaactactggaggtcaaacttggtgtgtgtagagtggtgtgtgggtgtctggagcacagaatacactcctggatgccagtgtaaaaggaaaagcaatagttcatttttaatagaaaaaa

SEQ ID NO: 4113 - DNA, 1200 bp, mus musculus
gctccccgagatctgattaagataggatccgggccataccatttattatcaaggacatttttccatttaaccatctcattgggcctatctggctctgaacaatgacattcagccgcagtatggccatgagcatcaagatttaaaaaattgagtgtaaagagtgctatagacacagacactcttggtactcggggtagagcctcctcaactccccttttctgttttattagataggatttgagggtgcgatgtgcacaacaaaccggaatcttcggcggcaaaagctttattgcttacatcttcaggagcaagagagagaatggcgaaaccccgtcccttttaaggagaattatcctccacctaggatgtgtcgctccttgattggctgcagcccattggctgagttgtagtcacagggaaggcagagcacgtggagtggagaactacccttggcacatgcgcagattatttgtttaccacttagaacacaggatgtcagtgccatcttgtaacggcgaatgtgagggcggctccccacacaccatgaaccccagtccagctcaaagagagcagacctccaaggagtgctgacacaaggaagatcacagatgagaccaccactgctgcccaaatttcaggcacaagtgggaactgcccagagcccacaggacccaggaactacagagcagccaaggacaggatcctgcaagtttccatctgtgctctggggcagaacctgtgccacaattatacagatcccagttcagtcctatggcccagtcatacccagagagagcaggtcttccaggggtgctaactcaccaaagagcaaaggagtgctgccatagctaagacaaagagcccaaaggctcacaggagagtcaagcttcagtcagcaaaaccagataccaccatagataaccagatggcaagagaaaagtgccagaatataagcaacagaaaccaaggctacctgacactgtcagaaaccagttctcctacaacagcaagccctggacactcaaacaaacttggaaagaaagattctgatttaaaaactcatctcatgattatgatagaagactttaagaaggacatacataactcccttaaagaaattacaggcaaatacaggtaaacaggtagaagtccttaaaaatgaaacacaaaacccttaaagaattgcaggaaaacacaacc

SEQ ID NO: 4114 - DNA, 1200 bp, mus musculus
actcaatgataaatggatattagccaaaaagaagctcagactaaccactacacaactcacagaccatatgaaacccatgaagaaagaagatcacaccaaaatgtggatgctacaaggcaattagtagagggaatagaataatctctgggaagtagagggagagagggatctgggaggaagaagggatgaggggggaaatgagcaccagttcagataggggaggagatggggggaaagtacagagtgtgaggtgtttgaatacaggtgtatagcagtggggcagggggaacaaggtgggattagtcactaggaagtcctagatgccagggacccaagtggttctcatgaccaatcgggttggactttagccgaaatatccaacaaaggggagaaagaacctttagagacaacattcagtgaataagagtggacccaatttgaggaatggggccacccatccacctcaaaaatattaattcagaagacctcctgtgaaaaggaaatgcagagacaaagaatggagcagatactaaaggaatggccatccacagactaccccacctagggatccatctcatctgctgacaataaacccaaatactattgctgatgccaagaactgcttactgacaggagcccactatagctgccacctgagtgactgccagagctagaccaatacagatgcggatatatacagccaaatattggaatgagtgcagggaacccaatggggaagttaggacaaggactataggcgctgaaggggtttccaacctcataggacaacaacaatatcaatcaaccagataccctgaagctcccagggactaaaccaccaaccaaatagtacacaggctgtatccatggctccagttggctatgtagcagaggatggccatatcggacatcagtgggaggagtggttcttggtcctctgtaggcttgatgacccaggataggggaacactaggctgctgaggtaggagtgggtgggcagttggggagcactctcatagaggctgaaggagggagggggttatagtgagcttgttgatgggaaaccaataacatttggaatgtaattaaataaatagtcaataaaaaccaattcttagaaaccaagaattcaagcgttcacatacatgactcttagacaataggaaatactgcttcatgccagtattataaaaaaaaaag

SEQ ID NO: 4115 - DNA, 1000 bp, mus musculus
aacatataacaaggacacatgctctactatattcataacagccttatttataatggtgaggagctggaaagaacccagatgtacttcagcagaggaatggatacagaaaatgtgatatatttgcacagtggagtatttacttagctattaaaaacaatgacttcatgaattcttagtcaaatggatagaacaagaaaatatcaccctgagtgagacaactcaatcacaaaggagcacacatggtatgcacacacgtataagtggatattagcccaaaagcttgaaatacccaagatacagttcacagaccacatgaagctcaagaagaaggaagaatactttcaaagagtgaatactttggttcttcttagaagggggaacaaaatacccatgggaggagatatagagaaaaagtgtggagtagagactgaaagaaaggtcatccagagactgttccacctggggattcatcctatatacaaccaccaaacccacgcactattgtggatgtcaagaattgcatgcttaaaggagcctgatatagttgtctcctgagaggatctgccagagactgacacatatagaaatgaatccgcacagccaaccattgaagtgaacatgtggtccccaaatggagaagttagggaaaggactgaatcaacggaaggggtttacagtcccataggaagaataaaaatatcaaccaaccagaaaccccagagctaccaggaactaaaccaccaaccaaagaatacacatggagagacccatggctccagctgcatatatagcagaggttggccttgttggacttcaatgggaggagaggcccttggtcctgtgaaggctcagtgcctcaatataggggaatgccaggctgggaaagcaggaatgggagggtggaggaacatgctcaaagaagcagggggaggggaattaagtaggggttttttttttttttttggaggggaaaccaggaaaggggataacatttgaaatg

SEQ ID NO: 4116 - DNA, 1000 bp, mus musculus
ttgttaagtgaaaataaaacaaaatcaacactgaaaaatctcagtatgactgaaccttccaccagggcagattacaaccttgactgctcctcaaaaggtcccacagtttgaaggcctcctaggagttccactgcacacagggcaagaagtaggagaccctcccaaataactgcaacagttggaaaccccatggagcccagtggacctggggacacatagctcttccccatcccccaaattccactttgcttccttcctgttccttctgcctgggcagatcaccatcttgtctgctgctctgaagacaccccagtctgaaggcctcccaggagttctgctgcatacaaggaaataggtaagcaaacctcccccaaaaaaactgcaacagctgggaaccccgaggagcacagcattctggagaccatatcccctcccactcaaactcctctcctcctctggcctgcaacttcttccaggacagatcaccagattgtctgctatttgaagccccaacaatctgaaggcctcccaggaatctggctgtctgcagggcaactgataccacagtctgaaggctaccctggtgaatagctatatctagggcaacaactttactgttcctctgaagcaccaacactctgaaggcctaccaggagatttgctgcatacagggcaacaaatcaccagcttgtctatccctctgaagaccctacagttagaaggaattaaagatggtctactacagacagggccacaagcttcccagaagacgtgcaacaaaccaggaaaacaggaggcaggctccatacagagacacccaggtcaactaacaccagaaataaccaaatggtgagaggcaagctcaagataataagcagcagaagtcaatatacatgaacataatcagaacccagttccccctacacatcaattcctggatacaccaacatacctgaaaatcaagaggctgacctaaaattgtatctcataaagataatag

SEQ ID NO: 4117 - DNA, 1000 bp, mus musculus
ccaaatgaaaatatccaaaggtgttagacattctggattatcatatcgtatttcaacaaaacagttcatctatatgtgtcaagaatataatattttttcattctcattgaactattaatatttaaaagactatatttggtgccttccagtcagagccagcactgggtcaacttgagtgcagagttggtggacacccccaaggtcccaagaggactctccactggattataggaccacaggttagtggaacacatcttctgttccattccaatttcatgagatgagcagtagggaagcagaaaacccagcctgaccagggtcacaagtcccttccatttggtgccagcaccgggtcacctgggccatgagttggagaacacccctaaggtgcctagaggacagcttctgaggcagaccccatttcaggctccagacatccgggcattttccctgccagaggaatcctgtcctccccacccgagagggctttgcaagagcacttggggaagccatcttggttcccggatccctctgagactagtctgctcaggtgagagtgtggactacagaagctaacatcttctgggacaggccctgtttcaggcattcatcttctgccaggaggcaggtctgaaccccagatatctgtgcaccttccttgaaagaggagagcttgcctgcaagaacgctcagaccactgaaactcaggagagagctagtttcccaggtctgctgaaagaggctaacagaattgtgggaagaacaagctctaaccagagacaactataagaacttcggagattaccagatggcgaaaggcaaacataaaaatcttactagcagaaaccaagaccacccaccatcatcagaacacagcacttccacctcaccaagtcctggccaccccaacacacccaaaaacctagacccggatttaaaagcatatctcctgatgatggtagaggacatcaagaaggactttgataactcatttaaataa

SEQ ID NO: 4118 - DNA, 1200 bp, mus musculus
gagtagacctctgacaagcctaaggagtattttccttaagttgcacataatcaaaattgtagttcaaaaccatggattaggacaaagagagactaacaaagattgactctatcttaagagaaagcagatggtgggtttgtggactacaactgcatctggtactgaattcaagcagaagagtgacatctaggaaaaatcctttcatctcaactttggaccagaatagtggcagcaagcactttagaagatttctttttgctttttggttgtcctagaagtgtatgcccatatctgtaagtcaaaaatctagaaatccagagctcctgtacaacctgtagaatactttcagctaaaaggaacaaaactcacatacacaaacttacaggttcagctctgtagctgagcatgcttgaatggttagtgtgatctggtcagaggtttgctgctgctgttgctgctgggtgctgtgagtggagacatgagctacatttctgctcctgcctgctaaatcttcttaaagcacacaaaacagcaataaactgcaccctgtcatttatgcttcgttttccagactaaagttctgcctgcattcctggaggtctgctggctccagggataaccaggtaagacaacagcctctgccaagtccaccaaaagcacacccaacaatagtaaatttcaccttggccattgtgcttcattttgaggcccacaactctgcctgctttcttggaggcttgtcagcaccaagggcaaccaggtaagtatctcactccaaaccctcacctgccaagtctccttaaaacattgtcaaaagcctttccttacctcaacccctcgactccactttatgacccacaacacaacctcatttccaacaagccactctggaacctgggaccccagagcacaccggtactaggaacgctaaaggcaagtttagcacctaaaaccccagagaccacacagtccacaaaaagccttaaggaaaaatatctaccagacctgaagcatcactagtcaccagaacccaggccaattagaccagaagaaagaggggaaactaaaaccaagagaaatatccaaaatcacccagctaataaagataaactcagaaatcagcatctatacttataataaccataaaacccagatggcaaaaggccagcataaagaaacaaccaacaacagtgaatgtaa

SEQ ID NO: 4119 - DNA, 1200 bp, mus musculus
ggagttggtattggagtttcaaaagtctttgttgttattgttactgttttaattattttatctatttatattccaaatgctaacctccctcatagacctcctcacagagtcactccccaatccctatcctattttcctctgagagggtgggacccctcccttgggtattccccattccttacacatcatctgtgccacattaggcacatctttctacagtgaagccagataaggcaactatgttggggagcagataccacagtcaggctacagctttagggaaaagctctgctccagttgttgggggggccacagggagactgagctgcatgtctgctacatatgtgctgggggcctcatttcagcctataggttttgttttttccagttggtagctaagtctctgagagctttcacaggtctaggttagttgattctgttggccttcctgtggggttccaatcctcttcagctatcagtctttctgtcaactcttccataaaagtctctgacctctgtcaaatgtttggctgtgggtttctgcatctgtttcagctagctgctgggtagagcctctcagaggacagttatgctaggctcctgccaaaagttcactccaaatccagtctttgtctctctctctctgtctctctctgtctctctctgtctctgtctctgtgtgtgtgtgtgtgtgtgtgtgtatgtgtgtgtgtgtgagagagagagagagagagagagagagagagacagagacagagacagagagagagagacagagagagtatctgtctttctgtctttctctctctctgggtcaccctctctctctctacctatgcactagatgtggccctttgatgttaatcctatgtctgcatgaaggtcatggtgtttcctcttatgatggtaatatattaaatctctgaaagtataaggaagccccaagattaagtgctttcttttataagaattgccttgatcatggtgtcactccacaaaaataaaacactgactaagacagggtggaagaatgtagatgtcctctgtccatattgttatatcaactgttattgttattgtgttagtattgtttagacacttgatattattgagatttcatggatgaattttctcctattctacctaatgaacactgtctgacaatagttttcttggtcctttggctcttgtaaagttttg

SEQ ID NO: 4120 - DNA, 1000 bp, mus musculus
atgaatggatacttatactttcagatggataacattaatgtcgccgggaaaaaatgtgcttagtgttggagcatttacattttattgaaatgtacactctcctgggatattcatagaacactaggctcacaacgtgcctcgtacaggctttgcttttgtgcaatctgttccaactactataccatgtgcctcagggattttgcttacatattctagaatgttatttaacctaaagataaataaaacttttcaaaatagagaacagaggctgcattctgaagctcagctcctactttatccttgggtgcaactcaacccacagaaagattattcacacccattcctaggtcccactacaccccaaccaccaggtatgtgggcaccccaaatggcgcctttgtggatcaggagagcctgcattggaggaacagtgtattcagtcattctgcaaccacgaggcaaaaaagttcaccttgaatccaagttttagatgctagtgcctcttctatatgaatgtgagagctggaaaaaaatgaaatgcctaaagaaaggttatatttttaaagttgtaagttttattagtgtataaaattatgaaaaatcatgctgttcattatattttcagaaatgttaaagatatagttttatcatattgacctccagtaccctctcttctttctattacatcacgggtcttctaccttctctcaaacatctcctgcattgtcacattagttaaaacgtaattctaaagccgggcatggtggcgcacgcctttaataccacactggggaggcagaggcaggcacatttctgagttcgaggccagcctggtctacaaagtgagttccaggacagccaaggctatacagagaaaccctgtctcaaaaacaaaaacaaaaacaaacaaacaaacaaacaaaacaccgtaattctaaatatgaaagaaactatatatttgtaccttcttagtctaatttcattaaagatggaatcacaa

SEQ ID NO: 4121 - DNA, 1600 bp, mus musculus
tatcttctgtacctgtgattctctcttctatctcttgtattctgtccttgatgcttgtgtctatgactcctgatcctaggttttctatctccacggttgtctccctttgtgatttctttattatttctatttccatttttatatcctggatggttttgttcaattccttcacctgtttggttgtattttcctggaaatctttaagggatttttttgtgtttcctctttaagggcttctacctgtttacttgtgttctcctgtatttctttaagggagttattttatgtccttcttaaagtcctcaatcattatcatgagatgtgattttaaatcagagtcttgcttttctggtgtgttggcatatctagggctcactgttgtgagagaactggtttctgatgatgccaagtagccttggtttctgttgcttatgttctttcccttatctctcaccatctggttatctctggtgttagctggtcttgctatcagactatggcttgctcctcctgcatgtcagtactcctgggagaccagttctgtcagggaggaatttggatatggagatctgtgtacagggtcagctccatggtgcagactgaaagaagtatcctgtcccctgctgttccttgctcttgtgtcctgaagactctgggtgggtccttcttgggccaggaatttgagcagaagtggtgttcttacctgtcctcacagctgtgtcagtactcctggaagaccagccctctcctgtcagtatttggatatggagagctgtgtcacagagtcagctctctgtacagatggaaacctgaaggatcctatcccagtctgctccttggttcctttgtcttgagggctccggtagggtccctctgagcagaagtggtggtcttacttgtgctcacattcgtcttagcactcttgggagaccagctctctcctggtggtatttgagtatggagagctgtgatataggatcagctctgggcaaagaccacattttgcttgttaagacaaggtctcatgtaattcagattgtcctcaaaattactctagggccaaagatgaccttgaagtcctccacaacctacgttctggaattatctgttttggaccggtttttttaatgcagatattttaaagaacatgattctaggtcaagagaataaacacgtctaattttagtaaatataaaaaaaaatttctctggctgaatttcctaccaacttcctttcctgaccacactgtttcaggatctgtgatttcctcaccaccatgttgagcatttaaactaatgtttctattctcagctgttagcaggacacagaatcttgctataatctgaacttaattatgcctttctttgtagaatgagtaggcttgttaaattatcacaatcacctcatgagtgagcttgtgagacaatgtatgtgactatgttgaccttagcacatgtttgtgcatgtttgaagctctatggttcacagcctacactttcaagtgtttgttttcttttccttgttcatcatgaaaatactttaaatgacagagttgagggtttattggtatcttgtttcttttatttcatgattatcataa

SEQ ID NO: 4122 - DNA, 1000 bp, mus musculus
ctgtctccacaagaatgtcaccaaccccaaacccccacccacccaggcctctaaactccctggggcctccagcctcttgagggttaggtgcatcttctctgactgatcctagacccagcagtcctctgctgtatatgtgttgggggcctcatatcagctggtatatactgcctggttggtgttcaactgtttaagagatcttggtggggggcggggagggggagtctaggttaattaagactgctggtcctcctacaggatcgcccttctcctcagcttctaccttttccctaattcaaccacaggggtcagcagcttctgtccattggttgggtgcaaatatctgcatctgactctttcagctgcttgttaggtctttcagagggcagtcatgataggtccctttttgtgagcgatccatagcctcagtaacagtgttgaagaggttaactcaggacctttggaaaattccatcaggtcgcagaacatgaaggccccctcccctcctggaagagagaggtcatggagcatataggcacccctcccttctggaagggagagactgattacattccaccttcagataagggaagcccttgctacctcattccctgaggaccaatcagtttaaaactcacactgttctagcaatcacattgtgcctagtgactcttgctctattctacccccgaaaactatttaaaaactgtccaaatggactgcctggggttgtcacctctcctttggatgcagtacgaccctagcatgctggaacaataaaatccttttgtattaatctctggctccatgtgattcactcaggggtagctaaggctcatcagagtcttacagtgtcaggtcttggggcctccccttgaactgggacccactttaggcctgtcactggagcttcttttcctcaggctcctctccagttccatcgctgcagttcttccaaacaggaaaaattatgggtcagaattttgactatgatatggta

SEQ ID NO: 4123 - DNA, 1200 bp, mus musculus
aggaggctgtattgtactttaattaattcaaagcaagattaatcgccaaaaggcgcctattctattacttgaaacaaaatgagatatgtgaatcgtattatttgatagtatgatgcatttttaggtaggaattgaacacaatcattattaatttcagcacaaatactcacctgcaatgacttaagcttaaattgtctcctttttataataagaatcatatcaaaaaataaaacaggattcaaaggtttaactcagctgctgttgtcttaacattgttatattaagagtgaaattgcattgaaaggcttcaattaataagaaatttcaattcagggtgtgttctgtgatttttggaattctggggtgcagttaagaccccactctgacgttgttatctccccacctcccaaaaaaaatcccacttgccaaactccctactgtgttaaccataatggtggtattaagtctgtttgtgtcactgcactgtaggtcctccatgcacttagtacagaatacagaatccatcccgacatccactggaacctcagtgggtatatatttgctgcagctttttaatctgtatttttaaaagagatatcaaacacttacgtttaaagcagtaggcatcaaatctgctatcagggagagggaagcatgtctggttctcaaaacgatacagggttctcaccccaagtagacctcctccacactgggccctggccacagtcacagggtgccgcacgctggcatccgacagccagccgtaatcgcattggtcaaagccatttctccaagctgcctgaagttctccaacagtcgccagcctcgcatccctgcttgtacactctgcttcggcctcctcgaaggtgaacttactgggagcagtgatgtggaacacatcgcctgcaagaggaggaggaaaagggcttaggtcgacacctcattctctcccagatttgataaatgctgagggaagacgtgatacttcttacagtgaggaggcagctgcttatgcggtagagcaaacagtcacatatttattttgagaaaactattattaccatataataaaactatataccataatagtttaattatttataagtgtttgtgtatgtatgcgtatgaatatgtgtgcatgtttacacacacagatatacatatgtgtatatatatacatatgcatatacatatatgtgt

SEQ ID NO: 4124 - DNA, 1200 bp, mus musculus; identical to SEQ ID NO: 4123

SEQ ID NO: 4125 - DNA, 1200 bp, mus musculus; identical to SEQ ID NO: 4123

SEQ ID NO: 4126 - DNA, 1400 bp, mus musculus
taagagttttctcaggattttactgatgaaaagaacttattcaactgttaataaggtaaattaacttctaactccagttgtcataaataaatagtaaacactaattgtattaaattcattttttttacttgcaaataaggaaacaccttgtccaatacaactggaggattgtggctaacagtgtatagaaagttgtagtagctaacaagccatgacattgttctactaaatgtgtcacatttaatcagcatgcctcttagccaaaagtcacatttaaccttcaaaccatcactaaccatagaacttaatgcttattttaaaagttctacaagtttacagggatataacatggtccttatatggaagaagattctacacagcgaggtagaaaactacatgtaagagaatattgaaagaatgatcagtggatgtgaagaacagtctgacaaaagttcatgatatgatgttgtaaatgtgagttcacccctttgaacctcagaatcctcaaatataaaataagaggagactgattctgtgccacagcactccatactcaaataccacccagagagagctggtctcccaggagtgctgacaagcctctgagcacaggtaagaccaccacttctgctcagagggtcccacctggaaccctcaggaaacaagaaatgaggagcagcctgggacagaatacttccagtttccatctgtgcccagaactgaccctgtgccacagttctccatacccaaatagtgctgagagagagctggtctcccaggagtgacaacacacatgttccaacagataagaccaccacttctgctcaaaatcctggcccaagagggacctgcccagagccatcatgacagaggaattaaggaacatccagggacagaattgttccagtttttgtctgcaccctagagctgaccctgtgccacagctctccatacccaaattactcccagaaagaataggcatcacaagaatactgacatacaagcttgcagaagggacaagccacagtcagagacagcaaagaagctactctagacataaaaagatggtgagaggcaaggataagaacataaaaaacagaaaccaaggctacttataatcatcagaaaacagttcccctaccacagtgagccctggatactcccaacacaccagaaaagcaagactccagtttcaaaaatcacatcttacgacaatgatacaggacttcacaaaggaaataaataactcacttaaagaaatgcaggggaggctggggaggcggcctaagccacagcagcagcggtcgccatcttggtccgggacccgccgaacttaggaaattagtctgaacaggtgagagggtgcgccagagaacctgacagcctctggaacaggcaga

SEQ ID NO: 4127 - DNA, 1000 bp, mus musculus
gcagtgtatatcaggatagaagtcgggggacaatggagtactttttagtagaaaggaacaaaaatgcacatgtatagtttaaggctaggatgtttgagcaatctggaaggcaagaaaaggtgggagggaagaatagagggaggaagggacaaaatgtctccatggtctaaagggaagagctgcagaattcagtgcaatataaaacctgcagtcaaggcatctaaatcttcagctaacaaagatggcagctgggaaagaagcacagttttatgtgcatttttaaaactctaactgctactgtgtgtggtagagcatggaggttaagaggaaaagccaagaatttggttaagagtctgcagagtgaccataaggcacagatacaacggcaacctgaacaggacagtgattctggaaatacctgttagccatcagtctgaaaccttgggaacaaatgacttcctataggttggatggcagggctgtcggggatatgctatcctggagcacaaggaaaggtgacagagagaagagcatgacctcagctggaaaggaaggtgccaggaagcaagccctgcccaagtggtactgagccagcagtgggggcttcaagtgaggtacacaccagagtcagaaggcactgtcacttagtgcatctgctcaacatgtcttaatgatcctgttcctgacaactgtgctttttctttcccaagtaagaaagcaccctggaatgactaagacatgtcttaattatggagacctctaattgtaatgattctgcactttatgcgggaaaggatatatagcctggtttgtataatgcttgaagcaacaaggtctaggaatccatcagcttttaatgcatgacctcattgttccctgcaaaaatcaatcaacctcctggtacccatattgaaaagccatagaaaataagtcttcttgggtttgtttttcctttattcccacgggaaattctcaggtcacggagcaaatgtgagaccac

SEQ ID NO: 4128 - DNA, 1200 bp, mus musculus
tgcatatggatcttgctgatgacttagtaactactgcttccaggacctggaggagccagccacaaagatggaagagcggccatgctacttacaagaacccaacgtgtagaatttgtttaagataattagagcagttaggagggccaagtgcagaggggacacaaagtagtgggtttagggattgcttgacaggtcccagcatggtcatttaactgctctatcaactctagtgaacacttaatcttctaaataaaactaaggaaaattgtttctggcgtcgtgttacagtaagcagaattggagaattaacaccaagaggaactttcatctttgcatctcacccaacacttttagctcatatacacaaacaaggcccagaaatgcagctggcatcaaggcagtgagaagcaagggctggcactgcagctacaacattttgttctgcctacagtgttcatcctctgttcccttctggagggaggaggggatcacagaggcatcagtgaaagaggcggctcaggaaccttaccaaagctacaccaagtcacaaggctcctctccgaggccacataagcagtaaacaacagctagagaagcgtctcctcggtggattgcctgcctagggtcggaagtttcatggataaggcatctataagaagtcaaggtggcacatgcctttaatcccagcactcgggaggcagagacaggaggatttctgtgttcgaggccagcctggtctacagagtgagttcctggacagccagggctatacagagaaaccctgtctcaaaagaaaaaaaaaaaagagccaaggtaaagtggacttttcaccacttctgcttccgctgccttcaagctgcccacgcacctgaaagtagtcccaatcacgtggtctcctacacagagttgtgggctctcggctctcttgagccgctctttacgcattgaaaggatgcatgtttgcttcagcttgggaaaagtcactcagctgcgatagtaagccacttctcaattattactgcactggattttggctgatactcaaaacataatagcatttttagcttaatgttttgcttttttcattatgtagtgttttaaatatttggatttacttaatttgatattaagagttattagaaaaagaactcacaatacatttattttcctcgagatgttactaattcactgaacgagaag

SEQ ID NO: 4129 - DNA, 1000 bp, mus musculus
gtatattattccttaggcaccatctaccttaatttttgagacaggtgtctctcactggcctgggcttgacaattaggacacactagatggtcagaaagtctcagatatttgccaatgtccagctccccaccactgggaaccaagagaagttgacatcagctgtcttcctttatagctctctaccttactttttgagactggcctctcattgctcttggagttgatagtctcaaccagactagccatatcccacgctccaatgatcaccccatctcctcctcctcagtgccaccatacctgccaactgtcatggtttctgagggctaaacacaagccttcacgttggcagggcacacattttactatgtgaactttctttccatccccttgacttgttcttgaagcggacttcacactgttgctgtaaaccttactcaattctgaattggtctcatgagtccatactaaatatggaaaaatagaaatgatgaccccatcatttgcaacgatattcaaaactaacaccaaacaaaaacacaatgctaaggttaattaaaacaacaacaaaaaaagcaacaacaacaaaaaaacctaggccagaaatgattgcacacatctgtaatgccagcagagggaaccagacagggaagaaggaagagtttgaggccagcttgggcagcacaggaagaccctggtgaagacaaactaacacagttaaactcactgtaccgcatagcatgctattttagatactaaaacaataaccttaagaacatgcgaaatgtttcattctttgtataattatgaattaaaacaatgtaatgccttcaatgggcaaccatgggcctgggtcactgctggcctgggaaggagcacgtgtatcttgtccttgtgatgtctgccttgtcttgtcaccagtgctgttgtgtggccccacactccattccctccacagcctatcccactgccaactatgctctagacacactgctttgacact

SEQ ID NO: 4130 - DNA, 1000 bp, mus musculus
tggtttgagcagtatttaatgtttccattattataactgactgctattcatagccctgccatgtcttctcagacaattttttcttttacagttttgctactggaatgtacctgttagaaagtggcttagattttctgtaatgtcaatgttatttgttaataaatgtagttgccctgttaattttctttgtctctgttttgttaattgtttactttacgttcctatggcagcttcccctccccctcttctcctagtctcctccccccatcctatccttcctttctcctcagctaagggcagggcttccatggatataatccctccttggtgtatcaagttgcagtaagactaggaaaggcagtccagttaggggaaagggatccaaaagcaggcaacagggcagatacagcactgctgctgtctggagtcccacgtgaagacagagctgaacaactgttccctgtatgcagaggtctgtcccatgcctgctctctgggggttcagtctttctgagcccctgtgcgcccaggttagttgattctgagtgttttctaattctttttttcttgatggggtggggtggttctcatgctctccaccattctaagatgtgctggtttctctgtgagtgagggcttgtccacccacacctggtttctgaataatgacttggaggctatttctacatgaatgaatgcctaggccagaagcttggacttgcttcctgactcttacacgcgttcttgtgaccggccaggaaagacgcaacaaaccggaatcttctgcggcaaaagctttattgcttacatctttaggagccagagcgcaagagagcaagagagaaagcgctttattgcttacatcttcaggagcaagagagcaagagagcaagagagcaagagagcaagagagcaagagcaagagcaagagagagaatggcgaaaccccgtcccttttaaggagaattatcctccgcctaggacgtgtcactccctgattg

SEQ ID NO: 4131 - DNA, 3000 bp, mus musculus
tgctgtggtaggagaactaagctgtagtgaagacatactgctctggctgttaccgattgtgttcttttgctggagtttaggcatgtttgatgtgattatatgtctaggtgctgatttctgggtttctctttgttgagtgggtattttgctcattgatttccatttcttctcttgattttcagagtgtggtggctgtgtgttgcctgttttcctggcctgatcagttggtgtgtttacagagaatgcctgctggtgtgggaggaaaggatgcagggaagagtgtgagcaggaaggggagggcagtctacagggacatgaacactgggaaagacaggctgcagctgatgttcggttgcagtgctagttgcctgagagatttggtctcgggaacagagagcatgtttcacctttaggatttttttaatcctttattttttgcaatttaaacatgatatatttttgattgtatagtggttggtgttatgtgtttcctagttttagtgtttggtgactgatagtaattaagatgaattctcaattttttgtgcttcactcatgtggtggtttgaatatgcttggcttggagtgacaccattaagtgtggcctagttcaagtaggttggagaaagtgtgtcactgtggggatgggacttgagactctcctagtagcctcatgagaaccagtcttctcttagcctttggatgaagatgtaaaactctaagctcctccagctctgtcctctgtagcactcttaggtctggttgactccactccattgcctctggtgttcttagtgatcaactcatggtactggcatctccaacttgctgcaactaggcttcaccaatagcctctcataggctcccttcctggtaccaagcctcatcttctttgtaggaccccttcagtcctgggttgtcaactgcagttgaggctattaccaagtctagctgcaacacaaagtacaaccttgactatctctggaaaacaccttctttgtgctctcagaaaacactttccagaaagtttctcctcagtgatactctttttttttttttccttcttttaatttattgaatgtatgtgagttcactttcatctggccaagcatattcaaaccaccacaacatactacatctatctgtcttggttatattataccttatattatacatattttagttgccccatagttcgtgcataatttgccttgtcttttgttttgtttttagtgttttttttcattctccttatatttctgtttaataattggcagactcgcagtcttccatcagccattattactttactaataacactcaaggtagaggaaacttcataatactacattcccaacacgcttctgaacggtctgttatttgtcctctatgaaataaaatagggtcatttgttttaaagttgtttgaaaaaaatgacatagacacttttgtgcttgtaaataaatatcagaaacctagaaatatgtgcagattgggaaagaaaagagtagagatatatagagatagagaagcagggctgctcaatctttatagaaaggatactggaaaccttggctactgtagtaagaatagcaaaaatgtcaatgatacttatttagttgcctctgttcttccagacatgatttacctgtcatgtcccactgacctctgaaagagctggtagtatatcagatggcagtaatagtagctaatacttattgatcccatattttatgccagtcactattgcaattgctttctctaaatccattcattgaatctctgagcaatagaacagctcaatactgtcagcatgtacattttcttgggaagaaatctttgctgagcttcagtaacagaagtttcacagaggaaacacattcttattgtcttgcttttaactgtatattttacattgtgttatagtatgtgagtcttgccttggtcattgcttgcccctttttaattttttttaacttagtaccaatatcaaaatataaaacacattccaactgtttaaagaccacagtttttaaaaattgtcctaccttagaagttcaatctcttacatatccagagttctttttgaacttgtatttcaaaagagaataacagggcacatttacaatcaagttaaagaaaacacaaaacccagtagtatagaaagttcactgttgacattctgggatttctgactgtctgggctcccgaggacctggcagctccactgcactgctctgccatctactgcactgccactctgctcatcatttcaggaagactccaccccacagcgtctgctgtcctcattgtttgtcccacagtcctggcatcccaataccgctgggtcttcagatagctgcactgtgctagtagcccgtcctggctgtcgttagggtctctagcccttgcccatgatgctgtgcctcagctcagtgctttcatttctgtgttgtgatgtccacttgtccagcctaacagcctggcacatgttaaatgttggtgtccacacttttgttttctttctcattcttctggcccctgtactgtggagaaaactccccatcctcatattgagttcttgagagaatgtaactctcattgggtcattgagtcctgtgtctatggatcttcaggacttctgttgaccatctcatctcatggccagctctctcctatcatcaaggaacccttgtctgtcttcttcaggtcagcaagcattgcttccttggggcttgttagcgttgctattctaataagaatgtttataaagtcctttcaaacatacagtttttttcaaaatcagcttaaccaaaacttcagtgaagctcattcaatatttgacagctttcttcttactgtgcatgctcacagggtcttacatgctctgacccaaatcacctgcaatgtgagtaggcctttgattttcgtgtatttggagaggtttagcctactcttaatgtgtggaagatggttgacagtgcctctgctgaggcataa

SEQ ID NO: 4132 - DNA, 1000 bp, mus musculus
gtggatgaagtgcaccagaatggtggacagctttgtacccaggttcccaactgaagacagacctagaaagaagagtggctgtctcaagggaagacaggacttgtgttctctttcacatggatctcagtgtcttgtctcttctcctaaaagcccaagtcatcgcaacttagagaagtagctagaagttgtaactctgatggagactgcaccactcagcaccctgcagttgctacctcaaaaacctccacagagctactgagaacagaagcaaatcaaggccactggatgaagggtggggatcaggagcatggagaacggagttacagtgcatccgtgccctcttggtccctgcagttcccagtgcttgctaatcctatctcaccaaagagtggatccagatctctgaatagaccaccaagacagggacagtctaaaaagacacattagtagtcaaggttccgaggaataccacagtaaagaaactcacttgtgtaacacagctctcttctctcccccatacttttggaagtggacacatctaaccagtagaaccaaagcatacaagtagatagatacaggacatattttcagagccacttctccaagactgcaaactctgtggcaccttgtttggtattttaaaaagccccttacaataatccttattaataatacagccaagccctgccccacctctaccttacctctgatcttacccaaacattattttttaatttgaacttgaatgttaccatgtaaggtaaactgagtctagcctcttctccatcctgtgagttgaacttggttcctctatcaagaattaccttggccactcctagaaccctcagcaaagacaaagcagaagtcttcgcccctagaacatgaacagactttcctagccctcccaggtaactagaaaccattggagagtgtgtcccaacacatcctctcgtctcctgttatcaggggcaatcggacatcctaggggagaccttgaaat

SEQ ID NO: 4133 - DNA, 1000 bp, mus musculus
cactccagatgttacctgacatcagttaaatggtctccaaactggcttccagcgaaattatacaaaagtaaggtgtcacttggtactaataaaacctctgataactcctgtattagggtttctatagctgtgaagagataccatgaccacagcaactcttacaaagaaaagcatttcattgggttcaggggtttagtccatttccatcctggcagggtgtatagtgtcacacatacacattgtgctggagcagtagctgagagttctacatctagattgacagatgagagagtgacactgggcctggcttgagcatttgaaatctcaaaccctacccccagtgacacatttcctccaacaagaccacacctcctcctgtcattccctatgaatctatagtgggccattttaattcaaaccaccagcagctactaagtagcttttccccagcttgctgcttctaacgtgacttagtagataatcttataaggccacaaggtggtttgcaagtcgttgtgactccagttctaagggatcgaatgctctcttttagcctccatggacactaggaatacacatagtgtacatgcacacatacaagcaaacatttaatacacacaaaataagtaaatcttatttactttttcaaagaagtggtattgtcttggaacatatgcagatggttttgatcttgtgaataacctgaacactattagcatttaaacactggcttgaaactggctggaggaaatctttgcaccaggtcatatgtcaagttgtatatgtaactattaggacatccagtatctgcttgggatttatttactgacagactcgtaactgactttgaagggttttcttctcagacagtcctagtggggctggctcctcagccattgtcagagagcgtgatgatctgctccttgccaaccagaaaaccatggcaactgcagtccctgggcagctgcaaggatgagcaagtgaaccaaggtaagccagt

SEQ ID NO: 4134 - DNA, 1000 bp, mus musculus
tcagtgagcgaccctgtcctaagaagtaaggtgaagagctagagggagaccgccacgtgtgcacacaaatgccatacacaccctcccatttgcacacatgaacagtgtgtttccttcatgttatattaaacatttcaccagtggcagcctgatggaaatctatcttacctgctttcaccagacgcacggcacactctccagggggcacgccatgcagatctccctcgggcccaatgcacatggtagctgctacgggcttaccagatgcttttaaggcttccactgcccacacggcttcttcaacatgttcaaaatactgaaaccagtgaagggcagaacacctttaatcatgtttcccacaaaacaataggaataccatccgattattatttgaggaactgtctagtagtaagcatttttgacccagaatagaaggaagagagagtttcttagtgtgactagaagacaaacgatttgaaagctgctgtgttaggtgaactgagtcagaggctgcagaggtcttagatggaaaaagatctggaaagttaagtagatattgtcgctccttgttgaggtttgaactgcatcctgttctggcctcctgagagtaaggaaggtttctttctttctgaatggatttcccttgctcacctctgcaatgaggaagtccacgttcttcttcatgaacacctctagctgttggcgaaatatctttttcacttctacctcactcttgcagctaaggtatgaaggcgtctggctcacgcctcctgcaaccaaagcgtctccttcatcagccacttgccgtgcaatgtcacaagcagcttcgttgactttctgcccctaaagtgggtaagtagggggacacgtctaaatttacaggtgaaattggaaaaatatattacatacacgcccacctctcagttttatttttagtgtcattgtttttttttcccccccaggaagcaagggttatgtagatcaatggttgaccgagtct

SEQ ID NO: 4135 - DNA, 1200 bp, mus musculus
aagatacctgtccatgtcctgtaagtggtggaaaaagacccatatgtaagatgagatagaggagatgacagccatagggttttgatcgagtcaggtgacagacttggctgtggccaacagctttctttggcacaggcaattggagatagtatttccccaaagaaggaaagactcacagggaagccagatctttgtgacaatataaactggatgtcaccctgtccttctaagatgtgggtgtgagagaactttacatttgtttgtgtgattgaaacagagtctcactgtacagtcccgcctagcctagaacttatcaaccagtctagcttcagactctgagacctgcctgcctctgcctcccagtgttgtgattgcaggagtgagtcactacacacacacacacacacacacacacacacacacacacacacacttcaaagatccgtttattactgaagatgctagagcaaatgcctggctccaggagctccttcagagtaggccctgtcaccgcctccaaattctgtttaaggaaatgagtagatggtgagaagcagagatgtcttccgtgacgtcatactagggaaggggacattcagtgacgtcatactagggatcagtgacgtcatactagggaagggagcagatgaaggagcccagttaccccagttctgccctgggataatggacgagattgaggtttacagggagaaagaactgggtcatggcaaagggttggagtgactcagcatcctggtcatggtctgccctggtcagatatcttgcttctggttctgttagaggccctggccaatgctatgacttgaggggaccaatctcaggggacgattacttctgctccggggtgtagccttgcccttgtgtggtggggaggggctgattttcaaggttctgctgtcccaaatccaagggggctggggagtcttagagccggagttatctctgtgcccgcaacctctgagtggggataaagtaggtttagacaggcacttcctgagcaaccaacatgcctacgtgctaaagtgagaggaggccactcactcactgtacaggagacagacagtcaaggcacagattccagacttttatcctgcacgcagttaccttgttggctcaagaagggagtgaatacttctaatccagtagttctcacccttccaattgttatgactctttaat

SEQ ID NO: 4136 - DNA, 1000 bp, mus musculus
ttgagtgggcgctgcttactgtagcttctctgagctgccagctgcagagttcctgtgattgattttagccggcaccttttatacctgggaactcccaaagcacttaacaaagcagtgagcgagtgtgaagctgacggagatagctcaggcaaacactgcaaacactgcgtcagcaccagtccagctgcacgagtccagccgcatgggtccagccgcgctcgggtctggctgcacaggtccgactgcacgggtccagtcacacgggtctagtcgcacgggtcctgctgcacaggtccagtcacacgggtccagccgcagggttccagtcactcacattgtcccagacttcaaagtcttcagaggagtaacggttggccaggtcaccaccatcttccggtctgtttccaatacccagtgcaaacaggacaccagaaaagacacaggacagatgtgatcggccactctggatggcttcagacaatccacttctttaagtcttcatttcctggttggttcaacggaaagattagatatggtggtccggtccattcaggggttctaagatttgcgttctcaattacttattgaggccggagaagtggtcagccgtgactcgggacagccctttgaggatgtcttcagagttgtgggctttccctctgatggggtgcgttgtggtgtgtatgtatgtggaaagaacaatttcaggagccattcttcagccaatgtccacttttgtttctcgtgggcctggaactcatcaaatagactaggatggaagacccctgagctccggggtctctgccaccccagtgaaggggttgcaggcatgagccgctaggcctggctttgtttgcatgcattcttgggttgaataaagaccctcagactggtaaggcaactgagctggctgtctagattcactgctcattaatacctggcatattggttagcacataatagcccctcaataaatgttagttgagtgaatgcatgaaaa

SEQ ID NO: 4137 - DNA, 1400 bp, mus musculus
ggttttctctcactggcctggaacttaccaagtctagcgagccagtgatctctgttttgtcttccgagggctgggattataacacaatagcctaccagactttaaaaatgtaggctccaatgtaaatgaagaaaataccaaatcaatcaatcaatcaatcaataaaacaaacaaaaaccaaacaaaataaaataaaatgtaggctccagaaactaaactcaagttcttaggcttgcagtgcaaagactttatagactgagccatctccccaagccaggactgtcagttctaatactgtttcaataaaatcttttttaaattaaatttttgttctgagattctaccagtttacctgtttttgtataatctctgcttgacttcttccttcttcctttcttgacttttttttctttaacttctctggaataatgctcacttcattaattttcagccttattttctaatatgcatttaatgctatcaatgtttttgtgcaagactgcatacatgtgagggcacatgtgtgcacatgcatgtatgtgagtgtgtgtggaggccacaggatcatctcaagtgtccttccatcttggtttttgagagtgggtccctcactggccctggagctccctgagtaacttaagttggctagccgtgagcctcagggatctgcagtctctgccccacccagtgctgggactgcaagtgcggtccattatgcctggctcctgcagttaaacacaggtcctatgcttaggtgataagcactttactagtcgaagctatctccccagcactaaaactgtgtgtgtatgtgtgcacgtatgtatttggtgtgtgtaccaaagaggatgcacacagagaccactggagaagtctgtgtgttttcctacactattctctggcttgtttgtaacagggcctttcatggaatctctagttttccatttcagctaggctggttagtcagcaagctcctgagacctgcctatctatgtttgggtcacaggtacaggtggccatgcctggccttctcaaactcaagtgcttaccacagttaccagcagttgtaggctgcccactgtgcatgctgggaatcaaacgccatgtcttctgcaagagtggtgtatgctcttaaccactgagccacttctcctgcttcagtctgtcattttactagagaatttaatccaataatacttagcacaattatttatcttctttaataagaggacctggaattaggtttttagtaggataaggacaataggaagtctgttctgaaatatttactgtgaattcatattttctagatgtgttctaagtgctgagaaagcttacagttttaatttaaaatattctatggaaaaggaaggagatagtgggagtggttttaagttgag

SEQ ID NO: 4138 - DNA, 1400 bp, mus musculus
tgtatatgtaacagaggatggcctaagtcggtcatcagtgggaggagaggcccttagtcctgtgaacgatctatgccccagtataggggaatgccagggccaggaaacaagagtgggtaagttggggagcaggaggagggggaggggactattggaggggaaaccaggaaaggggataacatatgaaatgtaaataaagaaaatatctaagaaaagaaaagaacagaaaagaaaagaaaaaaagaaaagaaaagaaaagaaaagaaaagaaaagaagaagtcaaggagcctcacacaggatgtgtaatcattacatgactccatattagttatcacgtaccttctttaagctttccaacaatcttgtaccagtccttgatgaccatggtaatgttttgattccaaaatacttatttttggaactctaaacatgaaagcagttgaactaatcacatggcattctctgcttcaccaggaaggtttaagaagaagtaagtctgtgagtgagatggggaggggaaggaaggccagcagcaggaggcttgtccttttgtcaagggaccgggagctggggcatggctgtacccgatatgatcacatctcatccctctgttacatctcaatgtgcttgttcactagccttggggcaggaactaagacagtcatggccccacaggacaccttgaggagcatttgctctgagcctcagcagtgggaagaatggatggctgatgtctgagaggagcctgtcctgcaaccaagggcagtgaatctaagatctgtgttcatgttcatttttaaccttgttcaccatgcttgtacaaagccatttgcagcagccaacaaatcaagttccagacttcaaggctggtttccgtctttgctgtaagactaagcattatattccgagagccatcgttgctctggtgaaggcccctgacactgacaccttcaatgcaatggctcctgactctctggcacttgagtcacaacagggaataaaccacagacatttctattcttcccaaagaccccaaaatgagaccgcatgaaaggggaattttccttcctgctaaaagctacattatacatttcctagtttgatagtttccagtgtcctgctttccctccattggacaatttcccatccttttccaaactaatccataagctaatccttgctgaccacccctggactaacgctcattttctcattgttactttacacaggatcctgccccttaataagtttgtcctattttctttttggccatgaacacttgcttccttgttctgggaatctgcagacacatctattccttctaaactctaatttctcagggtaggtattctcattctctctctctctctctctctctctctctctctctctctctctg

SEQ ID NO: 4139 - DNA, 1000 bp, mus musculus
ggtaacacaaaaactgcctttgtgaaggtcactatggcccattgttttcatgtttatttttcagttttgctgtttactgttcagccctgtaatgtgtggggaggaaaaaagccagaacttggagcctaggcactgctgtgtattgctgatgctaatccagaggaagaattattagttctagatataggtaatagcagaagccacctaggatttctaaagtcttgctcatcgttatgttttccccatgggctgaatgttccacagaccccaaatatgaccagttaggttcagctctcccacaacaccatactccaaaaagccaagactccaagattccctgcctcaaatagtctacgtctaacacctgcctgtggctctagcttcttgtgtgtcctttgtagggctgagcagtagagcagggggactgttcctaagtgtcgtggatacagctaactctggaatggcttatccacgcatgtgagtagagcccctcatggtgggaccaagttagctagaagaaaggagtagaccatgggccagactagaacaactggcctcttctcttgcctcttggcactctagaattctgaggagtccaggaatactgaattttccaactatggctttccaagttgctaaacaaatttactcatcaaagttggagactgtcttacagcttaatagactttaatagaccttgttccattttcttgttttgtttcatggtgtaagtgtcttcccttgaccttttgctcctagccctccagatggtggggtgaatatggacaggctcgcccttccctctcttctctctttcgctacttctcactcccaccttacgcagctcaccttgtttggttctctcatggagacctggtgaggtccagttccaaccatcagtactgaaaatccttctgtttccctctctatgcctggctttctcagatcatcctcatttgtcagaatccagtacatgaagatggctttttagaggataaat

SEQ ID NO: 4140 - DNA, 1000 bp, mus musculus
ccatttttatcgcttataaattttcataacgtatgtatatttgctttataacagaaagtagcagtagccaggcctagagtcctagaactgttacctcagctcattgggaggctggggcaggagaattgcaagaaaaatgcatcctgggctccagtgtgagttcaagtccagcccaacagcttagtgagatcttgtcccaaaagaaagaggaaaaaatggctgagtttacgactaggtggtgggatgcttgcccgacgtgtgtaaggccctaaatgtaatctctaatcctgtaaaaaaggagaatgtaacaatagctagatgaaggggactgtgacatgagggaaaggctcgtaggtgtgtatttgaggaggaggaggaggatccgcagaggatggaggaagtgttcatggtgagcttcagagcgttgttgtgtcgtgtgcagactttcctctgaggggagcaaaactcatcacgttggcgtgtaagctaagatgctgactgtgtgcagaaagggtatgacccaggctggagagatgctcagtggtcaagagcacagctgctcgagcagaggacccaggtcaggtgactcacacccacctgtgactccagtcccaggggatccaatcctctcctctgacccccacaggcactagcaagtctgtggtgcatgtacatacatgcaaggtacgtgtatatagcaaataagagaaacatgtaaaaataacatagaagttagagagatgactcagagtttaagagcagacgttggtctggcagaagacccacatcctttcccagaacccacaatggtctgtaaatccagtcccgagggagccaacaccctctcatgacctctgagagctctagacacacatctgaagcacatacatccatgcaggcaaaactctcatacacataaagtattaaacataaacataaaaaattattcttataaaagatatgattcatctgtcatgtttctgcgcccatgaccggaatc

SEQ ID NO: 4141 - DNA, 1000 bp, mus musculus
gtgccttcatgagttctgcctagtgggaataaaggaagtgtccaggctacatatggctttgcttgtggaggttggaattgggtcagctttcccatcctttcttcctcttaagctgtcctcttttgttgttcctccgtggtggagttcaaacccggtgtgtgcacggtctatgcaaacactttacctttgtgctgcatcccctggctttgggtcactgtcttctaatgtgtatggtgtgtacttactctgacctaagaactctgcctagcatcgaaaattcattcttgctggcaaggaatcagaggggagaaatgtactccaaatcctcatgcaggtacagagccaactactcagagtctgcgcatggattgttttgggtctgctgtgcagccccaggctggctcctcagacacccaatagtcttgtgccgtgcctcccaaggtcaatcttgtcagctcttgcccgttcatccaaagttagctccattgcccttccctaaagagaacagtgtctttggtaatagaaattcaatctagaatcttcaacattagcttgggagacctctgtcagtgagaagggaaagctgatataagccccaggagatgccttacctcacatcctccctgtggtttccctcaccacacattgcacccaccagtccccccagggactgagggcagagaagaatgctcttaacacgctgctctaagcacagacgcagaatccgtctttgtctccctcactgcaggaccaaggaaaaagctgaagctcccaaatgctgctctcctggggcactgggacaaaatggaccccagagtcaccactgtgtacttttcttctgtggaggagtagcagatcccctcctgagatctgtcatgtatgcacccacactgggtggcccacaactgcttggtcgtctgcatgcacatgggcccacacaggttacacatccataaactcagacatacgcacagatgcatacatctctaaaagtctgctt

SEQ ID NO: 4142 - DNA, 1400 bp, mus musculus
gcaattgtggaggactagaacattctagaagcagtagcagacagaggtgggcgggtagggctgggaggagagatagcgaaggtgtgtggggaaaaggaggagacatggttttcgttttggaaatccaacccccttggggactcagagcccaaaccctttgtgcccatctaccaagttctgaatctcggtccgggctgtggagggcccacaggcaaggcttcctctgaatcgctgctcaaaggttggctcctgtgaaaacaccgccatctccactcgtttggggatgtgaaaggtttaggatggtgaactcagtcacactagtctgggaactttgacagctgttgtgtgtggtcaggggacgcaggggcactccaaaatgagctgttgagatcagaattgccctaccatgtggagaaattacctacatgcctgccacagttacataacaacaagagatgtgattcagtgctttctgactgtcccggaaagtttgactgctgtggcacatacactaagagggtcgtctcatcactcctgggtcaggtaaggagtcagaggggttctgtggctgcaaatatctactttagttactgctacacatctgagaataggaaagccctaatttggtcaaccagctccctcatcccatagcttttgtgacccaagaccagtcaaaagccagaacttaggcaaggcacatctctttcctgagggccatctagccactgaaaataacatattcatctagctttggaacaactttccttcaaaattatcaagttaagacaagaataaacatgtgtcttatacagtttagtagatcagaagtggaggggtgtctggcttgtgagtcaagattgccaactaaactggaactggagggttgacctccagcgtaagtactcatgtgctgttcaatatgctggctgtggggaggaagcctggccacatggactcctctatggggctgctgcagcatcctgatatctggctacctcatatcatgggataccaagagagagtaaggcagaagcttagataatttttaggttcttgtttccgaagcacactctgaaattcctcatattggtcacaacatcagctctatctggtgttacgatggagctacccacagataacggatgccaggagataacagtcattgttgaccatcctgaaagccttcttccacaaagagctacaacctgctgggaggtatgagatagtgttttgtcaatcactcactgtacatgctacagttactatggttttaccattttagcttaagtggagaataagcccatgtgctggatgcttggtccttagctgctgctgctgttttgggaagttatgaaattttcaaaaaatgggacccagctgcaggaagtaggccactgggg

SEQ ID NO: 4143 - DNA, 1400 bp, mus musculus
tgattaaggatgttggacttttttttcaggtgcttctctgccattcagtattcctcaggtgagaattctttgttcagctctgagccccatttttaatggggttatttgaatttctggagtccaccttcttgagttctttatatatatatatgatattagtcccctatctgatttgggataggtaaagatcctttcccaatcagttggtggtctttttgtcttattgacggtgtcttttgccttgcagaagctttggagtttcatgaggtcccatttatcgattctcgttcttacagcacaagccattgctgttctattcaggaatttttcccctggaaccacgatggcccctcgtggatcctgaggcaaaggcctcccaggctgggtggacacctgtcctctggccaaaaaggtggccggctgtctggagcctgaaaacagcgctgccccagaagctctgcagctctcacgtgtcccagaagctgctagcctctgtagtccacactctcacctgtgcagactgccctccgcggagtcccggaaccaaggtggctctcgcagaacctgcagcagaagcctcccgggccgggcagacacctgtcctctggccccgaaggtggtcagatccagcagcaattcttgaagaagatcaagcactgctgttgtgagtgccaatgacactgcccagtgaggggttgtaagccccctagagatttcatacaactcatagatcatgagggatgcagtgggaaggcagcaagcagagcaaatctctgtaacagcatgaagccctcaggacccatagtggtttgctaaccaggaggctgcgttccatgagttctaaagctgttttgctgttcctcttgcactaccccagcacccatcaaatactgcttccatgatgtggcttctacatagatcgatgtagcgccttcctgttgaccttggcagtggatggttctctatatgaacatgactgaagctctctagtcttcagacaggaggaccaaatatggactgacaaggcacttacatgttcaatatagctcctaaattcaatagggggcatgcaggctttttttaaaattagcagtctgcacacataataaatattctttagtaggatggatagttgtgtctttagctgtgaaacagaatctggtctgaatttcttgattctcgcacatcagtgtcctaaatgttgaaagtacaggtgtataccaccatgcccagctaaagtaaagtgttttaggaaatctggtattctgaactgtcagtaaccttcaggagcatcctttactccaggacaacaggagagaatgggactaccaatttccagaagataatcaagcgtttggactgagggtgtctttccttcacatcattaatcactttcatgt

SEQ ID NO: 4144 - DNA, 1200 bp, mus musculus
cagactttcattccttcataaccttaactcaagtaaacattttcttttattaaaaacaaaacaaaactttttatttgatgtacttttgttaactttctatggattctttgtgaatattaaatcatataccccaatcccacttatgtccctatccctttgtatctgcccttgcaactgccctcctaagagaaaatcaaaaaataaaatgaaaacaaaagtttgttgtggaagctgtgatatgtcacagtgtgtcccatagtgtgccctgtagtccacatatctttccttgcaaatgttcactgtaaggagccattggtctgtttcaagtactgctacactgtgagtactagatcctcaccaggattcctcagggatattgtggtattgctctgtgccgtggagatcctgcagccttggacctgcagaaccagccccttcacatgcttcagaagttcatagatggaatagatgttgggttggaccaactcaaagccctggatctgggagtgggtactaactgagctaggtggttagcctgccagatctcctgcacccacatcaccaaggtgagatccccaacactgccttggttagcccacccaatgtaaggggcagggccagcttttctgctctcacacatcctcagggccagctctactgtgctgcccaggccatgtgcagggcccactctcacatgctgcagccagtgaggggcagggaatgctctcccattctcatgacctcagggtcagctctctcacgttgcccaagttaggagtagggccagctctccagcttgccccaggcagcaaggagtggatgggagggagcatcttacctgagaccccacactatcatatggccagtgaggggtgaggccggctctcccaagctcatgcccttggagctggctcatctgcaacccatgaaaccaaggtcagctctactgtgctttctgagagaggtgccaggctgctccctactgccctagccaggcagagacaaggacagttctctcaagtgcagcagttagtgacatatggggccagctctacacagccctcaaactccaaaaggctccaggcctcataccttagcagcagcaggggccaggacctcaacacagtctcaggtggcatcaccagctgttcatctcaggctgatctaggaagggacagaggactagtgtgtgtgtgtgtg

SEQ ID NO: 4145 - DNA, 1200 bp, mus musculus; identical to SEQ ID NO: 4144

SEQ ID NO: 4146 - DNA, 1400 bp, mus musculus
gcatatgcagctagagtcaagagctccggggtactggttagccctcttgtgcactgaaatggaggtagatggctttagcgttggaggtttggaagcctcatgcataccagctcctctccaggcctctgcctgcagtgcgcatgaccactggctgtgagaagaaattaaactgagttctagtagatggactcatagagttaagcctcgctttggggcacaaaggtagcaataacccagtgagcttgtctccttctccttttctaatgatgactaagtcacctgaagcaaacattacattagccttatcctaaaatcatgggaaaccccgagacaactgaaagataaggcttactggagagcaagctgcgacttcatttcattttaatagtttgtgctgactggaaatctttaaaccaatcccactggatgattttagtggcattttcttggctaacctatcagagagattggtgcatgtggcttgctttctactttaacagcaagggcacacgaggtttgttttccccatgacacagcatcatcccttccttctctctgttaagtgggaggtcctaggtaggagtctggaacccttttccagcccttgggttttgcggcaggctcgttagaacctgacaggggttcttggcacttcagctagctcttggcagccaagtgacctttcactttgaatgtaactaatgtccacttgtaatgtccagctcatgaatattgccagacagattggttgatgggacaacgcataaagacaactggtcagctctgccctgtcctcacttggcaactagtggctgtggatgaaggatgggcagtctctgtggccagggtcctcagcacccagccatggaggctgagctggcactgtggcctggggaggggctgcagtggggagcagagaggggggaggacatgttgggattgttctcaaggccaagtgctacagttctgtgtctatatgaacactatatctataggtggactttaagtatggacttttagcatcataattctggattagaggattagagagatatttgaagatattatttagtagctcttggtattatattgacatatgacacgatataggatattatatttatttagtcactacaatcatgtaactttaaagtatacgtcacagatgtgtatatgtggggcaaagtcaaggaaaggaacctatcagccacatagttaccttcttgtggtagaagtatccacattgacactctactattagctggacttccaggatacagtgttgtaactacagactccaggatacagtgttgtaactacagactccaggatacagtattgtaactacagactccaggatacagtgttgtaactacagactccaggatacagtgttgtaa

SEQ ID NO: 4147 - DNA, 1200 bp, mus musculus
tgttattatagtcttgctctttttatataaatccgtctcctctacctgtgtctaatttaagatatgtcttctatctctaatatggtgttaagtccattaactatcttttgacttcagatacataataattttggttttctggggtgtttatgtgcctttcacttcatttatgctccactttcttatagattattgagcttagacattagtcggaaattctgctaattccacatctgagccacttctgcagctctgtggactatttctgttttcattgactggattttcttgtgattaggggtcaggtgttacctaccccttggcatatgcagcacttattattactgagtatgctctcatactcagtaataaaatgaataatatgaatgtttggatcttggtgattttccttaccatgttgatatttgggcaatgtatttgcccatcagtttaatctttgttggggcagctgaacagcaggcttctcatagggctgtttgacttaccccactaatgttgggcttttctgggggtttctgttgcatgcatattcaaatgaggtcatattctgagtgaccacatgaatgtgtcttagtgctttagctccaggattcttaggagagcccctggagcagttctttgactggatttatggagttaagctaaacatctgtaatttgggtttcatctagcaactcctatgaagactgctggattcttccactagttagctcctccctctctggaacactgcactggttagctcctccctctctggagcactgcactgcactgcacatttactgctgcctcagcctttctgggctcccatgtctcctcagttccgggagccttccaagctctgcatgggtgctccttcctgccccaaggttaggaaatcgcttccaaagatcacagatcttctagcgctcactgtccagttctggaaaaagggtgttttatatgctttgtccagttgtttgtgggttacaggagtcgaagtgcaaatgtcagtcaattactgctccttcctgggaggaagctgaggtcgctctgcctatggttttaaaatggagtcaatgagaactattcaaaggaaaagaaaacaacttgaaataaaaataacagtgacaccgagtttaccgggagtgtatggaagtagggcatatttaaaaactggttgaggtttaaaattagaac

SEQ ID NO: 4148 - DNA, 1000 bp, mus musculus
gagagtatctaggtcacagataatataggcacattctgaaaaagtttccgtgataattttttcaagtctgcacatgtaattgaactttgagtccagaacattctacaattctatgggaaatctacgtgaggcctttggcaggaaggaggcatgctgcgatgtgtggtgccaattgtgtcataccatgtgacacctgtaccttaagtttatcacctcagtggcatacttggcagtaagtaatatggcttttcagaagtgaacaggacaagccataggcatcgggcaatcaagtgtttgctttgtagctcaatttttgtcaacaatttttgaatgttgcatttgccactggaagatttgtggaggggggaacctctttggctttacaactctaaaaatatcaccagtgataacaacagattttagacacgtcatgctcataggtactaaatgttctttgagtaattgacgtgtgttaatttagttaactctcatgtcatgggccaaatggtcaatgaaagatggaggagggaactaaaggtgcatctatatgactccatttaggacatggactcaaaggctcatcacatgccttgttccagaggcatgcctgctaatctgtggcatgtcagagcctgaacaccatggtgcacagtgctatcactttcctaaaaggaatcttccctcatgcccatgcctttgagtgctacaaatctccctccagccaactgagtaggcttctagccaccagagagcaagacaactcctgtggacaggctggcagaaggacaaggcatggttagacactgaaaatctgtgtgtgatctgagattgccacatagtcacaaatggaatctgcacaatgtggacttcttcacgttccttcctggtagcatgtggtgacatctgaccaagcagaggtcttcaataaatgttgatgaatgtgataaaggcttacataatgacatgccatataaaatgttcctgtaataatgagagacat

SEQ ID NO: 4149 - DNA, 1200 bp, mus musculus
acagggaagagcatttgctgctcttgcagggcttctggcttcgactcccagcacccacatggtggctcacaatcatctgtgactccagttctaggtgatcaaacaccattttctgctttctgaggtgcaaacacaacagcatacatgcagcaaaaattaaaaaaaatatttagaaagagaaaacatgaaaaaacaggcacatattgaatcctttgaaaaaaatccccatacgcagatttcagttttgacctttctcggtaaggaagtcaagacacagatgaataaagagagagttgggtgagtggatttatttctcttaatgcagaatccatgctcaatcttatacacgagagaacacaacagaaaccaagatcagaattcttgtgttccctgctgctaagggtttaaatccatcctgttgagtgttatcacagcacatggccacccataacaaccacatctgttacaatgtatatgtgaataataacagactcagattgtttgaaatggaatcttttttattagatattttctttatttacatttcaaatgttatcccctttcctagtttcctctccaaaaatcccctataccctccccacccccctgctccccaacccactcctgcttcctggccctggcattcccctgtactgggcataaaaccttcacaagaccaagggcctgtcctctcattgatgactgactaggccatcttctgatacatatgcagctggagacatgagtccctccatgtgtgtgttttttttgtttgtttgtttgttttttgttttttgttgtttgttttttgttgtttggttggttggaggtttagtcccagggagctttgggggcattggttagttcatattgtagttcctcctatagggctgcaaatcccttcagctccttgggtcctttctctagctccttcattgtggaccctgttctcagtccaatggatgactatgagtatccacttctgtatttgtcaggcactggcagagcctctcaggagacagctatgtcaggctcctgtcagcaaaatcttgctggcatctgaaataatgtctgggtctggggggttgtttatgggatggatccccaggtggggcagtctttggatagtcattcctccagtttctgctccaaactttgtctctgtaactccttccatgggtattttgttcccccttctaa

SEQ ID NO: 4150 - DNA, 1000 bp, mus musculus
ttaaaaattctctggagactatgccttttttcttttttaaaaatacagacattgtaattgtcttactaggtaatattcaaatgttgtaaataaaatataaaacacatgggatagtcaggttgtgaactccatgaattcagccactgccacatgatctgttttgtctctcccatttatggtgtatcactgatggttcaaaggacccaagatacattttcctgttggattagtgaaacatgaaatgaggtctaaaaattgcatctttactatattattactaaatttgagcccctttatatacctcctaaaatagtagttttcaaccttcctaatgctgcaactgtttaattcaaattttcatgttgtggtgactctcaattataaaattatttccattgctattttatagctgtaaatttcctactgttaatgtaaatatctatgttttcttttctttttctctttttgatattttctttatttacatttcaaatgttatccccttttccagtttgccatctgaaaataccctatcctctccctcctccctctgctctccaatgaactcactcccacctcctggcccaggcattcccctatactgaggcatagaaccttcacaggaccaagggcctcttctcccgttgatgatcaactaggccatcctcagctacatatgcagctagagccatgagtctctccatgtgtgttctttgattggtggtttagtcccagggagcttgagggttactggttagttcatattgtggttcctcctagggggtgcaaaccccttcagctccttgagcactttctctagctccttcattggggacccggtgctccaactaatgaataactgtgagcatccacttctgtattagtcaggtactggcagagcctctctggagacagctatatcagtctcctgtgagcaagcttttgttggcatcaccaatagtgtctgggtttagtggttgtttatgggatggatccccag

SEQ ID NO: 4151 - DNA, 1200 bp, mus musculus
cccagaaaaaggaatggccatagccttatgcttttgcttgaggaattggaattcagttttgttttgttttgtttttttcagcaggtatccacacatctcagtcacttagtcatgcaatgactcaggtggagagaaggaatgaacaaaacaatcggtaggaaggcaaaggtcctccaggcagaggtctgaagtagaagagctcccactccattaatctaattatgaggcatgaagcattcttcagaatccaggaaatgaacgcattgttctcccgtgtgaattttcatccaccctctttcctccagaagagaggagaggataaaattataagtgatgagaacttactagaaatgtttgttgctttttcaataggatagcagtgagactactgatcagggtactttagacaattctagttcctatctgccctttagcaaaagaaccgaggtagcgtgtatactaacagctccagggaggacagctctgaggacaagctcattactcgatggtgatgtgagcgccaagctcgaggcttctagccaggcacactctaatctctcaggtcatactggacatctcagggtcagggtaacccacctcgctgagaaacttctgccaactcagcctttagtctcctggcagaagaggacagtgtaaagacagagggcaaaatgaaggctgccaatccctgctatcctcaaatccagagttcttccatactctggactgccgtggcttcaaagttgattgtcccagcaggccggtactgtctcaccaagtccccaccgggacccttgatctgtgttcctctgtactcctttgctcacccagcggacacacttgttgtggagtgggtggaccatggccaaacccatggcttcttttctgactcacataaccacatgtgtttgcgtttcgtaccctctgtgtctgtaatcacaccatatggcaacgctgcgtctcatttgtctgctcctctccatgtagatctttgtggctgcagcacccaattcctacctgacagaaggcaaaagaaacatccatccatgagatcttcgtgactaattagatcataggattatgggttagctaaaaaataaaatagtgcccctggagagatgactcagaggttaagggcactgactgctcttccagaggtccggagttctattcccagcaaccacatggcggctcacagac

SEQ ID NO: 4152 - DNA, 1000 bp, mus musculus
cccttaatgtgtgagcatccagttgtcccacatcttcaccagcccttgatatggtaagtatgtcaaatcgtaattggtgtacaattctctgtgttttcaacttgcatttacctagtaacaagtgaacttttcacatgtttcccttttcacttattttcttctctcattttggtaaaatatctctatacctctagtctagcattgtggtggcttgaacatgcttcacacaaggagtgacactattaggaggaggtgtggccttgttggaggaagtgtgtcactgtgggagtgggcaattaagatccttctagatctgctcctggagctgaccctgtgtcacagttctccataaccaaatcccaccagctggtctcccaagtgtgctaacacatctgagaacgcaggtgagaccaccacttctgctcaaattcctggctcaagagggacccactcagagccatcaggccacaggaaccaaggaatagccagggacatgatcccggagctgactctgtgccaaactctccatacccaaattcctcccagagaggagtagtcccccaggagtgttgacaaacaggctaacaggagggacaagtcacagtcagaatcaacaagttcagctaacaccaaagataaccacatgtcgagaggcaagggcaagaacataagcaacagaaaccaaggacacttggcatcatcagaactttgttctccctccacagcaagccctggatacccccaacaaactggaaaagcaagactctgatttaaaatcatatctcatgatgatgatagaggactttaagaaggacataaataactcccttaaagaaatacaggagagactcgagccccgggctaccttgccagcagagtcgcccgacacccacaagggcccacacaggattccccacaggatcctaagacctctggtgagtggaacacaacttctgccaggagtccggttcgaacaccagatacctgggtaccttccctg

SEQ ID NO: 4153 - DNA, 1200 bp, mus musculus
gagaaggaaggaaagtttgtcactggttcgaatggactggagtaggggaagggaactgattataaaagagcaggaaggagcttcctgggctactgaaaatatctgacttctgactataatggtaagcaactgtctactttcattagtgtctttaatatgtacctcattacttgattaaaactaaatgccttgggttggtgcagggcattgtggtttttaagagctccccaaaggattccagcatcgagttgtggtagcagacccactagtcctcatccagggtcatccagggtcaccctggtacttgtctaaccctgcctctgaatgagggcgggggctactgacttgcttgtaacaagcagaaatcaacagtgggacagaacgtctgccactttattgaagcaggctgcttcttagtggctatgactatgtctgactgacaggctccctggcctcttgctggcccacagcacaagctgccgtgtgggaagacactcatggagaggtcatgcgtgaggaagtaagtgggacctccagccagccagacactggagaggagctgagatctcagagcagtgaccctgcagaaactaaaatcttccaggagtcatagacttggatgtggatccttctaaagagaacccgaaacaattaaagccttacatgagactccaagctagcaggcccacccaagacatactcctagtctttaccctcaaaacctctgaggtaaggcacggtgtttacagccaccatatttggagaaactttgttgcacagcaattgctgagtaacacagcagtcaagattgacagctgctggcacaagtcccttccactcgactcgagccccggctaccttgccagcagagtcttacccaacacccgcaagggcccacacgggactccccacgggatcctaagacctctggtgagtggaacacagcgcctgccccaatccaatcgcgcggaacctgagactggggtacatagggaagcaggctacccgggcctgatctggggcacaagtcccttccactcgactcgagccccgggctaccttgccagcagagtcttgcccaacacccgcaagggcccacacgggactccccacgggatcctaagacctctggtgagtggaacacagcgcctgccccaatccaatcgcgcggaacctgagactggggtacatagggaagca

SEQ ID NO: 4154 - DNA, 1200 bp, mus musculus
gggccatcgatgctgtacgctcgtgcagaaagaggtctctgtgatcctgacatgactggagttcttcccattgaatgtaactctctgtacgataagtaatctccttcagtacgccttgtggggtcaccgagatttacagaagccgttgaagacacgctactctgtctctgaatagtagtccgagtgactgctggcactagtcggtcattcggggagatagcccacatttctccatgcctggctggggcaagtctctgttgtaagtggtatccagtattggctctaacattgttatggttagagaaattcatgttggcagaatgctttgcataactgtgattttctgcactctcagatcttggaaggcgctgaggaggaaaactgacaggatctatttgtggattctgtttagggtgccacaaggtgtctttcactgtagcactgccactgtactggacattatattgtgggggaccatacaggtgaggtgtagactgtgggccagatactgtggcagctcttattatatctggctcttcagggttgtgatttgaatcaaacttgaaaactgcctttgtacctgacagtaactcagaagatgaggaggcagcagtgaacacctgcaggggctgatcatacagcagtgtggcagacttgcttctgactatgttcttcccatccacagcagatgcgattttaactgctgcacttggcggctgagggccatcatcaccaagaatgtcatagatttttaaacctccagtctccatgttagttatactatgagatttcacaacagctccagttggaccacttctctgaggagatagatcttccgtgcttttagaaatgcccacgtcagcagaagaactggccttctgtggttcaaccctaccaggagacggtgcagtgtcctcacaaagaccatttaccttatttatggactccaaattcggaaacttagccccattttctatgtgctcagcctcatttttaggatgaatacttaaaaagcctgttccaagtactatatcctgcatctttgatctttccattacttctggttgaaaaatattattggtcacaagtttattaatattcatgttgatatggtctaactggcgagagtcatcagatgtggcttttgaatcaatgtctttttcaatcagaactaactgttcttcaatattcaaatcatac

SEQ ID NO: 4155 - DNA, 1200 bp, mus musculus
acaagttccacatgtgaatatactatacaacatggttgtagagaactactattgaatattcaaaatagttccttaagctagaagtgtaatataatacacaaaatttagatttttcagccggacagccatgttatttaaatattaactcacttattttctagccacttgatctctgtgaatgccaatttcttcatgtcttaattcatggctgtattaattatcaattgctacataacaaatacagagtaaataagttagcacatattcactatgccagtgtctatgagtccagctatgactaactgtgtcctggtgaggttataatcaaagtattggtaaagactgagttctttgcacgaagcctcgttggtgaagaacggccttctaagtattctggggcaggatttagttactagtatgctattggatggagtgggaggttcagtttcttgtcagtactaggtagagattactctgatttcttttttgtgaatatcttagtattaatattaagttgcttcatttaagccaaagaaacaaagtctactaccaagattctgatccagaatcttttgtaatcgaatcatgaagtggcatcctttcagtattgagacattttattgatcacaattaaattattcaagggatgaggatgacagaagagtgtgtctgttttgtttgtttgttttgttgttgttgtttttttaagagtgtgtctgttaagagacagcccccttgccgtgcggtggtggcacacacctttaattccagcacttgggaggcagaggcaggcagatttctgagcttgaggccagcctggtctacagagtgagttccaggacagccagggctacacagagaaaccctgtcttgaaacaaaacaaaacaaaacaaacaaaacaaaaaaaaaaggggggggggaaagtgacagcccctattaaatctggcagaatctgccttactgcgggggtgctattactttgtaagtgaagactgatggaagtaatctatattttcaatattttatttttggtctgaccttaaattactttcctgtatgttactatttatgcttttgcacaggaaccaaatttcctctttctattattattaatgttagtacgcatttgcttcatctgcacccgcttgccatctaggccttctcaaatgagtttcttctatcagtaatgattatatcta

SEQ ID NO: 4156 - DNA, 1000 bp, mus musculus
ttgggacaatcatccagtctcagtatcataaggtaagtggcttctaatatcctagcagcattggggaaagcagcaaggggcctctctatgaacacagaagcagtgcttatacatatacacagtgctaaggcgaagagggccgcataattattcagtgtacacagactgacacatcatctcataacttaagactaagatttcagaatgcgtacattcacattgacctctgtgccacagaccccagtacttagggacactatttcttgctaaactggttgcaaagcgcttacctgcttctgtagccatcgttcgcgcctctgctgccttcgcagagtcctcaacttgcttctctccctgttgttcagcctgtggttaatggtgcccaaggggaagctggcagagcgcaggaagtccagctgggagaggtgctcctcttggtccgaggcctccagcacgctcctccctgctgagggcagatccatcaggaatggcaggctgttagcgttagcgtgatccgagtagactgaagaagcttctaggccgcactggcattctcttcccctttgtgcctgggtctcatggggagccactgaaagtctgtgcagcagcatattcggatcaaaactaggtgggctttgaaaggagcagctactgttactacacggtaaagccaagcctgaaaggtcaatgggccccgtttcatttagcctgggataggcagtaggcttacgatgtatttcatataaagtgggtaataaaatcagcttctcactgatgttcaggtccaaactgtgtgactttctgtgagacgctcttgaaggacacctgccggtgtcaggctgaggaacaaaaggctggcattttgggtccgaggctttgaagagcagtttttcattcttcatctcaaaatacgtcgctcgcacctccaggcagagtgcttctgtaagtcttccgaggccgttactgtttcgggccatgcttaaaagccagtggtttctgg

SEQ ID NO: 4157 - DNA, 1000 bp, mus musculus
ccactaatcatttagaatcagtatcttttgggactggagtcacaaattctcgccagagaaccagctaaggcactcatctttggatggattgccataaaaaagacagatatcacattgtctgcagggaaatgggatgtcatcagacattgaggcaagtaaaataagctgatcacaggaggacaactagaacaggtcttcttctctgtacagaaccagagatttgttctttgtctaagtgcacatggaagcaaatgcattgctctggaggtcaagctgggaaaggagagtgaagtgtgtcaacaacagtcttggtccccaaattcctcctcaaatcatgatatactttgtcacatcccactctagattgaaagcaagggctctgagtttcatgggatgctggtggagcccagttaaaatttattagaaatttattccgtggtacttccttggatttacccatataatgacctatgtctggctatctttttggtttgtttggtttttgaacacacagtacttttcttagggaagaactctcagataaaatctatcctgttgctatatgtggaagctggcttcttggatgtagtcatttcataaaaattcatgaagctgcccatgttatctatggaatcttttgcgaagtggtattttaagccccccagcaagctccatgcctttgtatttttccaatgcagagtatgtaaggttatcaggaaggttagtaactgtacacactctggggttccactgcctcagagtcaaattcccccccctcaggggatacaccctgcctgcttgaatgccacaggtaatgctaatgcaggaggtactcactatgatttctcagcatggctgcatgtattcttctccagtgctttctagtactcggggctactgtgattgatgaaatctaaagaaaaatgagttcttttctcttccaacagactgctactgctgaacttcaagttccaaaggaaatctacatagatcagaactg

SEQ ID NO: 4158 - DNA, 1200 bp, mus musculus
agggaaatagtcttaaattaattatagatttctacttcttttctgagcactgatttaagtctagttttttcccagttcagatactgtagtggtttgaatgggtatggctcccatagactcaggtgtttgaatgattagtccatagaaagtggcactatagaagggatggccgtgttggaagaagtgtgtcactgtaggggcaagctttgaggtctcatgtctgctcaagctaaaaccagtgtgtcacagagtctctttctgctgcctgcagatcaggatatgaaactctctaatacttcagcaccatgtgtgcctgcatgatgccatatttcccaccataatggtaggaacttaagggttcattggaaagtcaattggatgatgttttgctggggcaaacacttgaaggaacctttcgttaaagtggacatgggtgtgaaaggctaaggcagactggtgaagaaacatttcactgaagcagacacaggagagaggatgttctgaaaaagcaagcacatgaaaagacacatgatgaaggattttttgctaacaacacgcatgtattggtttgccttacactgtgtagttgagctgcatttgttgagactccataaagagaaacacactaaaaacttctgttgggatactgcagtttcttgccacttccatagactcaggctcattggatatacatgctgaggcaagacgtgtgctgaggcaaggtacataaggagatgtaatacttggagaatataaatagggctccacagagtgacagagagctgggcttgctggtatagctggctgtgcaatgcttatgggtctcccatcttcactgatcttcacttccctgagagatgcacagcaaagaacttctcctgatgtccctccagctgactggagctgaggctgaggcttggctgtcttagctaggtcatgtcaccaatgttgctgatgtgactctaccaaactggactgctgatgtagctatgaaatgtttatgagtggatcgagctgtcactgaactgaactgccaattttcagacaacacatacaggagttgctccaaagaacctctctaaataggcccacttcctcccaaccccatatcctttcttttctactaactctggtgggtggtgggctacaagggagattaaggggtttaagaaacattatcaaaaattaggtatgaaataa

SEQ ID NO: 4159 - DNA, 1400 bp, mus musculus
tttctaaattgcggtgctattaacttacatcttttaccatttctcttcagaatcactcaccatggtagagtattatcaactgtccaagtaccacacagatagggaaggcttcagtcagaacattcagaacaagcctgatagttcttaagtatgataagtatgatcatccttaagtaaccctaaccctaaccctaaccctaaccctaaccctaaccctgatcgttcttcagtaactctaaccctaaccctaaccctaaccctaaccctaaccctaaccgtaaccctgataagtatgatcatccttaagtaaccctaaccctaaccctaaccctaaccctaaccctaaccctaaccctaaccctgatcgttcttcagtaaccctaaccctaaccctaaccctaaccctaatccctaaccctaactctagccctaaaccctaacgctaaccctaaccctaaccctaacccctaaccctaactctaaccctaactctagccctaaaccctaaccctaaccctaaccctaactctagccctaaaccctaaccctaaccctaaccctaaccctaaaccctaaccctaaccctaacccctaaccctaaccctaccctaaccctaaccctaccctaaccctaaccctaaccctaaccctaccctaaccctaaccctaaccctaacccctaaccctaaccctaactctagccctaaaccctaaccctaaccctaaccctaaccctaaccctaaccctaacccctagctcctaacccctaaccctaactcatgaatggactagttttatgtcaacttgacatgagctagagtcatccaagaggaggaagcctaaattaataaaacgcctccataagaactggctgtagggccttttctaaattagggattggtaggtgagggctaaacccattgtgagggatgctatccctgggtttgtggtctcttgatctataagaaagcaggctgaggatgccataatgaacggggaagtgaaaaacattcttccatagtctttgcattagctcctgcctacagttactgccctgtttgagtttctgttttgacttcatttcttggtgactagtgatatagaagtgtaagccaaataaactttcttcatcaagttgcatttggtcgtaatgttttgtacctctgctgtttatattgcaacatattctgaatagagtaaagatgagctccagataggcacattgtttcctaaggagcattgatttctggggattgtactgggttctagcagctggcagatggtgtgaatttaaaatgaagagagaatccagtatcagggctgtaaggaagagttcaaggctatcacaaacacacacacacacacacacacacacacacacacacacacacacacacac

SEQ ID NO: 4160 - DNA, 1000 bp, mus musculus
tacccctcttctctaacttgattcatcatataaatgtattcattttcataaagcatattgtcattatttttagctcaattatatcaatgagaatcatactttaaaatgtcttatttatttataaattctaccaaaaagaattttgaggagttccatagcaattcctatagtttagagaagttttggttggttggattggtttggttttatactaaatatttaagaattcctaggctgaccgccagagcaagtgaaggagccatcttgtgtcctgggtccctctgagaccagtctgcgcaggtgagagtgtggactgcagaagctacacagcttctgggacagaccctattttgggctccagacatccgggcaccttgcccaccagaggagaggtggccgcctgggagggctgtgacctccagaacaggtaagggagccatcttgtgtccgggtccctctgagaccagtctgcacaggtcagctcgctgactacagaagagacacagcttctgggacaggcagaagcaacacagcatctgggacaaacccatgttttgggctccagatatccgggcaactaccccacaagagaagaggtggccacctgggagagctctgacctctggagcaggtgagggagtcatattgtgtcctgggtccctcggaaaccagtctgtgcaggtgagcatgcagactgcagaggcaacacatctgggacaggccaatttcgggccttcatatcagccaggaggctggtctgaatgccagacctctgtgcaccttccctgtaagaggagagcttgcctgcagagagtactctgacaacagagactcaggagagatctagactccgaggactgctgacagaggctaacagaatcacaggaggaacaggttctaaccagagacaactatgacaactaacaccagagaataccagaaggcaaaaggcaaacgtaagaatcttaccaacagaaaccaagaccactcaccatcatca

SEQ ID NO: 4161 - DNA, 1200 bp, mus musculus
agacttctacatatcccaaggcctcttgatgatatgaagggatgtcagcttctagtatgtttctgagacccaaggtatacctggatgtgttcacttaaaacgaagcgaacgttgctgtaaagagattggtatatgtatcagaaaatggcctagtcggccatcattggaaagagaggcccattggtcttgcaaactttatatgcctcagtacaggggaacgtcagggccaagaagtgggagtgggtgggtaggggagtgggtggggaagggtatgggggacttttgggatagcattggaaatgtaaatgaagaaaatacctaataaataaaaaaagaggaaaaaaaagagattggtattggcagaagagtgtgactatgtgacacttcccatttcacaggtatgtattaagctgtgtggtattctttcttctatccctggcctgtgtatgtttgtgggactcaaggtggctgaagccagtggtccacattgtcttcaggttcatccatgactgtcatccagttgccttttgactattgtaggcctctcatttcctcatcatcttttcctggttctttcatcctgagcttcatggaatactgcagggtcttaagatgctggtttggtttcatttttgtagctgtgatgaaatcctctgacaaaaagcaacttagggaagaaagggtttattccgcttataattccaggttatagccactattgaggggaagtcaaggcagcaactccagcagccagtcacgtcatgtccacagtaaaaacagacacacgaatgcatccaggcttacttgcttgctggctctcagctagctttctttctgtcttttattgttcaggaccttctgcctagggaatggcgtcactcataatggacttgtctttctaagtcaattagtaatcaagaccacccccacagacaaatctgatctagatagttcctcattgagactctttctagatgattctaggctgtgtcaagttgacaattacccagcgcataaacccaagagtggtttggatgtaaaggtctttctgttgatatctgtagaaatttttaccagaagagacctgtgtttggctcacctttttcacattttaacaaaaacttagataatctaagagaaaaccaaaataaatgtgttttagggcataaaagcatccaggatgtcactctacagtgtgtc

SEQ ID NO: 4162 - DNA, 1000 bp, mus musculus
ggtaggtcctttattctttccttccttttcctccttcccctcttctcctccccgtcattttctccccttccttctcctctcttccctccctccctcccctcccctcctctcctcttccctttttctttctctgtctttcttctggagactttgcaatgatccactatagataggatccaagcagtgcaaagatgagagcctgcctatctccctccattccatctgggctgggtagcagggattagcatgatgaagtaggcacattccttcacgtgtggctgttatctggcagttgaaaggcaaaattcaaaggactgcacattcatgaaaaagccgcttctctcagcctctcctccaaggaaggaagactgtttggggaggctcctcaacccactggaggtggagacttgagcagacgctcccagtttttagagagctgccagtatatcaggtttgttattaaagctgcccctcccctttgtcatttcctgtcacactgattccttaaactagaatctgaggttccttcccccattcctctcccttcctgttccttctgtagacttctgcattgtcttctgtgctctcacagtctgggggtacagttcttacttccttatagaaagatggaggtttgtggcttgacaaacataagataatgtggtagttactttttcatgttgctgtgacaaatacttgtcaaaaacggcttcagggagggaggaagagtttattatggctcagtttgagatcacagttcataggacaggggtgtgaagcagctggtcacacacacacgtactcatgcacgcacacacactggcgtttcgatgcatactcccttttattcagtctgggatttgaacccctggaatgtccaggtcaggttggtctccccacctcagttatacctctcccagacatactggctccttatctcttacttgattccagatcccatcaactcgacagccaggattggccgctacaggtggggtgc

SEQ ID NO: 4163 - DNA, 1000 bp, mus musculus
cctccagccgaaaaagtaatacggattcatgcttttgttgtcttaaggacactgaacaatttagacctcttcctgatgtcctgttggacaagccaaatgactttgtctccttccacttttgtccttgttttccccatgagcctcctttggccttgccacagagtcagagaactctgcgcacgagtgtgtgtcctggctcgtatgagaatggagggggtaggaacccatgtgcagccatcttaccctttctttctctctctgctctcatctctgaactttctcactccgccacattcaccttatcactctgctgctacggccggccttcagcctgagcttctttaacttaaacacacctgaggacactcaaagttaaaatgagctgtttagggagagatcttccttagaaagcctgtgagtgaacttgagttgtgctaatattaaagctagaaagggaaaaagtagaggtaagctttatacctgtgggcatggatggttgtgccaagtcattgccatcagcacactccagaaatgtgcttggaaggaggactacgtcattgcagcccctggaagaggctgttttaaagggaaatgcttcgtctacattaaatgtgtctcagaagtgcagttccactactcactgtagctgtgggctagtcctctgcttctacttgaaacttaccaaggaaatgtttgatgtgtgtttttaattatcactcccttaagtgttctgtttcaataactgaatagtcagcaatgcacatgcctctggaggagttaaaggcagcacgcatgtcctcgaggagcaccttgagagcagcatcgaatccttgggggtgggcggcgtggcagagggggaggggctgctcagaggcaagggactcgtttccatgtccccgctattcccccagaccgcactccccgtgctcgctattatgatatgtagtagagatatgttacatgtatttgcttctgtgggttttgcagatcccctctaaag

SEQ ID NO: 4164 - DNA, 1000 bp, mus musculus
cagtcatcaaaataacggcaagtttcatttaggtcaggtatattttctttataatttcgcagaacagtctccgtgtcctctggacattcggtgaaggccagtcagtgcatctccaacctttactgggtgctgtccacgtggagcgctcagtaaggaaaatgaacattctccccgagagaacgcccacttttctgtttgttttctcctgtgttctccggtttggaatctgcgtagcacagatgtccgctgagttagcaaagtggctgacctcatcctgcgatggtaggaaatctgactttcattcacccgccacagttcaagacaggattctgtccttatgtattgaatattgagcggtcggtccatccccttgaggtccatcttgtagtgacttcacacgacgtcccccaagacctgttagaattccacaacccaagggagaactcttagctgtcggaaatgtctagagccatagagtagctcttctaccagcctccattctgcctggccagggccagtgctgtagcccctgcttcactgttccacgtgtctcatctgcacatcagatttctacaagagcgcttccttaaagttattagagtcactgccgtcttttcttaaaggcgttcaaggactcggcgagttaagacacaacaggaatcctttttggatgcgataccagcttcctttctcctggtcctagaacacagcctcagactgcgccctgttcttgttgaccatctgcaggcacagcggttgttgactgaccctgcagcactgtgcatgggcttcagacacaaggaggaaagaaccggaaaatttggagggaagcatgcaagacactcaatccacagactcatcggataaagcttcttgctttcagagtggctggctggatcagtcaggacccagcaagccagccataagaaacacttacctgagcaggaggaattggtggttccaccaggctttaaacttacccaataaattcccatcgctc

SEQ ID NO: 4165 - DNA, 1000 bp, mus musculus
atgtctatctttattgctgaactatgtttcttatgtgcagcagaatgatggagcctgttttgtaattcattctgttagtctgcgtctttttattgatgaattgagtctgaagtggaaatttaggggttctattgaaagtcggttggatggtgttttagtggggcaaacacatgaaagaatgtttagctgaagtagacacaggtgaaaaactaaggcaggctcgtgaaggaacatctagctaaagcagacactgatgaaagaatgttttgctaaagcaaacacatgaaaggacatgtggtgaagaattctgtgttagtgacttgcatatttggtctgccttacattgtgtagttgaggtgcattgttaggactcgatagagagaaactcgccaaagaaactggtggtgtgctgcaatttcttgctgcttggactcaggctgattggcaaagtgatgtcagctgagatagatgcagatgttgaggcaagacacatgctgaggcaagacacatggaggacgtgtaatgtttggagggtataaaaaaggactcaatgtacagcctaagtggctgcgctaggcttgcttatagagctagctgtgcaaagctgtggctctcacatcttccctgatcttcacgtccctgagagaggcacagctgagaacatttcctggcatcttttctgatccctcctgctgactcatgcctggctgtcttttctatgtagtgccacctcagctgattggtgtttgctatccagactctaaccaagtagattgctgctgtatctgtgaagtgtttgcaagtagatcgagctgctgctgctgctaacctgtaatgaactatcggacttgtctatttccagacaacacagataggagttgctccaaagaacttttctaaacaggtccactccccccatatcctttctttactggtacctctggtagtttgtggctaaaaggaaggttaaaacattttagaactatcattaaaaatgggc

SEQ ID NO: 4166 - DNA, 1200 bp, mus musculus
aaacaccagaaggctacaatgatggcaatactttcttttcagttttcttcttctctcacctctcctcagctaccatcagtgatgcccagccatcccagtcttgctgtaggacacagtcttagtcagggtttctattttagcacaaaacatcatgaccaagaagcaagttggggaggaaagggtttattcagcttacacttccatactgctgttcatcaccaaggaagtcaggactggaactcaagcaggtcaggaagcaggagctgatgcagaggctatggagggatgttccttactggcttgcctcccatggcttgctcagccttccctcttatagaaccaagactaccagcccagagatggcaccacccacaaggggacctcctgccttgatcactaactgagaaaatgccttacagctggatcttgtggaggcatttccccaactgacgctcctttctctatgataactccagcctgtgtcaagttgacacaaaactagctagtacagacacttaaaataatctcctcatacaatcacttgtgtgggctgggctcctgtatatattcaagtgtgctctaggcctgatatattcacatgttgatcagctatgtctcttttgtgcttagcaggcagaatccttctcagaatgcaatttttcctttccttaggggaaaaaattgtggtctccagatagtgagaaaaggcatcatcaggtcaagatgtaagtgtaaaaaataagtggggtatattagttactttagcttaactggagcaaagtacccaagataagtgagttatgaagatcacatatttattttggcttatagccacagaagttataatccaagaataggcgacccattgttttgagcctctggctaggatggtccgctatggcactggcacacgacagatagctcagtgtatgggcttagaaacagataggaagagtccgaggccagaatcttcaaattccctccataccatgtcttcagttacatatacatctcatgtaaggctctgcttccaagtacttctttgtagttccatcttggggagcaattctttaaagtaatgggccactaggaaaacattcaacactgaaattatagagcagtacaaagaaccacatgcaaggagaaattaacccggatctagtgctaaagcctgaactatcttggcagctttcattacct

SEQ ID NO: 4167 - DNA, 1000 bp, mus musculus
gtgtaggacacatgagtactgaaagggttaatgggagttttaaaacaatacttaccttaagtgccagtggtttttatggctcgctggaatcagaatccttaccattctatttcccctgtgtcttgtccacgtagtctagcaacagtggccctgtaccttggattagcaaacacgaattaacaatgcttcagttgaccttaagttgtcctacatacaaaccattacaaataatactttttactcttctagctatcaagttttagcagagtgttatttttggcagaaagtggcctttgacattactctggaatgacttcctttggctgcatcaacctcaggtcactggagaagaacagaagctttgaggctgacagaaatgaagaggtgacttgtgggccagcgcttcaaagcaaggagcaggtgcatatgaagagccatgtcctccagctgggactctaagcccacatttctttccttagaggggcctataattttcacaaagcacgaaatgaaaagctttcaatctgtttctgacacttaaaaaaaaatgtcttaaattaagaatttctctcaaacgcccagtttctctatttaggatgaaatggataattagaatgtaatgaacgtactaacacaaatgatttcattatgttataatgctagctggtaggggcttttgaatgttttacataattcttgatttttgagggggggagggttgcttggtttttaagaaattaaattgtggttactttgctttttcaaatacattctgatcaaaattttatctgttgagagctagagtttttcaaaaatccttagtgtactaaagttcaaggccgcacatcagattatactattaaattgatatttttcagtctcgaataaaaaaaaagagctagcggattatctgagaacagagacaattccttttacttttatgaactaatattaataagtgctataccactggagctgattgtgtacgaaagtgtacggt

SEQ ID NO: 4168 - DNA, 1000 bp, mus musculus
ttaaaaggaggccatactgcacgtcagtgcctttactggcactgcctaatagtatcttctccagtttttgcataaataatttaataaatcttgattctatcatatagtttaaacaaataactttgagaaaagtagcagatttactaacaatgagggaggctgtatggctctgaccgaggccctctgcatatatgttgcagtagtatagctaggtcttcttgtgggactcctaacagtgggagcagaggcagtctgtgactcttttgccagctcttgagctccttcttatcctgcttggttacctcatccagccttaatatgctcggaggggcctattcttagagccacttgatatgtcgtgtttggtttgtaagactggggagcctgccttttctgaactgaaacggaggtgtgcatggggtgtggggagaggaaagatggagaggatataatataatatattctctatatgcgaaatacacacataatatagaatagaatataaaataatatatgctgagaagagtacatattttttttaaaaagaagtaacaggttttgtttttgttttattgtttgtttgtttttgtttgtttttcgagacagggtttctctgtgtagccttggccgtcctgagactcactctgtagcccaggctggcctcgaactcagaaatctgcctgcctctgtctcccaagtgctgggattaaaggcgtgtgccaccacgcccatcttgtaacaggttttttttgttgttgttgttgtttttttgtaacaggttttataagtaattttgtcttgaatgtttgattatatattgtaataaagctactaccatccaaatcatgacatttgttgtagtatatcaaagagacatggaaatacgttatacttaatcaaaacaattgaactacatgaggaaaatagaagaaatgtttgactaacgcgattccacgtctgtcaacttgttttaaacagtttctggaaaagttaattttat

SEQ ID NO: 4169 - DNA, 1000 bp, mus musculus
gttatatgttatatatctttttgggtatatgcccaggagtagtatatctgggtcctcaagtagtactatgtccaattttctgaggaactgccagactgatttccagagtggttgtaccagcttgtagtcccaccaataatgaaggagtgttcctctttctccacatcctgaaccatcatgaactacaggtccagaaacatgcagtcccaggatatttgtaagaggcctgccaccaagtttaccctcttcctgttactgtcacaataggaacatccagggacaaaaaccagccttaagtctaaagggcctcaaagaacacaatcaacaaaagcctgggcaatatgacacctttagatcacagctgccctactacaacaagccctggatatcttaacacaactgaaacacaagaaaatgaccttacatacactcctataaagatgatagaggcctttaaagatgaaatgaataaatcccttaaataaatgcagaaaatccaatcaaacagatacagagctttaaagaggaaacacctattgaagctggaagcccaagcataggagaatgctagggtgatgagtgggtgggtgggtggaggagcacccttatagaagctgaggcaggaggaggggatagggggtttgcagagggaaaacaaggaagtgggataacatttgaaatataaataaataaaacaaccaataaaaaataaaggaaacaaataattccctaaaagacatagaggaaaacacaattaaacgtgtgaagggaataagttacaactgtggaaggcctggaagtggaaatagaagcaataaagaaaacatcacctgaggaagttctggagatggaaaacccatggaagagaacagggataacagctacaacacaacagaatgcaggagatggaagagagaatctcaggcagagaagatacagtagaagaaagaaattgatagatcagtcaaagaaaatgttaaacctaaaaacttcctgacac

SEQ ID NO: 4170 - DNA, 1200 bp, mus musculus
aaggaaacattcatacacatttatgggaaaggaaagtatgctttgataccagaagagcaatgttattattaggaatttctactgtataaaatactaacatggtagtagtcccttctttgtttatagaacttataagtgggatatatatatattgttctacattgtgaggaaaacaataaaatgttggtgggataagtaggcagtctcataaactttcccaagcatcatacaacatagtgaaacaggaaatattaatgtacttggtgtgattgtgagctagatactttaaagaccatatattactaaaaaaagcaacattacttccccccaccccccgccaccaacctgaagctctttcatgaaaacagcagcagaagcatcatctatatctgacatctgtgcacacacacaccagtgtcaggcacgccagccataagagaataaaaataggctggaggtctggatgcatcatctggtacctgttatcggtcagcaaagagcctgtgctaagtggctccacagattgcaccaggcaagaagctctccccaggaggaaaagccaaggcaatattgctccaaaggggctgtagaattgtggctgtggtctcagaaagtgactctgatgataccgatgacaattaggagagagggtttagaatgtgaatggggagcaattcagctgctacactctctgtgagcagactgttgcctcaggcaaaaggaccctgctgtcctttgttcaaactgctaggactggtggaaggtaaacccagaaagggggatttgtataattcatcttaacttaaaagttcaagttaaaaactttgaatgaatttagatacccatttcttgagtgcaggactgatgctttaggcccatctcaccaggatagttttaaatttaaagaaaatgcttgaagagaaaaagtttgtatctgcttaggggaagccatcagtcagaggaagtactgaactacattctttcaccactgtgccttgggagtaatgtcccacactgagtggtctcttgtgctgctgcggttatcactgcagtggttggacagttgtgttttacggtctctgcatgtagcattcagctttatagttcagcataagctaatcaatatatcgagatcaacaattttaaaattaagtatttccatgaaattcaccattctacatattaaacaaagtaattcat

SEQ ID NO: 4171 - DNA, 1000 bp, mus musculus
ttaccaaacaatgaccaatgcttgcctctgaaccatcactccaagaagaatgcctctcatgagctgaaaggtagaggcgcacctgcggcagaaaccttaaatgaaaaataaagaccactgtgttgtagggtgcctttccctcttgaaaataaaattctttggagcatagaagacaaacaacgacgaaagtgaaagggcagcggtgcagattggataggcttacagcataattgaattaaggcttctgcgccacatatgaccacaaagcgggcctatggctccggctgctgaatggaggtggccggtctgtcaataaagaccctttaaactggttaaatgcatccgaagcgagtgcagagagctttctagctaacaggtggctgagtaaccctcagctggtgccacccaggcctgtcacactggcctcctttaggataatttcacccccctttaaaaaaaaattgttactgtacttgctgtggtggaaacaatttagggatgaataatttcttttggtccctagcggcactggtggctccctctccaccaccctctcctcctcccccttccccgtttttttttttcttgtactctctcgctccccctctctttctctgtcttgctactgaattaacataaaggaacagtgacaacagcaagctgaaaagcatggctggtgggaggattaagtatatcattgaaaggaattacgttgtgaatggcgaggagggatgggcgcttctgttccttggtcccatctggtccttaaagaataccttgttgtaattacccccagatggtttgtggtgcactggggtctggactgccaggtgccactatgccctgctgggtgtgatattcattgctacatgcagcgacaaaaatggactttattgaaacctagtttcttccagggtattacacaaatatgaaatgaacctatctcatcgagagggagctttgtttcctaagcgaaacagtctcacctaagacgaggctg

SEQ ID NO: 4172 - DNA, 1000 bp, mus musculus
gaagaggttgccccacttctgtacaatcctgccctgggacatccagtcacagcaggactaagcatgtccttttctacactgcacactggcccaaccaggcagtccagttagagggaggagatccaaaggcaggcaacagaatcagagattgcccccactcctaattattaggggacccacatgaagaataaactgcatgtttgctacaaatgtatagggggccagggtgcagcccctgaatgctctttggttggtgattcagtctttgtaagccccttatgggaacagagaagttgactctgtaggtcttcttgtgatgttcttgactactctggctctgtcaactctatccctcactcttccacaagactcccagtgctccatcagatgtttggctgtgagtctctacatccatctccatccactgctgcatgaagcctttcagaagacagttactctaggctcctgtctataaacgtagcagtgtatcattaatattatcaggggttggctctcttatttgggatgggtctcaagggagtcattcattggttggcttttccttcaatctctgctctatttttatcaccacacatattgtaggcaggattaattttgagttgaaggtcttgtgggtgggttaatgcccccctccttcctctggaagtcccacctggctataggaggtagacatttcaatctctacatccctcactactagaagtctcagctagggtcaccctcatagactgctggaaacctccccagtatcagatctccagctaatcccagagatgccccccaccaattccagttcttactcccagttccccctggcccctgttcccctagaccttataaccactcctgtctctcctacctctcctatcaggtttcctcttttcatccacctccaaagactatttcacttccccttctgagtgagattcctgaatcttctcaagagacctccttattacttagttttctgaagtctgtg

SEQ ID NO: 4173 - DNA, 1000 bp, mus musculus
aaaccaaaccccccccaaaatgttttcaactattaagattttaaaatagactgtatacaagggtgtttggataggtatgcactatggaactgggtgagaaaacagagggaagcaagaggcagtaagaaaggggaaactggggaggtaaccaaagtcacatgtgacatcaaagtggagagtctactagactgggatagcgcaaaggagactacaccaggagaaaaaccgggggaagaggaacaactgaagcaaatgctgctataacaactccacagtgagacccagttcttcatgtgctgataaacattattactaaagaaatgggtagtaacaaatattaggaaagagtcttaaggttccaaattttgaccactgtcactgggatatagagctacatctacccaaagagagctagagctttttctgcatgagttaataacttacttctcttggactcgtaactacatggaatcctcacagggtttatagatagaagaattagcccaggcagattgagggaggctagcttataaaaccttcagggagcaaagctgccaagagaaagactttgtgccttctgagctacttaagttgtcctctaggcaagaaatatcaagctctgtgatcacgttactacctcagcccaggaataatgtgataaaatagaaagatgtattcaatgatcaattaacaaagtagaaattactcataggccaaacagcatacataaggtcccagcagatcccacataaaagcttgccagcaatattctcattaccaaccagcatgtcagggctcttagggtcagctcattcaaacatggcaggtaggatgtgggtacagactaaatgcccatctgggtacccctttaatttaccaacaaatggttaagaacatatgagaatatgcccttaaagtatttaccacattttcaattcttgccttgcaagttataaagtcctagtctactgattctcctgagaaactgttaccacaatag

SEQ ID NO: 4174 - DNA, 1600 bp, mus musculus
aaagagtgaatatcaatatctctcaaattattccacaatatagaaacagaagaaacattacccaatccattttataattactctgatacacaaaccacacaaagactcaacaaagaaagagaattatagaacagttttacttctgcacatagatataaaaattctcaaaagcaaacaaaaatatttatgaaccaaatcgaagaatacatcaaaaacgttatccaccatgattgactaggcctcatctcagacatgaagagatgcttttaatatactttaatagataaatatgattcactgtataagcaagctgaaagataaaacaattatatgatcatctcattagatgcactaaaggccttggacaaaatctaatgtctcttcataataaaagtactgcgagattagtgatacatgggatagatctcaacataataaagacagtttacaacaaaaacatagccaacattaactaaaatataaagaaactcaaatcaattccactaaaatcaggagtgttgcgggccggccaacgggtcacatggacggggtacacctgagtggcaggccagagctgaaagaagaggagaaactaggtggttgagagaaaaatggagccaagataaggttcctgataaaggctcaaatgtttaatggcaaatgtgcttataaagggtggagggaggcccattcctgtcaattcattcttgaagcccagctgcaggtgatgatgtccaggataggatgtagtctcctgaatagcttggtggcctcccagcaggtagcagtatcttgaagaggaacagagacagtggctgaacaatagagtgatctaggaaggctccaccctaggtaatctccttagtggcagaaaggtcaaggtctggcttgcctgcttcaggctgggggaaggttacacaggagcaagacaagattgttcactctcgccatgcttactcaatatagtacttgaaggcttagataagacagtgaaaggaaatcatagagatacaaactggacataaagaagtcaaagtatcattttatacagatgaaatgacagtataaattttcaccaggaaaatcccacagctgattaatgctttcagcaaagtagatggatgcaaaattaactaacaacattcagtagggttcatatatacaaatgacaaatggactgagagagaaatcacagaaacaacagctttcacaatagcctcaaataatataaactatcttgggctcactctaatcaagcaagtgaaagtcttatatgataaaaatttaatatgtgaagaaagagcttgaaaaagttgtcagtagatggaataacctccaatggttgtgtgggtcagtggattaacacaataaaaatggccatcctcccaaaagcaatctagttattcaatgcaatcactatcaaaattccaatacagttcttcacaaatcttgaaaggatgatttttatcttcatatggaaagacaacaaacccaggatagctaaggcaataataataataataataataataataataataataataatgctagaagtatcaacatccctgacatcaagttgtaccacagagataaaaat

SEQ ID NO: 4175 - DNA, 1200 bp, mus musculus
aggacgaattttattttgtccaggaaaaaaggggcatgtcaagaagtcttaaaaatataaccatgttcttgactctggctgcataagactggatcactttatctagaacatctctatgaggatgggtagtggaacaaaaatatgaacaagaattcagaatcttgggtcatgcttaaaaggcagagacttttgctatatggagccttaaccacattcataccggttcctgtgtgtcctgtgggacagcctgaatcatcacaatgccaaatagtgcaaactactgcttgtgttccatatttgtcagatatgagctgctctggagtcctttttatcccttctaggagagaaactaacccgtcatatgaggattactgtggcttgattcatgcttggcagatctcctgacttgataacatgacgtgttgtatcagatgcgcaaggcttagcttttcagttaaggggaagcgattcacaactgagctgtttgcttccagacttgtcagacacggtgagccactcaagtagacagcttccagcagaatcctgcaagcagctgggcccaagctgtggcgtgatgggcacaggcaagtagcacctgtgattccagggaacccagcttactgctgcaggtaaattcttacagcactgtaattatgatcaatagcaacttagaaaagagtttagttaattatttgatcctctaacccttgaaagcacaggatatcagggaggtttccttgcttcatttcagtcccagaatagcaaaaactgttacctcaacatgtcactgttactatatttagaaaaataagagtttgggggcaggggtgttgtttgtttttgtttttcagacatggtttcactgtggagtcctggatgtcctagaactccctcagtagcccaggctggccttgaactcacctgtgtctgcctcctgactgctgggattaaaggcaccaccactgccctgaaaattaagttatttttaaataagcacatttttttgtcaaaaaaaaaaatgaagataccagacagtatacattgtacatgaaccaatgcatttagtccaataatgtgcaagttacaggcagaggtttatgaaacataaattaaagtttcatgtagacctattttacttttgaaaacatcacccaaaatgcagagaccttttaaaagaagaattctgtttgctgatatgtg

SEQ ID NO: 4176 - DNA, 1000 bp, mus musculus
agagagagcgagctctgtagttaacctgaaatgcactcttcacgcagaggagccagctttttcctcacccacctggcagctcatgatcacctatacgctcagtgggagggagctgatgctattctgttctacacagacttctgcatgcatgtgatccacacatactcacaaaggcacacatgcatgcaaacacattcttaaaaaaatatctagagaagatgcaatgaagagataatgggaaaatattggttttttttttataattttatttttctaaggaatggggtctagacagagtattttacacatgctcagaagtgtccacccactgatgtatatcctggtcttctcttattttgagacactatttcactgcctccaaggatttgcctaggcagtccttgaatttgcaatcctcctgcttcagcctcatgaataaactacactgatcataggccctgaatcatctggcctataatcatcatatttagaggaaatagttatttgtgtaggagatgcccttgaatgaattcatttccttacttaagaaaaaaaaaatcgctgcgccgccgccatggccgacgtggaggacggcgaggaaccctgcgtcctttcttcgcactccgggagcgcaggctccaagtcgggaggcgacaagatgttctctctcaagaagtgtaacgcggtagccatgtggagctgggacgttgagtgcgatacctgtgccatctgcagggtccaggtgatggatgcctgccttcgatgtcaagctgaaaacaagcaagaggactgtgtcctggtctggggagagtgtaaccattccttccacaactgctgcatgtccctgtgggtgaaacagaacaatcgctgccctctgtgccagcaggactgggtagtccaaagaatcggcaaatgagaggtggcccaggcgttcctggtgtggttgctgaccctggacaaccttgccatcaagttactggacaaagactcaacactgcag

SEQ ID NO: 4177 - DNA, 1400 bp, mus musculus
agtgtacagttgtaggtaggtacaaccatcaacttgtcaaggtacagtcaagtctaggctgcacagatcacttttggtttactgtcgtttattacatagtcctaatagaattctgttacagttttatgaattataatataatggccttctttgtgtacacagtgggattaaatcatgattatcagtcactgaatcaggtagtgatgactgagggcagatacaaggctggtaaagagaactgagaaagaaatgagaggattgaacaaggaagacatgcagagtagaagccaaatagtgacttcagtaaatgcagtttactgattagacactgtgatccaggtatctgtctacatctatggaccatgaaacagctagtactcagatgaccagataatatcaatatcggtttaactatccaaaacataataggacaatatacacagcatatctttctggttaagaagggatccagctcaaggggaggccccaagtcctgacactattactgatactatgctgtgttttcagacaaggccctgtcatggttgccctccaaaaggcccaacaagcagctgacagagtcagctgcagatatttccacccaaccaatggacagaagctgctgaaccctgtggtcgaattagggaaaagctggaagaagctgaggcggagggtgaccctgtaggaggaccagcagtctcaactaacctggaccctcaggatctttcagacactgagacaccagccagggagcatacttcagctcacatgaggcccccaacacatacagcagaagactgccatgtctgggttcattcatagaagatgcacataaccttcaagagacttgagaccccatagactgaggaggtctggtggggtggaggtgggggtgtggggataccctcttggagatggtgggaggtggtatgtggtgaggaacagttagagggtgaactgagagggggataaagtctggattgtgaaaaaaaataaagaataataataaaaaagaataacagtcctaaataaacttatatggacactagtagtgggaaaaaaccacagtggaaaagtgacaaggttaaacactactaatgtatttttcatttatttttcattctattgacaagcctataatttaattattatgaattttcttgtgtgtttctaggcatcataaatatgtgcataactatgaagaattccttgctctttagaaagcccttgtcattttattagacagatgtggacacatgtgacttatgtcacagatgttattataccatgtgggaaagacataaagggacaacgtgatgaagctcacatgtaaggaatatgaaaatgttctagcttgtgtatgctggcagaagatattcagctagccctgttttcttttt

SEQ ID NO: 4178 - DNA, 1000 bp, mus musculus
ccacttggttcttgatctgtcagtgaagaaagccatggaccaattgctgggcagaaggtaaaggtggatttttcaggttccaggaggaaaaggagattcaggggaagggaacggagttcaccctgctttggaaaaaggagaactgagcagctgtgtgagatctcaaaatggagtggccacgaaggatgctcctacaggtgggtggtcaggggagtttagcaactgaaatttagagcaggtagggagacagagataagaaattggcaaaagcatgctttttcaggtgggagagagtagtgccctgcaattgtgtcctaaggcaagttaaaaaggaacaactgtgtgtctgtgcctttttatctgagtactcaaaggaagctgggagggggctggtagcacggtcacctcccagagtgggtggagcattaaaaccacaggcaacactacttggacttaaagcatgtttgaaataatactgaaagagaaggatcactactctgaaggttggacatctcaattctcattcattagtctatcactacagatgctgttaccttaattagaaaatcccctaaacatttctggtctttcatttctgatccagataacaaggatttgaatcacaatattgttgtatggttatgctcaatcaataacccaagcttgctgtcttctacatcttgctaattgatttttttcttttttgtgatttatttttactttatacattagtgttttatgtgcatacatgtaaatgtgtagcatgaatacccagtgcctggtatcataggcagccagaaaaatgccctgaattcatggaactggaattacagacagctgtaagccaccagcgggctactggaaatctattctggatcttctgcatgggcagcaaatgagagtaattgtgccatctttccagtttcttatttttctttgtttttgaaattcaacatcagtcctattttaatgtgggacttttttttttttttttgcttcc

SEQ ID NO: 4179 - DNA, 1200 bp, mus musculus
gtcccaaggctaacatcccaaggctgttgtcaagaacacaggttgccctccttcaattgaaagcaaggactcattacttcagaaaacatggacacaacacacaggtgaagaaagacacaggtgaagggaaatcttcacagtgggcagaacttcgggcagtacacatggtattacagtttgtttgtaagaagaaatggccagatgtacgattattcactgactcatgggctgtagccaatggattggctggatggtcagggacttggaaagatcacaattggaaaattggtgagaaagacatctggggaagaagtatgtggatagatctctccaaatgggcaaaggatgtgaagatatttgtgtcccatgtaaatgctcaccaaaaggtgacttcagccgaggaggagttcaataatcatggagacgttgaacgggtgtctacagagagccttcacaccttgatattagcatctttgttacaggaaggtactctgcaaactaacaaaggataaaaataaacaccaacttagccacacaaatgctttgatttacaatggtatcctgcttgcacaatatactagggcaatggtggcacaaaactaatatgaataaacaaaaggctcactccacaagatgaagctcatgaccaacactccaacactgcttgggtgaccaagaacctgagagtagagagcccatactcttaggataaagccaaattctactcttagaaacatggtagcaataaatgactcctaaggacattctgctctgctcctgctcaggcatcatcagagacacttcctcctgcagcagatgggcgtaaatagagacccagagtcagacaataggctgggagtgagagatctaggaagactctgacctaaacagcgtgcctttatcatatcatcctttccctcagtgctcagtgaagcctgcagaataaagagtgtaagagccacagggatggaggacaccaatggaataagtcaatgggatagatgtacacatgaattcacaaagtctgtggcaacatggacagtacctacatgggtctcatcagatggactaaaagaagtagatccgtccctgcgtccataaccctggagcaatctgcaattgataaccacttacaaacaaaattttaatttcagcaaagagagtttgactggggatgtagggtgagtaaaaggccaacgg

SEQ ID NO: 4180 - DNA, 1000 bp, mus musculus
aagtgctgtgaaaagaagagacacaaagggcacaatgaaaaaagaaacagaaaccttaagtgttggaagtttctttccaggtcctcaaaaactggaaaccgtcagcatacatgacgtgggggattcaggtaaactgatggcttttatctagcctacaatttctggtttcctatagtgaagcctattttggacaagtgtctaatgttcaccaaacttatctttccttttctgagtgtctggacctcattaggtctcataatttactttgtaatctgtgagttgagcaaattgtctcattcacacaagatttctcaaaacatacctccttggttgaatattctgcttgcatgctgttttccagatatgctggaggatgggttgtaaccaaaactcttgagatctagacaggcagaggacatgtctttgtgctctcacgatctcctaacatcaattaccaagctggagggaaacagctgtagatgttcagagtgtctgggctctccagcagtccatgatagacagttggttcctccagaagacattgagctcagagctatcaaactccaggactttcattggtgaggtttgtctctatgtacttcactgactgaactcaacctcttgatcctagaacaattcatcttgacaatggccagccctcctactccccacactacttctcaggattatcttacaccctgggggctgcagcttgtcctctcagagcccagtgaatagctcagtattaaacattgggttctcaagttagtgcggaaactgctctccgcgcgtttcctcttcatttttgaccagcctgctggagaaatcactgagggctatgggcttgtgctggggacctaatggataagacagtaagatccagttcaaaaggaccatatggttgcctctgagcttggacttccatcctctctcttcctgcccggaaggaagctcctgcagctgaatctgtgctgggcttgactcacttctttcaagtgca

SEQ ID NO: 4181 - DNA, 1000 bp, mus musculus
ctgaagtgtctctagtgcccgttgcattgtggcttctttgatctggtgagtaaggcgaggagcggcgctgtggcggcgctgttttgttgacttaacggcagctattttgaggacgcagagttagttctcagttgacttttcacaggtggaccttctgtgactcacttctacagagacagcccgatgcagaagacttttcctatcctgagcttgtgaaggtggtgtggtataagggtgttacatacaggtaaagccccttcccttcttgaatcaggagttttgttagtttacaattaatttattttatgtatacaagtacactgtagctgtcttcagatgtaccataagagggcatcggaccccattacaggtggtcgtgagccaccatgtggttcctgggagttaaactcaggacctctggaagagcagtcggtgcttttaaccgctgagccatctctccagccctgtttgtttatttcttaactcacagtgggaatgagactatacttgcaaaccgattcttataaacagttttgctgggtcaactgggctgctgtgttttatctttacttttacaggtcacaaactaattttattagtatgcatagaggtcttaggactcatgttagccaagtttacaagactgcgtgacagctaccaagccactgagattcggacttgctactgaatggaatataccagaggcttagggtatccgctgtacctgagaaggtctagttgtgttacctagtgagcatggaatcagcctaagggtgattcagtcaaaggaagtcattcctttcctggctgctctaggccagcactactccactgaattctcccttccctataacagagtaactctctagtgacgggacacagtgttggccagatgcggtcttctttccatgactaatgctaaaaagcatacctggtgggttttgggtgcccgaggctttcctgtcttgtatgaagacccatgcgctcggacagtgttttt

SEQ ID NO: 4182 - DNA, 1200 bp, mus musculus
tagtagactgagctaccttgctgttgcagggtaactgtggggaagagcatgtttggctactgccaagtaactgtggggatgaagtctggacagcctatgtgactgatggccacagaatgatagagttgagagcttgtggtgtcaggcatttgtgtctggggttgtagctcactgttccatcccttgtagaattttctactgggtctccggagtaagccttgctccaccagaacacagattgcctttcacagtcccacacatgaggtcccttctacaatttgggactgagtgttccaaggcctctcactttgcattagggtcccagtgtgtcttgtgatcaacttcagaaggaagctttttgatgatggttgagaaggcactgatctatgagtataacagaacgttgggagtcattttattactgtttctttagtagaacagtagtatttagctttaccataggtctctgaactatctagtctcaagttcttggtcatccaagcagtgttgaatatgggttctatctcagggagtgaatcttaagtcaactcagatatctgttggttacttccacagtatttgtgtcaccatactacatgcatatcttgcagatcagacactattgtaaatcaaagttttgtagtttgtttagtgattatttttccctcagaaacatgcagcgttttctaacagctactagatgcctagaagtcaaggaataccagctttggctttgtcacatttcacactgcactttcccccttctggagcattcattgtctcaatgctagtggtgtgggattagaacagtcaaactctctgtgttttgcctctccagctgacatgtacagagaggttggggaagggaggtggagggacttggaccaacaatacggatctaaacaggatactcaacaacaaaatctcacttaaagaaatgcaatttaggagagccggccaccgtccggaccagaggacaggtgtccgcctggcttgggagacggcctcagcctcagcagcagcggtcgccatctgggttccgggactccgcggaacttaggaaattagtctgaacaggtgagagggtgcgccagagaaccggacagcttctgggacaggcggaagcacagagccgctgaggcagtaccctttgcaggctgcagacagccggccaccatccggaccagaggacaggtgtcc

SEQ ID NO: 4183 - DNA, 1400 bp, mus musculus
aattaaatgcttttctttataaaagttgccatggccatggtatatcttcaaagcaataaaacattgactaagacaaaagataaatatataattatggagagacggttaggggtggggagactggagtgggagattaaatgggaacatgaaagaggaataaagaaaggaatgtggctcagctattgaaaacaatgaattcatgaaattcttttgtttgtttgtttggttggtttttagtttttagtttttttttttccgagacagggtttctctgtgtagccctggctgtcctggaactcactctgtagaccaggctggcctcgaactcagaaatccacctgcctctgcctcccaagtgctgggattgaaattcttaggcaaatggatggaactagaaaatattatcctgagtgaggtagcccaatcacaaaagaacacacatggtatgcactcactgataagtggatattagcccagaagttcagaatacccaagatacaattcacagaccacatgaagctcaagaagaaggaagaccaaagtatagatactttggtcattcttagaagagggattaaaacaaccatgaaaggagaaacaaagtgtggaacagaaactgaaggaaaggacattgagagactgtcatacctggggatccatcccatatacagttaccaaacccaaacactattgtggatgccaacaagtgcttgctgagccttatatagctgtctcttgagaggctctgccagtgcctgacaaatacagaagtggatgctcacagccatccattggactgagcacagggtccccaatggaggagctagagaaaggacccaaggagctgaaggggtttgcagccccataggaggaacaacaatatgaaccaaccagtatccccagagctcccagggactaaaccacaaaccaaagagtatacatggagagacccatggctccagccacatatgtagcagaggatggccttgtgggacatcagtgagaggagaggcccttggtcttgtgaagcctccctgccccagtgtaggggaatgccaggatagggaagcaggagtggacaggttagtgagcagggggagggggagaggggaggggggttttggaggggaaaggagaaaaggggataacatttgaaaggcaaataatgaaaatatctaactttttttaaaagggggaatgtggcagggaggggggaacaactgacactaatggtcatttgagagcctgtgtagaaaactgctcctgaagaaacttcctaaaatatatacatatatgaatggaatctaagtggactcacaaaataatgggagaaacaaagccccaactagacctctgatgccagtgaagtgaaaattctagtcccaggaatggacttcgtt

SEQ ID NO: 4184 - DNA, 1200 bp, mus musculus
ctttaaacttgttttggatattagaataaactttaataaaaattataattagcagaacttttgacacatccagctagatagatgatcaattttgttaattgcagaggccagactcaaacaattgtgaggtgcatgattccagacagaatatattccaaaaagccaaatgatagaatatccacatatacacagttggtaaaggttagatgtaggggattgaccaggaaaaggcagccgagggaagatcttaagaggggatgtttaagaggtagagaaagccctgaagaagtgatgtccggagtcaatgtgtgttgtctacatagaaatggaaatgtcaaagatgccagattctctgacccaggaaggaataccaaagccttctccctgggggataggctgagaaggaaagggcagaaccttctcacttctggtgtgtgtgttaatgttaacagcatgggcagaaaatattcaccattgctattttcccagatagttacagcatgacgattgcttccctgcatgcattgcttacgaagattagctaaacctgttgccttgattgagctgtaaccaataagtcttaccttcttgcttatctctgtgtaataaacctgccaatgtacagttggataactgtacaataatctcactttctattcaaccctgcataacaaaccactgagctatcctccagggtgctgaggcttatcatgtggagagctcagacaacctggtcccagatttttgtctgtgtttatgtctatatttgtcttcattttcttgccaccctagtcacatccaagtctctgaaagccatgatgatgtggtaggaatgaaactcttctgcatcctgactttagctatagttataaagatcaatcatctttcagaataaacacaaaaaggtacatttacaagtgaatttttaaaaaatattttaatgagtatgtcataaagacaataaaagttgtattttcctacaaatatcaatactttatgaaaagattctcaaagctaaaccaaaatataagctactcaaaatttaagtgccaaacttgaaaaattgaagaaatctttttctccactctcttcttttcctctcattatgtttccatgcatatatttgtgtgtaaggaggtaaatatattagaacaagtaagctgtcagaaaagttaaaagtcaggaaaaattattgtaaac

SEQ ID NO: 4185 - DNA, 1000 bp, mus musculus
ccgctctaaaagaaataatgctgtgttatgccgtggggtgcgaggctaagcactgcacagaggatagcttgctgttggcatcctgtggaaggcacgtctgattgcatgaaggttcagtgtcctagttcccttcccccaggaaaaacgacacgggagctggccaagacctctctgggtgatgagcctaagggatggttttgtgtagggcccctatgcttgcacactggggatcagacctctaccttcacccatgaggcttgcttgcagcaattaagatctggccataagttaattaacatcctggccttttgatgcacctgccgcaagcaaaacaatctccccaggagtggcttggcatgattgagaggtagtcagtgataagactccctgggcatgtcaccaacctaagacagggatcaaaccaatgctgtttgtcacccaaggacgggtaaggggcatggctgcggggggctatctacagacattctctctgccaaaaaagaaaaaagggggaattgtggggagcaggtgtggcggcagtcccaaaggcgccagggactgcagctaagtcatatgacttgcacctgacttcctcatataagacacaaacatcttgagtgctgcccaggtgtaccaggatacaggtgaatccaatttggtggagatttgcccctgctgccctgattagctgaagcctcatgactggcgagggggcgtggcctgcggtgcgtggatgagagagagtataaaaggagtgagaggcccagggttcgggggagatataaacaagaagaatcaggactgaataaactgctgttagaaggactggtggtcatgtcgttcttgctggtcaagagtggacgcgacaccataggtgtgtgggttcatttctggatcttcatttctattccattgatctacctgtctgtcattgtaccagtaccttgcaggcatcacagttgctctgtagtacagcttgaggtcagggattgtaattcca

SEQ ID NO: 4186 - DNA, 1000 bp, mus musculus
tggcatgatctctgaaataatggagccactagttcgtttctagctaggatcccattgataggattgggataccagtacagccacaaaacaacaaaacctgcaacacacaaacatgttccttcctgcaagattcaaaggaagagtgatgtctcagagcttgtgggaatgggcaaccaatgactggccaacttcaggaccaaggcatgggagggattctagacccaacactgcctggatatccagggacagcaagctggaaagctcaaagacgtatggtaaaacaaacaggagtgacaaaaaaaaaaaagccaataacatgattcctaaggaaattctgcttcattcatagatctatgcctatctgtatcatcatcatgagacttcctccagcaactgatgcaaacagatagagtcctacagccaaacataaggcagagctcaggcaactcttgtccagaagagagggaggaatgagtgtaggagccaggctgttcaagggtatccagagaacatgccacagagtgagtggaaatcacaaagcaaatatggctctgagcagggtcctctgcatgcatgctgtggttatttagcttgggttgtttcttgggctcttaaaagggggcatagagcagaggatggcctagacaagccatcaatgggaggagatgtacttggtcttgcaaagattatatgccccagtacagaggaatgccagggccaggaacctggagtggatgggttggggagcagggttgggggagagtataggggacttggggagagaggaaactagggaagtggatagcatttgaaatgtaaatgaagaaaatatctagtaaaaacaaattacaaaaaaaagtaggcatgggcagtggtggcgcgcgcctttagtcccagtgcttcagaggcaaggcagaggcaggcagatttctgagtctgaggtcagcctggtctacaaagtgagttccaagacagcgaggaatacacagagaaaagcggt

SEQ ID NO: 4187 - DNA, 1000 bp, mus musculus
tctcccagagcattccctctgcccacagccctctcacaggtccacgcctgagccttaccttggtccccatctgttcagaggtggacactttatggatcagcttctggggcccctcatgctccaattcactgtaggatgaatcctctccaggtcctgcagcagtggggcaaaccacactggcctcagggacagctcctcctgcgaagccctgagggtggtgctggctgcaggcccaggcatcctctctgattcctgcagggacacagcagtgccccaggggctgtggtcagctgctgggctctgcccaaaagtctgagccctgcccctagatagcaccatcttccgtgatcccctctgcgcagcaccctggacccgggaccctggatcacaagcctcccctgcctagacctcttgggtcctctgtgcacttcacgcctgggcacccagccttgggatgttctggtattgctgacccaggatatgaccagcaccagaatgagatgacagatgttgagataagcctcaaatgatctccctctcactcctcctagggtctggagggctcagagggaatggagagtagagatagtcagggcatgatgcagcaggccaggcagtggagatcctcctccccttgttctaggcagcaggagtgaggagaaggctcctgagggaaagggggacatggagctatctcctatgttctggggtgctctctgaaccccgaatccctccacatacttggaccacaaggtaccattccagctaagtaaaagttccctctgcccggaagaagaactgggtcttacggaatctcaatcagcaccattgctaggaccttacctcccacctctgactgggggttcccgtcctttaggccacctctacagtgctgtttagcttcgggcccacccccatctggcgcattaggtagagaagagcattttctgggaggttcagctctgctctgagagcttttggttcagaaagagtgattccc

SEQ ID NO: 4188 - DNA, 1200 bp, mus musculus
tgccagaataggtgcttggaagcggctcaggggcgcaaagcacagccttgctctgttgaagccaggtactgtcctgggcaattggctccaggctcagctcaggaggcaaccacctggagctacaggcacccgaggcaaggaatgcctgaaggaaaggggccaggtcctgctcacccctcgtgagctacttgtccctgacacccctgatgctcctgttgagcctgggtccttggcgaagcttcctcttttagctgcaccaccaccaggtgcctgtgaccacctggtggctgctttcctttccgcgccatatatggcctggcaggggggggtcacatgcatcccgggccgccggcccggaggggtcgctggggaaggggcagacggcgggagaacaggggagggggtcggaggcagagacaggagaggggtggggtggcggattctggggccatgggaggcagcaaaggctcgaggagctgagcgctcaccaccgcgccatggagctgcactcatgcggctgcggaggtggtggtggaggaagggacccacgcggggggcggggggggggggcgaacgcgtcggaagccagagagcgccgtgtccctgggctctgtcggtcagcgggcgcgggccggcaggatggagccgcagcacgtgcgccccatgcttggatcccagagcccagcctgggaggaaccggtgagtaccgcgcccgtgcccgcgcccacccctcccgcttgtccttgctccccgcctccccctcccggccaggttccgttccggaagcggtccgggatgaggtccccagctgcttcacagcctggacagcgcttcctcccgcgccctggctcctccttgctcgctgccctaagcgcctttgtctggtcggcctctggatccggagaggaccatttccgcgtttcatccttttctcagctttgcactttatttcctagagtggcatggaggccagggaagtggagggggctgggttgcgcggtcagcgggtgcggccacgaggagagggaggttcacctcttgaccacgcgctggcagtcacctgggcacgcaggttcccgaggaccgccgcctgggaaggcccgcggctgccagaagcccagagccacgcctctgactcgggtagcctaggctgccctgaactgttctgagggtcaaggacctgaccagggatccagcccc

SEQ ID NO: 4189 - DNA, 1200 bp, mus musculus
gacatttagaaaatatcactgtctatttttatattcgtagatatttatacacacaaacaatgtgtatatattctgtttaaaaactgatagtaggactattccctaatggccttctgtatatttacttccttctttttagtgatagtaggccattcagatgagctgtgctaaattgctttcagcagttcaaagttgacaaagtgtagacagtttcatttggttgaaataacacggtatgagatcatttaattaatcagtttagtgggaggaaattggtggttttaggacagtacactaatctcaacatttttcggggtggggtagtgtatatgacaacttttaatgtaaagaatagggtgtgtgtgtgtgtgtgtgtgtgtgtgtgtgaggggggggagggagagagacagacacggaggagggtgagggagggagggagagagagagacagaaacagagaaacagagagacagagagacagagaaacacagagacagacagacagacagacagacagacagacagacagacagacagacagagaaaaagaagtgtgctggcactgccccagctcagggctaagactgtgctttgaagggcatgtggtttgacagtgatctcctgtatcttagtgccctcctcacctccatctttttgatgtctttggtccattttgttcatcttcctattgactaggtacatttttttcctcttcactcattctctgtttttcacttgtatcttttctcctgtcagctgagtaggacttcaggtagttacatttaggttgccgtgtgataagcaagataattttgtgtccaacttaattcccgaaaggcaaaaaaaaaaatctgcaggcttgaaagagatgttggcttgaaaaaggcaactgggagcagtaaggtttccattcttgatttgcctctttacccttctgtatgttccctgtgaggtggagtcccctttagacttggtgctgtaggtatttcatatgcatttcgtagatatcaatggtctgaaaggacattgctataaactctgaatgtgaataagtctgtgtgcgccttttgttggcctgtgagtacagtaatctttcattatgcctcaatggctagagattgttgctctactttcaagctggcatggttaatggtcggtcatacggtggtacactcggatgagaactgtctccatgacttt

SEQ ID NO: 4190 - DNA, 1000 bp, mus musculus
tgtcaacagctggagagttctggtcccacgtgctgcctctcagtgtgacaggatttctgcaggtcactgcttttctctgattttgctcattgtactctgaattgtatttatttggcattctaagtgtgtgtgtgtgtgtgtgtgtgtttaccttacaatccagggagtctctggcctttatttggccagaggattggcctgaatcaattttcaggtcatgagagtgatgaggacaaggagcctcccattttagcagcacagcacatgacctctgtgctcaccttgggtgcacgttggaaactcctagtatgtgtttttacaaagcctttcactgtagatattatgtcctttggggatttatgtagcaatagaaccaaggattgacaattccttgtctaaaaacaggagaagggtcatcacaggtttaaggtggacccaggcctgtggcacaggctcctggaaagttcttggagagctcatctattccttcaagtcccctcagggagctaaagcaggtcagctctcttcttttacttccctagctctactggccccaggccaagagtaataattttaataatcaccaagaggaaccagtaccaaggagcaggatgtggcatatgtgggctgaggtagtccacgattcagcttgaactgacatgatccttgtagcctcagttcaagagattatttgctccttgggccatgccatcccacaggatcaactttgaggccttcatgctcgagatgcaacaccaacaggtgatagccaacctgcagaaaatatcccaggacatcagtgaggcttctatgtgatgctccatggccaatatgaattgttgtctgaggctgtcagtggttcagggctcatgatgggaggatggtccttgggaggagtgggaggaaggtgctgcctgggagtcacaattttttgtttgtggctcagcatcaggcactgccacctcctgagtgaatctaaccaccttcagcacaaagtcag

SEQ ID NO: 4191 - DNA, 1000 bp, mus musculus
gggcgctggcatggtacccaccggttccacccaggctgtgctctgggatccaaacccggggcgcagatgctgaggctccatcccgctggcccgcgctcactgaccgactgagcgcagggtcaaggcgctctctggcttccgccacgctctccccgcccctccccctgcgctggtcccttccttcgtcaccacctccgcagccgcacgagtgcagctccttggcgcggtggtgagccctaggctcctcaagcctttgctgcctcccatggcctcagaatccgccccctctctctcctgtctctgcctccgactccctccccttttctcccgccctccgccccttccccagcgacccctccaggcaggcggcccaggatggatgtgacccacttgccaggccatatatggtgctgaaaggaaagcagccaccagttggtcacaggcacctggcatgctgcagctaaaagaggaaccctcaccaaggacccaggcttgacaggagcattgggggatgttgggggcaagtagctctcaaggggcgagcaggacctggcacctttcctttaggcattccttgccccagggtgcctgtagctccaggtggtcgcctcctgagctgagcctggagccaattgcccaggacagtacctggcttcaacagagcaaggctgtgctttgcacccctgggccgctcccaagcacctattctggcagctgagatgactggctgggctggctggggagccctgcttttgttcattttctatggctgaaagaaatcctggaaagaaaaccagctaaggagctggtctgtggtcccctgtgagctctcaactcaaattagggacaggggcagttcagagacacagctcaaatgtcaactgcctctcctgctgctctctgggaaaaagaaaatgaaaattgtaactagcaagtttttcaatcatctttcctgaaatcatctttactggcagtggagacagtttccatctagttgcaa

SEQ ID NO: 4192 - DNA, 1200 bp, mus musculus
cagcgcgcggtcaagaggtgagccccgtcccctccccatgccatccgctgaccgcgcaacccagccccctccacttccctggcctccatgccactctagggaataaagtgcaaagctgagaaaaggatgaagcacggaaacggtcctctcaggacccagaggccgaccggacaaaggcgcttcaggcggcgagcaaggaggagccagggcgcgggaggaagcgctgtcccggctgggaagcagctggggacctcatcccggaccgcttcctgcacggaacctgggccgggagagggaggcggggagcaaggacaagcggaaggggtgggcgcgggcgcggtacccaccagttcctcccaggctgggctctgggctccaagcacatggtgcacatgctgcggctccatcatgccggcccgcgcctggtgaccgacggagcgcagggacacggagttctctggcttccgacatgctcggcccccgcccccccgcccccccgcccccccgcgccggtcccttcctccgccacccgctctgaagcgcatgagtgcagctccagggcgcggtggcgagcgctgggctcctcaagcctttgccgcctcccatggccccagaatccgccaccacacctgtctcctgtctctgccttcgaccccctccccttttctcccgccgtccgccccttccccagcgacccctccaggccggcggcccgggatgcatgtgaccccccctgccaggccatatatggcgcggaaaggaaagcagccaccgggcggtcacaggcacctggcggtggtgcagctaaaagaggaagcttcaccaaggacccagcctcaacaggagcatcggggatgtcaggggcaagtagctcacaaggggtgagcaggacctggcccctttccttcaggcattccttgcctcgggtgcctgtagctccaggtggtcgcctcctgagctgagcctggagccaattgcccaggacagtacctggcttcaacagagcaaggctgtgctttgcgctcctgagcccctcccaagcacctattctggcagcttggatgtctgtctgggctgtctggggagccctgcttttattcattttctatggctgaagattttgtggaaagtaaaccagctaaggagcaggtctgtggttccctgtgagcgctcaactcaaattagggacaggggcagttc

SEQ ID NO: 4193 - DNA, 1000 bp, mus musculus
ggtcctagcaatagtgctgagtgagggtccatgagaccgagttcttctcccgggcagagggaacttttacttagctggagttgtactttgtggtccgagtatgtggagggattcggggtccagagtgcaccccagaacataggagatagctccatgtccccctttccctcaggagccttctcctcactcctgctgcctagaacaaggggaggaggatctccactgcctgacctgctgcttcatgccccttcctatctctactctatttcctctgagccctccagaccctaggaggagtgagagggaggtccttcgaggcgtatctcgacatctgtcatctcattctggtgctggtcatatcctgggtcagcaacaccagaacatcccaaggctgggtgcccaggcgtgaagtgcacagaggacccaagaggtctaggcaggggaggcttgtgatccagggtcccgggtccagggtgctgcgcagaggggatcgcagaagatggtgctagctaggggcagggctcagactttcgggcagagcccagcagctgaccacagcccctggggcactgctgtgtccctgcaggaatcagagaggatgcctgggcctgcagccagcaccaccctcagggcttcgcaggaggagctgtccctgaggctagtgtggtttgccccactgctgcaggacctggagaggattcatcctacagtgaattggaacaggaggggccccagaagctgatccataaagtgtccacctctgaacagatggggaccaaggtaaggctcggccgtggacctgtgagagggctgtgggcagagggaatgctctgggagatccctggaagtggtatccagaagagtggtgcaggggggccgggggggggggcggcctggatggggcgtggcctggcgcagaggactggaaggtgctctagggattcaagaggtgtgttgaagagatatctatggtgtgttctggaacacttgtctagctatc

SEQ ID NO: 4194 - DNA, 1000 bp, mus musculus
agagagagagagagagagagagagacagagacagagaaacacagagacagacagacagacagacaggcaggcagacagacagacaaacagacagacagagaaaaagaagtgtgctggcactgccccagctcagggctaagactgtgctttgaagggcatgtagtttgacagtgatctcctgtatcttagtgccctcctcacctccatctttttgatgtctttggtccattttgttcatcttcctattgactaggtacatttttttcctcttcactcattctctgtttttcacttgtatcttttctcctgtcagctgagtaggacttcaggtagttacatttaggttgctgtgtgataagcaagataattttgtgtccaacttaatttccgaaaggtaaaaaaaaaaaaaaatctgcaggcttgaaagagatgttggcttgaaaaaggcaactgggagcagtaaggtttccattcttgatttgcctctttacccttctgtatgttccctgtgaggtggagtcccctttagactaggtgctgtaggtatttcatatgcatttcgtagatatcaatggtctgaaaggacattgctataaactctgaatgtgaataagtctgtgtgcgccttttgttggcctgtgagtacagtaatctttcattatgcctcaatggctggagattgttgctctactttcaagctggcatggttaatggtcggtcatacggtggtacactcggatgagaactgtctccatgactttcagccattgaattatctcagcctgcctggcagtggtgatgcatgcctttaatcccagcacttgagaggcagaggcaggcagatttctgagttcgaggccagcctggtctacagagtgagctccaggacagccagggctacatagagaatccctgtctcagaaaaaaaccaaaataccaaaaaaaaaaaaaaaaccaaactaacaaagccccaaaaaacaacaaaaaaagaattatctca

SEQ ID NO: 4195 - DNA, 1200 bp, mus musculus
ctatgttcttaaaaatgtgctgttgctagctttagatacactatctatcagaagaacatgagaatgtcaggcaagaagctagcaagtggaaccactctgggatattgtagcatacatcctttctaaactatatacaatgtttctccttgagagttgctgtaaagaggagtcaacacatggacagtttggaatgcattttcttcagatctctgtgcttttcccccaaaatcatttcccttaggaggatgtcaactcttatttaaagtagtgtcttgtagagataacaccttgaggccacactggaatttagaagcaagttatgtgcttaaactggtctgaactgtgtctttatgaacataaaaggatgagaggataggaactcacacacacacacacacacacacacacacacacacacacacactcacagtgggagaggacaagatagagagggacagagagagaaacagggagacagagacagaatctgagagtccctcttctagttaaatgagaagctgtgtgaaaaccaaaacaagcagtagtgcaaaagcaggaaaaagagaaaaagaaacactgttcaaacttccaaccagctgcagagattcggaggccttagaacctcagctcaggtctagggaacatgagcagcagaacaaatgaagatttgggaagaaaaatggatactttgaatggacagaatggttatgtgtctcttctgtcttacatgtgggtcatagctatggagttccagacaaatgtgtttaatatgaagggcctgtaaagtccagaaagcagtaatgggactataaaagggaaggaaaaaaaaaaaagagacagatctcaaggtaagtgggagggcagaatatatgttctatgaaagcagatggggaggagcctgcaagtggaaatttttttcccattacattatgaaattttcttattcattcaagtgggtatacagtgttaacatcatacagtgacattaacatctgcccaatcaggcccccacctctctgtacccgttctccacacagatcttctgattctccctcttttagttccaagccattctttcccttgagcattccacaccttccctgcccactccatccacactggtgccttagcttaaagctagctgtcctgcatattgctctgattttagctgccttgacacctgtacaggcaggtgctgct

SEQ ID NO: 4196 - DNA, 1200 bp, mus musculus
taagttaatggatttcagggaataaatccaaagaccccgactcgcatcttctcacacgcaacactgagccccaaaagtgactcaatctgcgcgtggcgtgtgctgtgaggtccaggcgaaagcgaagttatctggggctggatccctggccaggtccttgaccctcggaacagttcagggcagcctaggccacccgagtcggaggcgtggctctgggcttctggcagccgcgggccttcccaggcggcggtcctcgggaacctgcatgcccaggtgactgtcagcgcgtggtcaagaggtgagcccccgtctcctcctggccgcacccgctgaccgcgcaatccagccccctccacttccctggcctccatgccactctaggaaataaagtgcaaagctgagaaaagaatgaaacgcggaaatggtcctctccggatccagaggccgaccagacaaaggcgcttagggcagcgagcaaggaggagccagggcgctggaggaagcgctgtcccggctgtgaagcagctggggacctcatcccggaccgcttccggaacggaacctggccgggagggggaggcggggagcaaggacaagcgggaggggtgggcgcgggcacgggcgcggtacccaccatttcctcccaggctgggctctgggatccaagcacggggcgcacgtgctgcggctccatcctgccggcccgcgcccgctgaccgacggagcgcagggacacggcgctctctggcttccgacgccttcgccacccccccccccccgccccccgcgccggtcccttcctccaccaccacctccgcagccgcatgagtgcagctccatggcgcggtggcaagcgcttggctcctcgagcctttgctacctcccatggccccagaatccgccaccccacccctctcctgtctctgcctccgaccccctccccttttctcccgccgtctgccccttcctcagcgacccctcccggccggcggcccgggatgcatgtgaccccccctgccaggccatatatggcgcggaaaggaaagcagccaccgggcggtcacaggcacctggcggtggtgcagctaaaagaggaagcttcgccgaggacccaggctcaacaggagcatcggggatgtcaggggcaagtagctcaggaggggtgagcaggacctggcccctttccttcaggcattcctt

SEQ ID NO: 4197 - DNA, 1800 bp, mus musculus
caattaaaagatccagatcaatattgaaaagcataaaaaggtctactcaatgtggcttccctgggaagacagagaaagagctagttttccctcactgacccagagtcccaatgtgaggtttcagtttgagtgaaaggccagagctatgcatatcttagtggttctggtcaagtgtggtcctgcccaccactagctcatcatcattttgtctgagatggtctgagaagctgtatatcttcagtgagaaaagtttccattctggctagttcagagtttaggatttctgtctcttcagtatgagattcccaagggaaattcaaatttcttggaagtccattgtttgaatagtctgatggacacaagagtctctttgggatatcttgattccttccagattagttacattgctgttttagcatctaaatcttgaggtggatggaaaatgtttatgcctgtgacaaatataagcagaatacactcagtgtcaactattggtatgagttttcagtaaccacttaacgttagtgacctgtgaaagtctgacacaagggattccattttgttggtttaagacatggtcttgccaccaagtctaggtaggcctcaaattgaaactctccatctttggcttctcaagtgtaggaattacaggcaaattccaccgtgctcactgtgacctcatctcaatcctgactcctcccatcctgccccatctctcctttgaacaatactttctttttttttttttggttatatttttcatttattatgcattttaattaaaatttaattacaccaaaagaatttagactgaccaattcagagtctgccatttaaaagcataaggaaaaagtaggagaaaacgtgaggctgtctgtggatagtcgaggctgctttagggagcctcctcaccattctgcacttgcaaaccgggccactagaacccggtgaagggagaaaccaaagtgacctgaaacaataggtctcatgaaggccagccacctccatcttgttgtgccggaggtcagttagcagacaagatggtgaacaatattttctaaagaagctgctgatttaccatcttgtggatcattctctattgtatttgctaagatgagtagtcatctaaacacaaagccaggaaaagtttagtgaacattgatggtttggagggcatcatttcagtgaaatggttccaaaaaggctttatatcttagatgacttatgtaatactgtggggcactgggctatgcaaagacagtttggtttccagctgagttgaggtctgaacctcggtgttgtgtctggccagtagatcacaaccagggttctagcctggaaaggcattttggaaacctggaagagaagaggggctaggcggcaagaggaaaaaatgcagctaagacagacattctgatcaaagctcaattttactgttccgcacgcaattataaagcaggggaagggggcccgattcccgccaattaatcttggggtccaatagcagggtgaccacgtgcatggctccgaacaacaaagcggcaggttccagcagtgggcatggcagaacgattgagccggcaagctccacccctgagcaagcaggtttcaggctgggggaggggagactgcatctcctccctgttgttaattaaaaaaaaaaaaaaaaaaggctggcctgaggcaaaaaatttatctatgctcaatagttctgcctgaatttttagggctaaagaaaaaacctgtccccgtgggattccctaacttgtcttatggtaaaccatatctggataagactgt

SEQ ID NO: 4198 - DNA, 1000 bp, mus musculus
aagcttctgaccttcaggctaaactcctccccagttacctagcaacagaaaataaaacggcacactataagaagggctgcttggccccacctcactctcttgctctcttggtcttacttcccttactctctcctctccctctcttcctctctctccctcttactctctagcctttcttctctctctcctttcccccttctctctcatggccggtctctctctctctttccaccttttctcttctacaataaagctttaaaacctacaggcagatcgctgtctctgttcatcaaggcccgctgcgcttactctcacctgggtgggaacctctctccctcagccttctctcccataaccctggggctacagggtgtcagtagggtaaaaagaccatatcattcgcaaccccctaaattttagatcttttacaagtgttacaagtgctctctagggaacagtgctagttattacaaacattatgtccaaatgtttctcacatacaatagaaaaacacttattttgttgggctcacagattaataccaaagtctcaagtagcaagattgtccatatggcagattactgtttgtaagacactaaggccagagttataccacacatgctatgagacttttttacagggagtgggttgggtctctggaggcccataagcatgcatcaaaagcaggtgtcagtagctaagggaactaaagaaaaatgttagcaaggtctaacacagcacaggaaggttccactgttttctgaaaagaacaaagtcatgtgaatgggagtgtgttggatggttttgtgtcaactttatacaacctagcatcattagaggaaggggtcatgactgaaaaaaggcttccttaagatctgcctgtaggacattttttaaattggtgattgatgggagagggcccctgttcatggtgggtggggccatccctggactggtggttttggattctataagaaagcaggctgagccagccatgtga

SEQ ID NO: 4199 - DNA, 1000 bp, mus musculus
cagcatcacgtactttcaaaactctgcccaggaagaagtcctatgtggctaccttctttttcatggccactgtacttttccccagtttcaaacagtgttagatgtgagccgatccctgtgcactgcttgagttaaacagttctgactcccaagtgcaggcatgctcacaattgccttctttttaaaggccagcatccaatatagaatcattgctagtaaatcttaaagtcttaaaattttgggggagctgattggtgatttggggatccatacaagtaggatatgaacattgatgtgttggagttatagaaggcaaaatacagcaagcagtttatacatcagtgttctgaaacaatgaagctagcatacttcatgaaatcattgaaactggttattgaaatgttgacataaaagtattcaactaggtggatacaaggagggaataatactactgtttaagttcaaaaacacgttaatagggaaaacaaagatcattgccatacagttttcaccatcaactgagcagcaagagattgagttttcagaaatctctgagatggtacctatcagagaaatgcagccttggcaatagaatctagttttcctaccattaatttgtctcagtcacaagatgactcataccctcacaatacaaactgattatgaaaaggcttacaagcagagcgggtagatgggcagagtgggtgggaccttccaagaacttcagattatcctgaggaatgtgcagaaacacaaaccccactgggaggagacagacaggtgctctgtctggtaagaggcctcttcctccaaatgtatgatatccaactccccagttcacagaccaaggtgtcatgaattagcccaggttgtccctgttatcactgaacgaaaaaggcacagttcttagcttcagatacacaagcctaaaactgatgtgtagttgttcaaatcaacaaaatagaaaaaaaaaaggaggttaaaaataagaaatggactt

SEQ ID NO: 4200 - DNA, 1000 bp, mus musculus
ttgacacatattaggtgctcaagtgccacatctggccagccgccgaagcctggacatctttggcatacttcagacgtgggggtgaagagtaagctccatcatgcctttccttctcattactctctgacagttaccacgcgtactttcattactgaacacactactctgtaataagaacaggtttgacattccaataaccaccttgttccatctctgagatatgctcgtgatcatttcctttgcaatgcacagacagaacacttttagagctgggaaatggctatcctttcttgccttccctttaccttccctttggatgaatccacagccttggcttggggatttgagtgagactcaattgcaaatgtgcagtgtaactactatggaggccactgctttcctgtgatgcagcctcaaacccaacaggtctcgtagcactgtgatagtagctgaatggcttctggaaggacatggaatggggccagaaactgcttaatttgaggttaattaaatagtgatgacaagccttaatttccaacttgtcatcagactgtaaacactgactgcagctgcagcaatctgcaataagcctgtggaaagagatcttggccagaatgaaatgagtatgaagctgggagtgacatctgagaaatcctaacctctctgtacctggagatttaaaggggagctactggaggatggatacattgaagctgctttctatgcagcaccaccacaaaagaaaaattctgcatcacatgaccaggaggctggaagaaacaagggtagagatgtgaaactgtcaaacggagaacttggaaaaccgtccaatcgctctacctcagttagccacgatggttttgtacaaagaaccaggagtccagtgcatgcgctaaggctctagacacgaagacagataccatgagcggagatcactagagagtagggtagatgccgccgtgtgtggggagctacaaggagttgaacacttcatgtacaa

SEQ ID NO: 4201 - DNA, 1000 bp, mus musculus
tgagctggactctgcagctcacggcttgccttgatggataattaaatgattgggtcaattctgggtcaaagaggaaaagttagtaaatgatggataaatccactttacaagggcttatcttagaatgcgatttaatggaatgatgacaaatctgtaatgggaatgttgctcttcaaaactcttctaattacaagaagcagaaacctactcaaagtagatcaagtaaaaatagggagtgaaggtcaacagaaatgatacagctgctattcagagtctgtgttaccccagacagcacaaaagccaaagcctgcagaacagagcatccaggatgtcttcatgcgtcttctctcatttctgtgtctaagtctgttttcttcttcctctgctctgtctccctttgctttctaatctcagacataatccagcagtgacaaattcagtccacaccccatgacttgtctacttcactgcctgactttaatataacctggccaggcaagtctttggattgctatgtgtgactttaggtagtaccttagtgttgagccccattttggccctggtttggaccgtgatgacaaaccggagcctgacttgagttttgagacctgtctcagtcacttccatatcaggatgactcagcaagacctatttggccctgcctctgccccgccattgctgatgtagagctttgcatggccctgtcagtcactccatacacttcatcacccttctccatctcctacatcatcttatcctgccaaaaatccccctccctatgttctaaacttatataaatgagaggctgatgccataaagttgagttcctgctttgacaagactcccgaccctgtgtgcttcttttaggccgtcaacacttgtcattctgctcagccccagagaaacccaggcaggaacaggacctctctcctctcccccggaactgcctgcaaggagcaggcaccttaggagttacatatgcatgcccaaacagcactta

SEQ ID NO: 4202 - DNA, 1400 bp, mus musculus
atggttcttactaacatttcaagtcctatattgagtacatatggggaaagagggcatccttgacctcatgaaactggaaagcttctgtaaggcaaaggacatagtcaataaaagaaatcaacaacctaaagattggggaaaatctccactaaccctatttgatagagggctaatatccaaaatatacaacaaactcaagaatttaatcagcaaaaaaccaaacagctcaatgaaaaaatggggtatagaattaaaccaagaattcacaactgaggaattttgaatggctgagaagcatctaaagaaatgttcaaagtccttagggatcagagaaatgcaaatcaaacaaccctggggttcgaccttacaccaatcagcatggctaagatcaacacatgacaggttgacaacacatgttggagacctaggaggggaagttgaaaggtcgggtaaagtgggggtaaaagggaaacctggtcatcatgtatgggtgagggaaaaggactgaagccctgagggccaacagaaagaatgtaaacaggcaacctcaggaaataggaggttggggtgatcctccagaatgcaccagagacctgggaggtgagagactcccaggactcaaagggagggacgttagagaaaatacacaacagtaaggagagagaacttatcgagcacacctccagcaggaagacaggacatcaagtgagggatggagttgccatcccacagtcacatctctaacccataattgttcctgtctgaaagaattacagggatggaaatggggaggaacctgaggaaaagaaggtccagtgacagggccaaagtgggatccagctcaaggggtggtcccaaggcctgaaactattactgaggctatggagtgctcacaaaaagggacctatctatcatgactgccctccaaaagacccaacaagcttctgaaagagtcaggtgcagatatttgaacccaaccaatggacaaaagcagctgaccgctattgttgaatgagggaaggctgaaagaagctgaggaagagcgtgatcctgtaggagaaccagcagtctcaattaatccgaacccctgagatctctcaaacactgggccaccaaacagacacatacacaagctgatatgaggcccccaacacacatacagtacaggacttctaggtctgtgttcattcagagatgatgcacctaaccctcaagagactagacgccccaggaagtttggaggtcagaccagtactctaccccccccccttcttttctgtaaactggtctgtctcacagtaattccttcctttagtttttttcatagaatcaggcttaacctgattggtctccatagttgttttaccttagaatttcacaattcccatgtctgacaaaat

SEQ ID NO: 4203 - DNA, 1800 bp, mus musculus
cctagggtttccatctccagatttgcctccatctatgatttctttattgtttcaatttgcatttttacatcttggaccactttgttcaattccttcacctctttgtcttcatttctttaaatgagttatctatattctcattaaaggcctatatcatctacattagaggtaattttaggtcaaaatcttgttctttgggtgttttagggtatttagggcttgctgtggttaagaactgggttctgatagtgcgagattacattgggttctgttacttaggtttttgagcttgccttttgccatttggttatctctgatgttaagtggcctgggtgtctcagactggagcaagcctccttggaggcaggtagagagaactgtgtgacctgggttagatcaggcctcctgtgaggcaggcagtgatgtttctggttagggcaggcctcctatgtccctggttagagcaatcctcttgtgtccctgtgtctctggtgagagcagacctcctgggagacaggctagctttgaggtctgaaggcaggtatatcgatctgtgttcctggttatggcagaccttctgggtgacaggtagcctgtgggatcccaaagggggagtctgatctgcaacaagttaagttggaggatcaaaccaggaggaagattgatgcttggacagtgtagtgactattcctggttgtcaacttgactatatctggaatgatctagtcaagttgttcagtcccacacatctgcttgctgtgtgggactgaacaactgctagatccctggacttccattcacagctgctgctgaccattgttgggagttggattgcagactgtaagtcatcaacaaattcctttactatatagtaaagactatatagactacccataagttctgtgactctagagaaccctgactaatacaggcaaagaaacatagttccacttccgctgggctctgtggggtcccagctgctgtggatactgggttcctgtcctgggagacagaaagactgtgggctttgggctagaggcaggcttgcagttcagaattggaaggctcaccagtgattctaatctggaggctgggagatagaagtttctgacatggatcttggtatggagattttgaggcattgtggctatgaattccagaagatcaagacaatgagatctctgagttcaatgtcatctgggattaaaggtgtggtggcatacacctttaaactgggctacaccttctgctggaggcctacataaggacatttgaagaagagactctctctcttctctccttcatctgcttgctgtgtgggactgaacaactgctagatccttggacttctattcacagctactgctgatcattgttgggagtcagactgcagactgtaagtcatcaacaaaatcctttactatatagtaaagactatatagactacccataatttctgtgactgggagacagaaggactgtgggtttgggttagaggcaggcttgcagttctgccatgagtgatgtttttgatgtgttcttaaatttggttttcaggtaatttactgagtattttttacatccaggctcattagcaaaatttgtttgaaaacatctttctttgttgagccttttatgtagtttaggatcagggtgacattggcctcatagaatcaggttgacagtgttccttcagtattttgtgtattatgttgaggagtattgatatccgctcttctttgaaagtctgatagaattctgtgcaaaaactatctgacactcagctttcttttttggctt

SEQ ID NO: 4204 - DNA, 1000 bp, mus musculus
aagatgttccaatgtggtaactatttgacattttaaaaaacatattaaaaccataatatcatagaccaaaaggaactttttgctgaacctgtgccctgagcagaccttgggctctggctctacagtcagttccacaacacccagaagaagctcgactcacaggtgctctaacacacccaggattgcagttgaggaggtcacaatatctgcccccaacaccaagagtaactgggaccacccaggatccagggatgcatgaactcctgcccagcctgtggtacaagttcctttggtctaaacctgtgcccaaagcagacctggagagctggctctgcacccactcctacaacacccagagggaaccagactcccaggtgctctaaaatgcccaggatcacaggaaaggccaaaatatctgctccaacacccagagtaactgggtctgccaggatcctgggatgcaggaatccccacccagccagtggcatgggctccttccagtctaaacctgcactcagagtagacctgggttgctggctttgcactcattattacaacatccagagggatcctggctcccaggttctctgaaacacccaggatcactggatgatgggatcacagtaacacaggatcacagaggaaacttaactccctggagatcagacacacccaggagcactggagctccaacacactcaagatcatagttgaggctacaccatctttaccaacacccactgtaactggaaatcccacaggttttcacaacctttccagcttgtacctatgcccagagcaaacccaggactctggctctccacccaccactacaacacccagagaataccctggagctctgagacaacagtatctcaggagcttggtcacaccagcatttcaggatccccgaggaagcttgactaccaggagctcttacacacccaggatctcaggatcaaacaatcccagaatcccaggatcacagagaaagctgaac

SEQ ID NO: 4205 - DNA, 1200 bp, mus musculus
catagtcctaacatattaagctcaccttaatctaaaacccaacactaactctattctttgtttttcacaatttctacttcttctcctcctcctatctatatattaattatattatattatattatattatattatattatattatattcattggtgctttgcccttcctatgtatgtctttgtgaatgtcagaattcaaggaactggaattacagataatttcccctggaagagtagccaatgaaccatctgaaccatcattcaagtccccaagatacgggttttttgatggtggtggtgtggtgttttttaagatttatttatttattatatatatggtattttgcctgcatgtgtgcttgcaggccaaagggtgtcatgagaactcattatagatggttataagctaccacgtggtttctgagaattgaaatcaggacctctggaagaacaggcagtgctcttacctctgagccatctctccatcctgcgaagtctattcttaaacctaattctaaacaagttactaatgcaatatcaaccccaagcaaaacattctcttaaccttaatttaaccctagccataactacaaccctagtataatgaccactcccataactaaatataaacacaaacctaaccatagacagctcagtccataacccaaacataagcatgttcttaaacatttcccaaccaagtgacctaaggtaaaccttaacattgatcgcaattttaactctaactttagccatagacagaaacctgactcaaccttaacactaacaaaatcaataacaaaaactttgaacataatatacctaactttatccatagcactaaaccagcttcaaccttaatccaagtcataaacctagccaaattcataatgctaattctaaccctaaatatattctaaccctactcctgatcctatccttaaccccaaaccagcattagagcagctctagcataagcctaacactgacacagttaatcattataaacataaatatgaccccaaacctcttcttaaacctacaacttactttgccataatcattatgctaacccatgtgaacctgattaataactctagcattataggtaagccataattcttacccagtccctagtcataaaactaacactaatcctactcataatattaacactaatcctattttttcctagcacaa

SEQ ID NO: 4206 - DNA, 1200 bp, mus musculus
tttgtgtaaagttcaacagtggcatgattccaaagaaactaaaatacaaagttttaaatgtgtacaatgaagggggaaatgaatcacttattttcctacaaacagaagctcccttcccagtgccagccagcatggctactataccacagtgctaatgtcatcaggctcatctgccttcttttgcctgcttggcagggatttcaagtattcaaggtgtctccgggcatcctcctgattctgcctcacgtagtacaccacataagagatcaccatggtgaaccagccaaacatagtgacgagcatggcatagtcagtagtctttttagggaggttacacaggtcagcgtcattggcagcattgaggaaaggtctcccagcgtgctcatccaacactgatgtcttgcaaatcacattgtgtgctgtctcatgattggatgccatgctcctgagaacttgctggagagtacagtcacaatgccatgggttgttagcaatcctagccctagccttcagattattgaaggcatttttgtgcacactttgaatcctgttgtcagacaagtccagggtctgcagggtttctgctactcctttgaatgcatgctcgtcaataaactcgatgccgtttttggacaggttaagcactctcagttgatggaggtccttaaaaatctcattggggatggatgtgatctgattggagtccaaatacagcaaaactgtttcaggagggagatctctgggtatttccttgagatttgcattgctacaggtgacatttaaccctccagaggaagagcaaaggcagcccttgggacacatactggcagaatgaaaacacagtatcatcagtacaaagctttggaggaggagacacatggagagggagcgggacagccacaggtcgaccagattcatcctgcaacctctgcataatcacgagtccattcctcattcactccaagggttgcatgtgttctgcccctgaccacactctggatttccttcctgggtggttcaaaaggatgcagctagcacacagccttcttcattattcctgtccttgattgggaacctaaaggaaaggaaagcagatgcaattagcttttctgtgaggagacatgcatggcaattaaaaagtgccctcaggagtccacctaaagtaggggcaagaaggtgaggtaggcaggtaatttccat

SEQ ID NO: 4207 - DNA, 1000 bp, mus musculus
tgtacaagcttgcaatcccaccaacaatggaggagtgttcctctttctccacatcctcaccagcatctgctgtcacctgaatttttgatcttagccattctgactggtgtgagatggaatctcagggttgttttgatttgcatttctctgatgattaaggacgctgagcattttttcaggtgcttctcagccattcagtattccttgggtgagaattctttgtttagctctgagccccattttttaatggggttatttgatattctggagtccaccttattgacttctttatatatattggatattagtcccctatctgatttaggataggtaaagatcctttcccaatctgttggtgggctttttgtcttattgacaatgtcttttgccttgcagaagctttgcagtttcatgaggtcccatttgtcaattctcgatcttacagcacaagccactgctgttctattcaggaatttttcccctgtgcccatatctttgaggcttttccccactttctcctctataagtttcagtgtctctggttttatgtggagttctttgatccacttagatttaaccttagtacaaggagataggaatggatcaatttgcattcttctacatgataaccgccagttgtgccagcaccatttgttgaaaatgctgtcttttttccactggatggttttagctcccttgtcaaagaccaaatgaccataggtgtgtgggttcatctctgggtcttcaattctgttccattggtctacttgtctgtcactataccagtaccatgcagtttttatcacaattgctctgtagtacagctttaggtcaggcatggtgattccaccagaggttcttttatccttgagaagagtttttgctatcctaggctttttgttattccagatgaatttgcagattgctctttctaattcgttgaagaattgagttggaattttgatggggattgcattgaatctgtagattgcttttggca

SEQ ID NO: 4208 - DNA, 1000 bp, mus musculus
tcttaaagggcttctaccagtttacacacgttctcctgtaatttttaagggagttatttatgtcttgattaaagtcctctatcatcatcatgagatgtgattgtaaatcagagtctttcttttctggtgtgtttgaatgtccagggctcactgtgatgggagaactgggttctgttgatgccaagtagccttggtttctgttgtttacattcttgcccttgcctgttgccatctggttatctctggcattagctggtctttctgtctctgattgtggcttgttcctcctgcaatcctgtgtgtcagaactcctaggagaccagttctctctgggaggaattaggtatagagagatgtggaattgggtcagctccagggtgcagatggaaaccagaagaatcctgtctccaactgactcagggtggatccatcctgggcaaggaatttgaatagaagtggtcatcttacctgtgctcacaggtaagttagcagtcttggtagacaagctctctccagacaatatttgtgtatggagcgctgtggcacaggatcagctctgggtgctggcagaaaccagatggttcctgtctcaggctgctctttggttcccgagacaactgagatctctgggttcgtacctttgaacatgacatacctgtgctcacaggcacacctaggagacccactctctcctggtggtattttgggtaaggagcagtatggcacaggataggctcctggcactggggcacaggatctgctccggatgcagacagaaagcagaagccttttccagtggtttttgcagagaatatccagtcagtttccagccatttaagacttatttaacttttgaaataaacctttcccactctgaggcggtggtgaagtctgtgatctcaaacactttagactcaggctcactgtttactgatatcttgcagagcagagcatctgtatcacatttctttatccattcttcagctgaggtatatcttgt

SEQ ID NO: 4209 - DNA, 1000 bp, mus musculus
attgccggtgggagtgcaaacctgtacaaccactttggaaatcaatttggcagtttctcaaaaaaactctcaggacccagttattgtactcctgggcatataccccaaagatgctccaacattccacaaagattcttgctcaactatgttcatagcagttttatttgttatagccagaaactggaaacaacttaatgtccctcaactgcagaataaatgaagaaaatgtagcacatctacaaaatgaatactattcagctattaaaaacaaagacattatgaattttgtaggcaaatatatgtagcatgtagattttactaccctgctttaagctccaggcagaccatgctaccagacccacccagatttccttggatctgcaaatgaaagacagacagacagacagacacacacacacacacacacacacacacacacacacacacacattagcttatttttgatatgctttagctccatggtctgtgttgggagccgcccccacattcgccgtcacaagatggcgctgacatcctgtgttctaagtggtaaacaaataatctgcgcatgtgccaagggtattttatgactacttgtactctgcctttcccgtgaacgtcagctcggccatgggctgcagccaatcagggagtgatgcgtcctaggcgaaatataactctcctaaatagggaaggggtttcggtttcattatagaaggggctttcgctttgggggctgggggtttttgcgctcctagctcctgaagatgtaagcaataaagttttgccgcagaagattctggtttgttgcgtctttcctggccgggcgtgagaacgctattaagaattggtgctgaaatccgggacgagaaattccgggacgagaaaatcctgggacaaaaaaatacaagaaaactcgggactggcgcaaggaagatccctcattccagaaccagaactgcgggtcgcggtaataaaggttcccgtaaagcagactgtt

SEQ ID NO: 4210 - DNA, 1000 bp, mus musculus
ataggcctggaacagagaccctgtgagcctaagaagcacgtgagcaaactggatctctccacggaaacgttccaggcacactgtgaaacagggaggaaatctttagaaagctgacaattcttcagcaagaagagggaaagcaaaacctgcagtttctgatttcgagggcatccgaggaccaagagagaagagaagaggaagagccatggcatggtggccagtgggaacacttagtgttggtcagtgctaagtcaaatccagacagccatctgggcatgagactagtgccttccagagagcagggacaatggctaggtgaggaaaggaggtgcctgaagccagtttcccaaatgtctccattttaccaacaggaatagattttaagcattcaatggacagagtatcttgttgaaactttatcagttcagacctcagatatattttaattccagcccaataacagtagtttagtttggcatcaattaagcttaacgaccaactaaaattctacttatttgattacttggtaagtttccagaacaaaatttgactgtttttaaagaccattatgcagcataggcagcaaggctatagaaattcccttcagtcattataatgatataaaagtacaaaaagcaatcatgggagataatcccaaataggaagaaaaggacccagctgttcaaattagtgaacaaggattgcagcagttattagaaatatgttcaaagatgtaaatggaggatgaatgcaatatgtgaacgaatgagcagtctcggtagagaaatgtaactgtggaaaaaccaatagaaaccttacaattaaaatgcctgtctggccactgagttggctctgtgggttaatggagcttagcaccaggccttatgacctcaggtcaatctcaggcgcctacgtggtggaaggagagttgtcttctgacctcaaatgtgtggcgtggtacatgaagacacaccccttccaaaatgaacaaatgaaatgt

SEQ ID NO: 4211 - DNA, 1600 bp, mus musculus
tttcaaccgaaagttatcaaaaaagacaaggaggggcacttcatactcatcaaaggtaaaatctaccaagatgaactctcaattctgaatatctatgctccaaatgaagggcacccacattcataaaagaaactttaggaaagatcaaagcacacattgcactgaacacaataatagtgggagacttcaacaccccactctcatcaatggacagatcatggaaacagaaactaaacagagacacagtgaaactaacaggagttatgaaataaatgcatttaactgatatctacagaatattttatcctaatataaaaggatataccttcttctctgcaactcataataccttctccaaaactgaccatataattggccacaaaacatgcctcaacatatacaagaagactgaaataatcccatgcatcctatcaaatcatcacggactaaggctgatcttcaataacaacataaataatagaaagccactcagcatcggcaagagccatcttggttccaggtctccgcagaaagtagtctgcacaagtgagtatgcactacagaagctaatagcttctgggacaggcaggagccacagagcttctgaggcagcccccttttcgggctccagacatccgaccaccttcccagtcagaggataggggtctggccggctctggagggctttgcctcagcattggctggagacatcgtggttccgggagacattttggttccgggactccgccgaaagtagtctgcacaggtaagagtgtggactacagagactaacaggttctgtgacaggccaaagcaacacagcttctgggacaggtcctgttttgggcctcaatcttcagccaggagggaggtccaaatgccagatatctgtgaaccttccctgtaagaggagagcttgcctgcagagagtgctctgaccactgaaactcagaggagagatcgagtctcccaggtctgctgatagagggtaacagaatcagcagaggaacaatttctaaccagagacaactataacaactaactccagagattaccagatagcgaaaggtaaatgtaagaatcttacttacagaaactaagaccactcaccatcatcagaacctagcaaaaatcctcaataaagttcttcctaaccgaatccaagaacacatcaaaacaatcatccatcctgaccaggtaggtttcatcccagggatgcagggatggttcaatatatggaaatccatcaacgtaatccagcatataaacaaactcaaagacaaaaaccacatgatcatcttgttagatgcggagaaaacatttgacaaaatccaacaccaattcatgaaaaagtcttggaaagatcagaaattcaaggccgatacctaaacatgataaaagcaatctacagcaaaccagtacccaacatcaaagtaaatggtgagaagctcgaagcaatcccactaaaatcagggactagacaaggctgcccactctctccctacctattcaacattgtacttgaagtaatagacagagcaattcgacaacaaaaggagatcaaggggaaacaaattggaaaggaagaagtcaaaatatt

SEQ ID NO: 4212 - DNA, 1200 bp, mus musculus
agaggaatgttgtgacatacacttatgacatcctccatggtgatgtcgcaaatgctctggtctgtctctcactctccgttctctcttctcccgtgaacttgaaccaaacatctagagcagtagccaccatgaccacaaggaaaagtctaagtgaacagcaaagcgagcctcagtactgctgtgactgggacatgaagccatcttcagggttccccccaaaatcttcctcaggggaagaaagtctctactttagccagtgaaatggagagtttttaatattttcagaaaaatatcttgttaactgtcttagggtttcactgctgtgaacagacatggcaactctttttttttaaattaggtatttatttcatttacatttccaatgctatcccaaaagtcccccacaccctcccccacccacaccccacacgctcccacttcttggccctggtgttcccctgtactgaggcatataaagttttcaagagcaaggggcctctctttccactgatggccgactaggccatcttctgatacatatgcagctagagacacgagctccggggggtactggttagttcatattgttgttccacctatagggttgcagatcccccagctccttggttactttctctagctcctacattgggggtcctgtgatcctccaattagctgactgtgagcatccacttccttgtttgctaggccccggcatagcctcacaagagacagctatatcagtgtcctttcagcaaaatcttgctggtgtatgcaatggtgtcagcgtttggaggctgattatgggatgaatccccaggcatggcagtctctagatggtctattcttttgtctcagctccaaactttgtctctgtaactccttccatgggtgttttgttcccagttctaagaaggggcaaagtatccacactttggtctttgttcttcttgagtttcatgtgttttacaaattgtatcttatatcttgggtattctaagtttctgggctaatatccacttatcagtgagtacgcatcatgtgagttcttttgtgattgggttacctcactcaggatgatgccctccaggtccatccatttgcctaggaatttcataaattcattctttttaatagctgagtagtattccattgtgtaaatataccacattttctgtgtccattcctctgttgaggggc

SEQ ID NO: 4213 - DNA, 1200 bp, mus musculus
aagctccatatcgtaaggaaattatctgtcacctagaccctctgaattgaattagttatgacttccacaccgtccccctaggcagggttatgcagggaggtgatctttcctgatgtcttatagaaaatcaatcctggcccctggcgctggctagttgctcaagtaggaaacttgtcccccgctgcatggtcttcacttcccattttttattgcatcctttgttccgcattcctgtctctgaactggttagggcaatgaccagggccaggggacactcttggtgtgatgaacacagagactcttccatgaagaagggtcccaggttgagtgataaaggtcttgctggtggcttttcttgcacagcctgattgtgtatatagagtgtttgccaccagaaacacaggcacttgcccttcggcctgagtaacagcatgtggacagatgtgcagtctggtttgggagtttgctgttgtctcttctatagtttcattgcctgtgcctcagaatactactctctattgtaattttaatatatgaaactctttcacctcataaaacctcacaaatgcacctaagagactaagacatgtaagaaaaatccactccaaccaccgtgagcctaggacagatatccttactatataaacagttattccaaagtatcaacatcaccatcctgttggggggacttgcatttttagtgccttgggagcataaactcgagataaagctgagcacgccagcagggcacagaacaccgcacagttagaaatgttaatctacatgcagtcaagaaaggcctgaagcatcccattctgcctttcttacatctgtcaggagagcctacaaggcattcttccccagccatgtgaccacgatgccttgggctttagccattccagccaactgaccctgctactgaacgtttaatagggataaattcacacgtgaattcataatcccctatctaggctaagagtgccgggtaacaagcttgtaacaaagcaaagcttgcatctcgtcctgatactctgaccccacctcacatctctcctcctaacctttctgcacctcccgggctgatgcctaaaggcatgtgccccgcctgtagacctcgccggcctacgctctgttaaatgcagcgtgatcagtgtttttaataagtagctcccgtcaccgccagcatacacattgagctgt

SEQ ID NO: 4214 - DNA, 1000 bp, mus musculus
gtgtttggcccactgagacatggcctcagatcaccatgatgactattttgtttagcagggtattagggaagggtggaagtgtagaatccatctaggtggctatctcgggcacattgtcatcttgacctgcctggacagtgactagtgtgtgcattctgtatttggagggccaacctattctctgtggtaatggggtttctttcctcccagtgctacatcgtggaaactgttctgtgccaactgttggtggctttttctctgctagctctgcaaagggagggctgagactgctctgacgaggcagggagagagaagacaggacttcacgctcccggctgggctgatttcttctcaaccatcagcaatcaaatccgcatcaccactgtgagaattaattcctcctcaagctccccttcagagaggtgagaaatttgtatgcctcccattagcataattgtgaccccatttcttgtgaaatgacaggcctggtttgattatgctcagagagcatcccaccaccctgtcctgggcggcaggatgagagcgttctcgcattaactgacaagtgaacggtctgcagtccaggctttctctgtgatccgtggccagcacttactgttaagtctatctccatgagtccagaggaagttctactttacatccccatagctggttatgtgtacactgagaggcattaaatgtccagctgtggctggaagggcagagagcttggggctggggcctgagctggtttgggacatgtatttcttatgctttggggatcaattcccttcctacccagtgggagctaaggactggccagtcatactctatactagcttatactaggttgtcgcccagcacatgctaaaccatgtgtggcacacatcttggaataatactcaattagggaaaagttatgaacttgaaattataattacagtgtttctctgtgcctcctccagaccagttagccctactcaaagtacccagggctggg

SEQ ID NO: 4215 - DNA, 1400 bp, mus musculus
cattaagaaacagtccttgggatttttcacataatacaccatttggtcttccttgaggagctgttgacatggttcaatggaaactgttataacgtcaggtgaagcccactttgtcctgaaatcccatgaatgaagttcaactcatcctttgcctggcttcttggtttcctccctggcttcagtggtgtgctgatgagttaagggtcactatgctgatgctgtgagagtggccagctctgcacagtggtccaggtgctgccaccgtttatcacgtcctctcacatggcagatgttgtcttaagcaagtcagaaggaggtggtttctcagagctgagagggaggaaaaaaaagtcagatgtttcactggctgcttgtctttttgttttgcccaagtggttcttctagcttcctgcatagaatcccttgctggtcctagcactcagtgcgggacatgagttcacagagagagctgtacaggtcaccagctacagcgcatgcctaaaaacaaccccaggtgtcctggtcaggtactctacaaggcacgagtgtaagaatagaatgtgcccacctttactcagctaagggagctcccaggtctggaataggaacaccagagctataatctttgagttagagaggacgtggcgtgcagggaagtgtttagaagtactagtaaaacaggcaggagtcaccagagggataagtggaaaccctttgaaagcttgtgtcttgggctccagagatgtgggattaaaacatttcaaggcttctctccattagtttatcatgtagataagtctgtgatggatgtctgtattgcttttagcgcaatataataaaatctccaagtatgtgatgtataactgtattcttgaaaattaaaaaaatacccattttactcttgctataaaccatttccaaaaataattctcctactatgaaaatatatattacaattatactattactatttaagtcaatcatagctttaaccttatgacagaatttagaaaaatgttttcaagttctcttccaaaaaaatatcagttcagttgtatatacattacttttgacataattatttcagtaatttacctaaaatttagaggttttgtttttgaagttagcttaatgctattggaactgtgtccgtgtagttttagaccccctcgctgaaatttaatttaattgattagccgaacccctgcttctcctgctttctccattgtccactaccacacccagctacttgccttttttttttttttccttaacctcattacatggcatgctcaacctggctgtgtttctcttcgggaattttggacggcttcctctgatgtagtagagggtcctgaacatctgtctggactacgggattccagggctacttgtatggc

SEQ ID NO: 4216 - DNA, 1200 bp, mus musculus
aatcattggattaagggctgcagaaagcacagtaataaaatataaacacaatagcaaatatttattgagtgtttctgggtgccaggcactgtgctaagtttctttcttctgttattatttaatccacaaaacaactggatgaaggaggtactgttattatcttgatttcttgtatcatattttattcatgcttgtgttctatggttgggtttacggtcatcgctgtgagttggttggacatgtatgtgcactgccgtctatttgtgaagagctatttccttgagtgcttgcttatttatttattgaactcagtgccatgggttttattttcattcccaattttttttcctcccaagcccatgatatttaactcacgtattcactcccaaagactcagcttcctttgagttttgtccttgagtcttcttttcttttttctttttaaacctctttcaatatggagtggaagaactggaatagaatttggggtcctatgttcagaaagagcaaaggagaaaaaggacttttcattttccctagattcatgtaaattgcatggactagttctttacagtatgtgtaaaaatctagttttaagatgcctgcatcttatcaaatccagaagttatagtagtagctgtttttgaatggtttaaggtatcatgcctttccttcaatccctacaggaacatggggttggtgggggaattcttgcctctcacagtccgttgaagatgcagactttcagaggatcagatatcttgcagctccaccatctaccaaatatagcctctaggatttctaaggaatggcagaatgttggtatgccaacaggaagtgatgtgctacatctgggagcatgactaaaatcccagacgccatctttctgcaagggggctgactagacaacccagtctttttcagcattcaggagggcagagcattgcctgtgaaggagaacgagtggtctccaccacagcaagtttggggtttgaggttattttgttgtttgtatctttggaagctgtgtatgttatgtatccttccaactttgaagctgtcttctcatttgaatgattgtgagttgaatcaaattcaaatagacccttaacccaagtctgctattagggaaaacaaacaaacggaaggactttggatgtggaataaactatcctgggaacttttgtgagcattctggtt

SEQ ID NO: 4217 - DNA, 1600 bp, mus musculus
gtgccttaccatgtctgataagtaaatacagctttgctcttatatttatctagaaatgtagttttgacatagcaacttgactcattcctgatagtgaatgtttgatacttgcagctgtaatgcttactatcattttgagctgccaaagcagcggttcatggacataggaagagagtcttttctttactcattaactcttattaagttaaacaccagatcttgagactttgtgagaagtcttttagagctaacgggttgtgactgctgactgtgggcaaattagtcctcatggtctgggtcattactatgatgatggggatgtctgactatattcacaatatcccaaatttcactttccctgcttatgatcattcctgatttagttatacgtggaaagggaggccccaaagaggagctgaagctcaataaagggagaggggtggtcagttctctgcatcaagattcccacttggaggaacttaaaagtaacgtggaagacaccccttcctgattccccaggggacactcattaataaggaaatttatgcaaattcaataaccactaccctcaaatatgcccctttggcatgagaattattttgaactaaacatagcaaagaaagagtaggtgaagaaggaattcggtggcttccactcctgcctaaaatcagagcataaacttcagtccctgtagtttgcttcctgccctctcccacaccagggcatgtgagagagcactaacttgtctccagggtcccccatatgtttcccactgaacattactcaaccctagaagcccaggtcacctgttcatttgtttgtttgtttaattctgttatacctccatattgtattgtcctctattaaagtagtatagcctaaagatttggggaaaggagaggtttcagttatccccatgaagcatctatctacatatgaaacaagagatttctcatataccttcttctcagcacctcacgggaccttctccaaaattgaccatataattggtcacaaaacaggcctcaatagatacaaaaatattgaaattgtcccatgtatcctatcagaccaccatggcctaagactgatcttcaataacaacataaataatggaaagccaacattcacgtggaaactgaataacactcttctcaatgataccttggtcaaggaaggaataaagaaagaaattaaagactttttagagtttaatgaaaatgaagccacaacgtacccaaacctatgggacacaatgaaagcatttctaagagggaaactcatagcgctgagtgcctccaagaagaaacgggagacagcacatactagcagcttgacaacacatctaaaagccctagaaaaaaaggaagcaaattcacccaagaggagtagacggcaggaaataatcaaactcaggggtgaaatcaaccaagtggaaacaagaagaactattcaaagaattaaccaaacgaggagttggttctttgagaaaatcaacaagatagataaacccttagctagactcactaaagggcacagggacaaaatcctaattaacaaaatcagaaatgaaaagggagacataacaacagatcctgaa

SEQ ID NO: 4218 - DNA, 1000 bp, mus musculus
caacatttggtggactctaagactgagtaaataagctgacgcatgttcagcagtggacactactcctcttcaggtgaagaaatatttcccctagatctgtctgcgctaagaacatcacaggagtcatttcccagtagcagtgagtacatcggtgcctaaatcctggtgtctaaattccccactaaaagcaacagggccttctttgggaaaaaccctattccagaggctggagagccctcagcagttaagagcactgtctgctcttccacgagacctgggctcagtgtccagcactcatgaagcagctcacagccacatgtgactccagatccaggggtcctgatcccctcttttggtctccatgaacaccaggcacacacatgttacatctatatctatcgatatacacatacacacacatacacataaaatgaatattaaaagtctttaaaagtccatttcaagactgcatctgggaaaatacagactgagctggggacgtcttgctatgccaggaagtatggatttattcaaagcatgatgagaacatggcaaaatggcgggaggtcagcctgaagaggacacagtccacattgcagcctggaaatgaaaaaaaagctgcaatgccctctaaccctttcaacctggcaagaaggctccacaatgaggttactggagaccgtcaggcaggacttagaatttaacacctgatggggtcagcaagtggcctgtgccaacttgatacaagttagtgttatttacaaagaggaacctcaacagagaaatgcctccatcagattgcctgttgcaaagtcagtaggacgtttcttgattaatgactaatgtgggtgaacccagcccagagccacccatgggcatgtggtcctgagttgtatgaaaaaatcaggctgattaagtcctgtggagcaagccaggaggtgcaaaccagtaaacagcaatcctccatagattctactttagttcctgccttcagattcct

SEQ ID NO: 4219 - DNA, 1000 bp, mus musculus
ggccagggctgagttcagccatatccccccagacttctctgtattctttgtacatttacttagtatgcgtgtatgtgcatgtgccacagcctatgtgtggaggtcagaggacaactgttaggagtcagttctgtccaatacgtgggtctccgggttgaatgcaggctccgtgacaggtgcctttctttcctcgctgaggcatcttgcaagcctcattattattatttttagatgagggctctcacggaacctagaggtcacccgttcagttaggatggcaggtcagcgagctcccggaacccacctgcctctgccatcccccagtgctggatttacaagtgtacatcatcacacctggcttttacactggttagggacctgaactcaaggccttccgtgtgtgcagcaagcactataaccgctgagccatctcccctgcacaaaagaaacagagttctgagctggtgagccctcatctcattctgtcacctcctcgacacacagtgacaaagcaagcaggcgcttgcagtgctggccagccgtggatgtattgggggtggtccactctcagtgggactggcgcatgtcttcttttacactgcggcagagtatctcatctatactaccacagggagtggggtggacctacatggaccaaccttgcaccgcagcccagaagtcagttgcagcatctgcaactacactgtctaagtacaagacgatgacccggaagccatttgaggggcaaaggcaggtgggtctctagtagaagtcctagactctctgcataaaggctcaccatcctctaaataggcagacctgacaggcctccctgtgggaaactacccgcacccattcctggtgaccagctgcctcctagggcagatactaaaggtaagaccaagtctggtctacctgtgtgactctcactgcccctttcaggacaacagaacagaaagtctacctgtgtgactctcactgcccctttcaggacaacaga

SEQ ID NO: 4220 - DNA, 1000 bp, mus musculus
tcaagaaaaggtaagagtgctggaggccactgcatcagagccacacaccccagccagcactcgggaaatcacaggatgcatccccagcccaggcagagcaatcagcatgagctccagggaagagcataggcccatgcttctcctgctgccccgcccccacaccaccccatgtaggccagcctggcatccagaacactgtgcacttcctacaccaggcactgcagaaggctactgcaggccagggagtgaagaaagagtggaaagtcagttgctcttgggactgcaaccccttggaagaattagctggatcaccatgacagctaaaataatagcccagggtcaactttgagactactctgcattggctaagagacttcataaggcattccccctgccccccccccccatgtaccacggtcatcctgagcatgttagcatcactagtgggattcaggacaaaaggacctctttaagacaaacctacaaattatagttctctaccatttgcgtctctttgtgaatctatgcatactcgtgacatagggatcaagaagagcacatggggattagcaacaagatgggcctgcctgggtccctgtagtgatgtgatctccctgggtctgatcattgagaacccagctggaaatgttgggacttggctaggttggctgtagcgccctctgctggagtcctggagaaagttcctcggctcatgggctgctcttacctagtgatggccagagctgtcacagcaggacttgccttgctgggcttgccactcagagcaacactgacatccagctctcggctcagggcaagattcttggcccacttgtgacctgtggaaagtgtgagagaggaaagttagagcattggcggctgcatgcacaaagcctgtgcacccaatacgtaggaccacacagatacaaacatttatatttgtggtcagcaacttgttaaattgagggggaaaatatatttaatcttggcctgtgctgtt

SEQ ID NO: 4221 - DNA, 1200 bp, mus musculus
tgcaggattaactccacagaattcccctggcttccatatttcttctttacatcacgttcttgcatttggggccattagtaactaaaatgaacacaagcactgctggttcaggccaagagagcaagtgtgatagcatgcaagtagtatatatagcatggaaacaccaggcacaagggctgacccatgtgctgggcaggatgccagaatgaaatgatggactagaaaaacaactacatttttttttcattaaaaaaaaaaaagagctcacattcttgctatcactgctctcaaactcaggtacttaaaaaggtaaggaggagtatgttgcccgggtaacagggacaggatcttggaccctgtcaggagagacactgattgcagcatctatctctttatagctcagacttacaagcagctggaaaaatcttctgatttctttaaaaaaacattttaatttaaaacatatatgtgtgtatgtctgcctgtgggtatgtgcatgagtgcaggtgcctacacaggtcagcaagggcaccagacgctctggatctggagttacaggtgactgacagctgcctggtgtggatgctgagaaccaaactctgccctcggcaagagtagtattggctgttatccacagtgccatttcttcagtgccatttcttcagcccaaacctttctatttcttaaaccatttttagagtttcttcagggagtgaggcagtgcttgtaaccattcacatttcctcaatagacccctgaactatcaggagatcaaagactcaccatggcaacctgtgctggatcagagcagagccccagcctggatcaagaagacaactggagggacagtacgtctctggacgcaggtgaaggtctgagtcccgggccagagtcttcctacaaggatgttagacaggtgaagggggacagagaaaaagagaggccctgggccaagtcctggatgcatcctatggagtcccaccctcacgtatgtaaactccacccagaaccagagacaccagcactggccacctctttggaaaaggatatgagacaaaactgctattctgtgtgtgatatcaggagactgggaaggtaagaagtgccgtgcttgcagccacgttgtaaactgtgtgcactacattgccagctgattacaatcaagtaatcacttaccatagagaggcttattctgcccag

SEQ ID NO: 4222 - DNA, 1000 bp, mus musculus
tttgcactaaaggaagggaatacaaagtcaaatatagcttcctctgccctccagcactgggcatagcagtcagtgactgtatttcagtatggcactcccaaatcgattagaggtgggtgagggtcaggagaagagatgccactcaaactgagttttgaagacaggggacacattcccactattaattcctttgtccctagtgccctctattgtttcttaagctcttactttgtgacaacctctgttgtaggcacaatggttttgtggtatgtgaatccaacatatctccttccttatggcattttcagtgagtgcagggagtagacattcaacaaaccaaaacccagccacaccagggagtcacaagttcaggtgcctgtgaggctgaagatgtgcaaccatgctgttcagggtcctgatccagatgcacacatctagttggggaaggcttctgagggcatggcacttactcttgggtctgaagtgtgacaatggtgaagtcagtgattggggatgagcatcctaaattcagcaaaacacagggtgagtggaaaggcaggtaggcagcggatgggtgaggaccaggttgaaaacagggacctgaggctgagtgagggagggagagcccctcccagtcaaagttctgcctagaaagacagcatgagctgagaggcaggccagctggggcaactctgaaagctgagtgcccaggggctgttctcaccagcatctatgatgttcctacagtgcctttccctccatactggtttcttatgtactaggcttatgggagcagggcaagtagcttgggcagaggttctcaggcatcagcacccctagccaggaaatacagctggggaatgcgggtgttccttttaaagtacttaacaggaggagaggcaaggtatggattctatgcagttacctgacaaaaatgcagactgtagatgtgtctgcttttgcagacaaaagctctccaagagaaggaagcttttctgtg

SEQ ID NO: 4223 - DNA, 1000 bp, mus musculus
gagacagggtcagagctaagagtccaagagtggaacaaagctagggggaagaataggaggaggtcagaagggagtcaggtctaagcagaacagatactaaaatgtcctgattacattatgcaaaagactgactcctggttcacataaaaggagctggaaactgcaactaagtcaggacatgtggtgaaaccaggcttagaatataggtagactgactccaaagcccacaaaatcggggctcatctatggggccaaatagaaagaggagaagacaaagaaggggatcttctccaaggattagcttcatcaaaaataagacctctttttcccaaagcaatatctgcctatcacatgattattacaagtgactcccaagcagggcatgacaagcaggcccttctatttgtaggctgccaggcacttgcagccatcccctccctccctcccagctgtcacacccagctcaccaaggcatttaatttggtagagcaaacgttggttatctgttagaatgcttatcaaatgccaattagtactgtgtggtaattgatgtctaattaacatgccaataatgctgttgggtgtcaattaaatgcctaaacagtccttcctgttttattgcaccaagacagtgattgtgaatttctcagttcagtaactttggagtgaattttattgtacgctttttggaatatggaaagccagagagaacttgagggcagatatttaattgatgtgacactctggtattgaaaaatcctaacttgtgttcagtacctttctgagaaacttaattgttcgtttctgaaaaggtcaaagacataaggtatacatatattacctgtatttattcttaacagaatttcaaacatacgcacaatagaattttacatatccacccttctcttcctctctaactccgttaggttttccctcttccaaacttcatgcctttatgtttttcctttctctttacattagcccacaaatagttcagccc

SEQ ID NO: 4224 - DNA, 1600 bp, mus musculus
acgtccttacttatcacacatttccaaataggtgtgccagggatgtagatgtactctgagtagtgattcctgggttctgttgctagatggctgtttgctataaggtcccggttgtcactatattagcttcaccttcatgcctgaaaggacagaatgcgtacacacatgggtgggtttctaaacaacgcttgaatggtgctagacactagagctggccaaaggagggggtaacggttgcttggctccacaactccctttggctgaagactcgggcttccgtggctttgttcactaatgcctgccatccccccaagcttggatgacttgaagggcagaccactggattctgctgcctggttttgagccaaggaggaaaagcctaatctttatgctctttatttataccaagcagagatggtcagtccagctctcagtagcacaatacttcttggagcttcctttataaagttacaggcttgctgactgcaaactgtgaagcaatagggggcaagacagcctaccccgctaaaattcaccgttgacttattttgtgtagagaaataaaattctcacagtggcagctgttttcctgccatcgtttctatactccctggccagaagccagtctcaccaatgtctaataaagttatgccattatttttttctctgcttgagaaaatgggcatttccctttgttttggaacaaactcctgttctgtcactcaacacttaaagagattgaaaatgacaaagataacgtgccctgcccatgtacattcactgtcttgttcgtcatttggcctgatgggaacaagtgtttctgcagggccaggcatgtgcacacggatgcctgcacaggggcagggactggaacaagtgatgaagagatgctccatcatcaaggcgaggaagagcaggctagcactcttggtgtcttttaagctgggtgacctgggctttctccagcctttgagtagtctcaccaagtcagaggactttgtactttatattgtacattgtatattatttgagaattaggcaactttcaaacaaggcatcattcactgggcccatcctctttcccagactcactggcgagaagataaattatctttatgtcgggttgggttccaaagctgtctgttctcactttatatttttgatatttccctaaattgatatagccagtcatatatatgtacaaacacacacacacatatacacttatcctactacgtgtgtgtgtgtcttaggattttactgctgtgaacagactccatgagaaggcaactcttatgaaggataatattttattgggctggcttacaggttcagaggttcagagattcagtccattatcttcaaggtgggaacataacggcagcatacaggcacatggggccggagggtctgaaaggaggtgttcaggatatgtaagcagtatgtggttttctttaaggaatttgagcacccatgtatttgggtattaagagccccaaaccaatcttcctcagacaccaaaagacaaatgtacttcactgatttatcctctgcatatatactttgcataatcaagtatatagttcaaaaacaccttagt

SEQ ID NO: 4225 - DNA, 1000 bp, mus musculus
gataggggccgtgtcctgaacatcttccacattgatggtgacggtggtggtggctgagaacaccatgtcagcccctcgaagcctgcccccaccatcctggggaagaagcagtccagagaagggggatgaagacaagctgtccgaggggtgatagactccacttgaatgggacgcccacctccccagttgtgaagccagctggaccctttcagtgtctatttgttcttgggtctctggagcccatttctcctttctcaatggtgttgtggatgccaaagcaatgacgcatggaagttttaagtcaggtgtctggcaggtttctttggatacaggattaattaactctctgggtacattatgtgtgattagtgactaggaggaagaatcagaccgaaattcctactcctagctgaaaaccaagcctcgggtaattcccaagaactttccatatgtccagtctacgctggggaccacaggatctcaagagtatgacttgggccttcctctgtttaagagtaagggaagtgagcagctagcacatagactggtacccagcctcctggtacagactgtaggagagtgacctatagggaagcagtgatctgaaagagagctggtgcagaagaatccaacaggcctaataggacagctgggttttccttctccctggtgaaagaggcttgtctgagactctgctaactaccaacttcccaccatgtgcttcataaactgaaatgagagtcttcagtaagcttcagccatgggaacatgagggaacaaagttcagagaaaggagctggccacacagcaagaagagcagcatgagccagtctggccagcaggagaggtggcggagcttgtgagagggatgaaaatctctgtgtcatggctacctcctctatgaagtgtacccaatatttaagtttctaaggagttgtatgatcaccgccagaagaaaatgtggcctctctagcctaacacccccagcattcctggaaaa

SEQ ID NO: 4226 - DNA, 1000 bp, mus musculus
tccaccagcttatctcttgataaggacagatttatgctacctcaaggctattgtacacaatgagactatggcttagattttgcaaataccttctccagactatgcttacaatgatagacttatactcaagtagaatcttcagcttatatgataatttcatcaagtattttcatagtatttttcatagcagtttgataattgtacattctcaacaataattcaagttacacttttttagccatatcagcacttgctttacaatagcttgcctcatagtacatttgatttgcatttctctaatgactactgctattgaatatcttttcatatgttcatgctcatttgtgtaccatagcatttgcccaagttgttcattcattattattcattcagttctttcagtcttccctaattcaacaacagggatcagctgcttctgtccattggttgagtgcaaacatctgcatctgacactttcagctgcttgttgcatccttcagagggcagtcatgatagatccctttttgtgagggctccatagcctcagtaaaagtgtcaggtcttgggatcccccctcccccacttgagctggatggtcaggcttcagaccagttccaaacttttaatgatcttgcttcaagcttcctgagccctggtctaaagtcataaagccaccatgcctatctgatctgcattctaatatctatctccagaggcttcttatattgtaatttccagttggaagaagtatttctactctattttcacaacagtaaaggttgattgtatatgttcaactaaaactattaatgaatgaatgactgagaagatgagtcattaaagtcttgcaggcattagtaagtgaattcaacccttagcaccaatgcaaatcggtgagtgtggcatttgaaactacagtactgggaaggcagtgacaatggatcttcagatattgaggcatctattacaagtttacttggagtaaatttccttttattta

SEQ ID NO: 4227 - DNA, 1000 bp, mus musculus
ttcagaagtgatttttacacacaaaaatgataatttctctctctctctctctctctctctctctctctctctctctctctctctctctccctccctctctctctctcctctgttctttaatcctttttatagtccagccttcaatctcttcctggtatgcccccccaactgcttgatccccatctcatacctcctaccctggtctccaagaggatcaccccaccacaccagcccccacaccaccagacctctccacttcctggggtctcaagtctctcaaagtttaggtgcaacttttcttaatgaggtcagaccatgcagtcccttgtggtatatgagctgggggcctcatatcagctggtgtatgctacccagttggtggctcagtttctgaaagaccttaggggtccaggttagttgaaactactggtcgtccctcctccttagattcttccagatttttttcccaattcaactgcaaaggtccctggtttctgtccattggttgggtgctagtatctgcatctgactctttcagctacttgttgagcttcttagagggcagccatgttagtctcctgtctgcaagcacacattacagcctcagtaacagtgtcaggcccccagggcctccccttgagctggatcccaattttggcctgtaactggacctcctttctctcaggttcttctccatttttgtccctgcagttctttagacaagaacagttctcggtaagagcttttaactgggggatggcaacctcacccctctacttgaaatcctgtgcctccactggaggtggactctacaagtttcccatccccactatagagaatttcttcgaagggatcctccctttgagtcctgagagtctctcaccaggtctccagtatattctagagggtgcccccacctcctacctccagaggtttcctgtttccattcttcttgctggccctcagggctttagtcctgttccccccaatacctgatcgt

SEQ ID NO: 4228 - DNA, 1000 bp, mus musculus
agtgtttgaaagaaaccaaatctgaacgatttatgctctctgcttaccacggtggagttgttgacaaaatactggtcccttcacctttaactgtctgtttcagtagagtgcatttggcattaaaaaacaagctgcaaatataaactatgcaaagtagactaacatgaatatacctgtgatttatatatgccaagctttccttcacattttctctattaccagaaagcaaattgcaaaacaaagcctttacttgaagctcaattatgattgctgattctagcaattttctctgtagagcagagatcagaaagcttaattctgagccaagtcctaatttgccataaattctttgaaccatatctgtactttatttttatttttcaatatgaagaaaatttaaatgttatctaggtaaaagtagaaaaagcttttcaaaatactaaaagccagggcatgctaagacattagaagttcactatggaaatttagtcaccttgaaacattgaataacaacctgctacgtccttatgtctgaactgtgcctgagggacacagatggaattgtccttgactcatggaaatagcaacacattaatagcatctaggggtggtaactactctttcttgctatatcacattacagtcacattggaaatatgaatggatactatagtctctgtgatgtttctgaaagttaaacttgtttctataacaaactattttattcatcataactttcatacaaagaggtcatcaagcataaaagataactggacaggatcatcacaaaaggaacatatttattgttataatttgcatcttactagtagtcctcaaacatcgtagaaagacttggttactaagtagcactgttgggatgtgagtcagcatttaggagtagcttagaaagaggctgtccagtctttagaggaatgtttacttggaaggctgatagtcttttcactgcctagccaggaccttagatttttctttatcattt

SEQ ID NO: 4229 - DNA, 1000 bp, mus musculus
tgcatgtgtgtgtgcacatgggaacacacatgaccatgcacacacacacacacacacacacacacacacatagaagaaataaggtacatttccaaatattgatggtcacactgtaaaatttcgccaaatactcattttgtaagtagaataatttgtatttttttcttagatcatacaagtcctctatggttaagtttaaaacatcatccacaagagagaggcccttccattacttttatctcagaaggcctcctcggcagaagaccatggtacccatgaaatccagtgcgaatgagtcaggcctgtagggtccaactaggtagacctgagtgacagatttccattagagtacaaagtccattaccacatcgtcagaaattaactgagcaggtcagtggttgaggctggaatgctgggaataatcagtttattttgaatgtgatacaacaggacagtgtgatagccataggagtcctttaacctctgtgttttctcagctacaacgaatgtttctacggataccctgaatggagtggcagccattggaaaggaagagcacaggagcctgagcctgcatggttttcacttaaagagggaagttgtcaacatagcccttaagttttaacctattccatttaggtctctggcttctgcagcctccatctctccagaactcactatttttcatgttcatcttgtgaagggacagcatggtctttggaaaacatgcctatctgccctgtcctgcttccctgcctcctgcagcactcagctagtcttctagtactcccttggacttttatttttaactctcaatggcagactcctggaatatcctgcaggccattctcagctgtcactctacctgatcccttagcagtgtttgtcatgatggcttgcttttttttttttttttcctcttaaagtgcttcaccattcaggcatcaggacaccattatttcctgatgcctcttacttctcagtgtcacctaatctggcc

SEQ ID NO: 4230 - DNA, 1200 bp, mus musculus
gccccgtaagctgtagcttggaactctctgatctgttaaattatattattctcctggaaaatcaggagaatagatccctgttctcatgctatgtatagaatgaaatagcatcaacataaaaatgtatactaaacacaaatcaaaaactccagattggtagaaaattctatttttattaaatttttttaaaatttacatttcaaatgctatcctgaaagttccctataccctccctctaccctgctcccctacccacccactcctacttcttggccctggtattcccttgtactgaggcatataaagtttgcaagaccaaggggcctctcttcccaatgatggccgactaggccatcttctgctacatagcagctagagacatgagctctgggggtactgattagttcatattgttgttccacccatagggctgcagaccccttcagcttcttgggtactttctctagcttctccattggggccctgtgctccatccacttctgtatttgccaggcactcgcacagcctcacaggagacagctattatcaaggtcctttcagcaaaatcttgctggcgtatgcaatagtgtctgggtttggtggctgattatgggatggatccccggttggggcagaatattaatgtagatcaaattttcctaagaagcagcagataacatgaagtgggaagtattcatttggcattgtggtggtttgaatatatttggtccatggaacgtggcactattagggggtgtggccttgttggagagaaagtgcctcattattggggagagctttgagttcctatgcttaagttcttccttacctagggtaaaagcctctcttgcctctttggctgcctgcagaagacagtgttctgctgctgcctttgaatcaagatgcagagcttgtggcttctctagcaccaaatcaaaactgcatgatgccatacttcccaccttggaaatgtactgaacctctgaaattgcaagccagctccaattaaatgtttgcctttataagagtttccttagtcttggtgtctgttcacatcaatagcagccataactaagacaaggcatcaaattttaaacatttgggtatgccaaaatataatttgcgatttaaatttaaaaggaagttgctgttttgaaggtaacatctacaacatattttaccatatcaaggttatagaaa

SEQ ID NO: 4231 - DNA, 1600 bp, mus musculus
gcatgcgtgacaagcttaaaatacttacgtgacttgccttcatgtgtagctaacacccctgaatttggtactcactgtctccctgtgccctccccaaacacacttaaaatctgaattatctgcaactcattatctctacttcaaaacccacttgatttcctttgcccaggctagttctgaaattctttactgtactgtagtcaaggatttagattataaattgaggctcctcagtggagaactaagcctttctgagcagtgttttctcccagcagaactgacaaacccattgtagtcattgacagccttagggcacttgagtagaaatgcaaattcttgatatctgaaggctactggctagggaagtctggtggctttgactcaaaactgagtaaatcttcaggttagtgttgtgatgcaataaaatttagaaacatttttacagggaaacaacacatcttctctaagcccctacatacagatagataggatacggtttgtccacagtttgtgttcatagtcttcaatacaaaatcttctcaaatttcagtagacaagatatgtcttatggaatagggcatgtgcgcatgcgtgtataataaggagagtaggaagatttaaatagaatgtcacccttagtgcgcatgcgtgtataataaggagagtaggaagatttaaatagaatgtcacccttagtgaatgcttagtcatcagagagtgggcttactagagagatactaggaggtgtggccttattaaggtagggttaagattaggctttgtgtgtgtgtgtgtggggggggggcagggagattgtcactggggcttaagccaggcccagtggctttctctttctgttgcctgtagatccagatgtagaactcacaacttctccagcaccttcatgctttcatgctcccctctatcgagatagtggactaaacctctaaaactctaagtcctctcctttataagagttggcatagtcatggtaccttcacggcaatagagtattgactatggcagagaatataattaatatacacgtctatataaacacagcatatttcctctctctaatttaccttttactttattgaactttgcaggtttgaccttattctcttaaagcaagcctccattctgttaatgaattctgtggatttggcttggggaatgtccaattattttgcctgtcttatctttgcgttgcttgtgaatctttggcttattgcattgataactcaaattacttctaaagctttctcagtgtgtcctcagtcttccaatttcttacccacagatgagaagcaagaacaatggaatggaaaggaaatgagatgcaatggaagtaaagaattaatagttgtccatttacttttcaaactcattatgtcagctggtcagactaactacaggaaccaatgttggctatatactccaggcactccttggtaaattaagtggctgtactatgaaggataatcaaaatattcttgatagcaaaatgctgtcttcagggctgtaagttgacactccccatgaagttcttagttaataaactgttacactcaaagtagcaactttgatatctgtcttt

SEQ ID NO: 4232 - DNA, 1000 bp, mus musculus
taccaataccatgcgtcagtcgtgtttccccctttccacaactttcttgtgtttgtttaaacttattagaatagggcttgaatagttcatctatttatctcaaaaaatattagcataatataaaatgttgttcaaaatatcaccaactgtactgtctcttttgtcaatttgatacaagcttgagtcaccagggaggaaggaacctcatttgaaaaaatgcctccataaaattgggctacagataagcctgcagggcattttcttaattagtgattgatatagaagggcctaggatggtggtcccacattttgtaagaaagcaggctgagcaagtcatgaggagcaggccaacctctagcatcttccatggcttctgcattagctcctgcctccatgttgctgctctgcttgagctcctgttttgacttcctttgatgataatattttacatgaaattgtgagcaaaataaaccttttcctctccacgttgctttggtcatgatagtacattgtaacagtagtaactctaattaagacactaaccagtgctgtacatattgcactgtccaaaagtggtgaacttttggaggtaaaaatatgctttccctctcagagtttctgttgatattaaggaaattttacctactttcatgataaaagcctgaaatttagaagaacataagtgacaggctagtatccatcacttagtaaaatagcatacgtttttccagttaatgttataatatataattgagccaatattataggagtaagatctgaagtgctaggatagatggtaaataagacataccagataaagtataaatgcaagaataaatacacattgatgagtagagtggaaatataattataaaccaattatcagtttttaactcacttgcaaatccatcatgtgggctttaaacataaagtaaagtgttctgtttatgattggcaacacatgcaagtatctggcaaaaaaaaaaaaaagatcaatcaa

SEQ ID NO: 4233 - DNA, 1400 bp, mus musculus
tatttgcttgagatgtaaactacaagtcattctcaggtatcataatttttgccatgtaaggtaaaaggaaggagatacaattagtaagacttggcctctgtttcttcagtactacagatggtcctgatgcagctctaacacatggctcttccttcttggaaagattctactatcaccctaatctaacagctaggaagttaggaatctactttgacagctttgtcactgttgcattagagatttagtctttgctgccactatcaagatgcttgggcaagaaaacctatgtgtgttgtatattctttagattccatcctgaactattttgtatccactgaataaactttaaaaagaggagaatctacctgatccctggtgtgatttttcaccattcatactaatttcatgtaatccacagagcaggtgacattgtttgctggaggcattttctccacccacatgtctaaattactgaaagtatcttttctgtggtttgaagagtagatttgtttcctgctcaggctaataaaggaattgcttcccttgtgagggagaaaggttagttaaacttggtagcaacggccttaaagtcttaactttgtaagcccatggtaaagaaggtgggacagaaattgactgtgatcatgaagtccatctgtgcctctatcaccccagccatactcatggggagggagtattcatagagagtcacagcccatgatgaactcagcctgagtgctgcttcacaagtggcaaatatcgacttggatttgtgcttatcttactagtcgtgctgatgagcttgaagcaaggcaacccgtgatctgcggatttgcaattgcatgagtctggtttattggatacattgttcatgtgatttctgagggacacatttggttggggttttataagacactaccaaaaataaataaataaataaacaaacaaataaataaataaaataataaaaaaggtcctgagttcaaattccagcaaccgcatggtggctcataaccacccgtaatgggatctgatgccctcttctggtgtgtctgaagacaacaataaataaatctttttttttttttcttttttttttttaaagatagggtctcacaatccctaatatttcttaagctggcccagaacattgtatgtaacgtatgcttccctcactcatggaacttttcctatttcagtctcataaatgctggaattacagggatgggctactatactcaccatacaatgaatcatttagccatcaagatcgtcagtcttacacttggttaatttaagcattatgaacagtcatttttataatgttgcctctaaattttacaagttgatgagctttaagaaagcacagaatccttttcaaccttacacgagaaagcaag

SEQ ID NO: 4234 - DNA, 1000 bp, mus musculus
cttcattcacatctccagtgctatcccaaaagttccccccacacacccccactcctccacccacccactcccacttcccggccctggcattcccctgcactgaagcatataaagtctgcacgaccaatgggcctctctttccactgatggcctaccaggccatcctctgatacatatgcagctagagacacgagctcctggaggtactggttagttcatagtgttgttccacccatagggttgcagatcccctcagctccttgggtactctctctagctcctccattgggggccctgtgatccatccaatagtgactgtgagcatctacttctgtgtttgccaggccccagcatagtctcacaagagacagccatatctgggtcctttcagcaaaatcttgctagtgtatgcaatggtgtcagcatttggaacacatgagacttaggaggaacaaagaccagggtgtggatgctttgccccttcttagaattgggagcggaacgcccatggagggagttgcagagacgaagtttggagctgagacgaaggagtggactgtctagagacttccatatccggagatccatcctctaatcagcctccaaatgctgacatattgtttcttaaaacatcccttcttaatgtgttatattggagctaaacaaagtgatctgtgagctaaattagaagacagcagattcaagaaggccaatggtactgtggtggttaaatcagtggcctccccattacaaatataaaagaattacgtgttgtagctgttttttacaccaacatcacacaagctagagtcgtctgagagggcagaacttcaactgagataagattctcataggatatggttgtaagcaagccctgatggacatttcttaattaatgattaatgtgaaaggagccacgggtggtgccacctcggggctggtggtcctgggttctctaagaatgaaggttaagcaagcaatgaagagcaagccagctgat

SEQ ID NO: 4235 - DNA, 1000 bp, mus musculus
tgtatcttgtattcttttggtgttgcttgaatctatgactcctgttctctttcctaggttttctatctgcagggttgtttccctttgtgatttccttattgtttttatttccacttttagattctggatggttttgttcaattctttcacctgattggttgtgttttcctgtaattctttaagggtttttcgtgtttcctttttaagggcttctacctatttacctgtgttctcctgtatttctttaagggagttatttatgtctttttaaagtcctctatcagcatcatgagacattaatttaaatcctaatcttgcttttctgatgtgtttgggtatccaggatttgctgttgtcagagaactgggttctgataatgccaagtgcccttggtttctgttgtttatgttcttgagcttgcctctctccatttggttatctctagtgctacctgcccttgctgtctctgactggagtctgtccctcctgtgatcctggttgtatcagatctcctcagggtccagttgtctcttgtgattctgggatcctgtgatcctattgtgtcagagctcctgggagtcaagctttctctgggtgttgcaggattgggtagggaggcagcctgggtctgctctgagcacaggtgcaagctagaaggaaactgtgcctctgaccaggcatggttttgtgtttccctgattcctgtagggcatcccagttatgctgcatgttggggcagttgttgtggcctcagcctgtgatcttgagtgtatcagagctccagtgatcctgagtgtattcaatcttctggcataagagcttcctctgtgatcctgtgctcctgtgttcttgggtatgtcaaagagtcagtaatcctgtgatcctgtaatactgggtgtgttagagcacctggaagttggattcctctgggtgttttaggagtggctacagagccagcactctaggtcttctccaggcacaggtttaagctagaaggaac

SEQ ID NO: 4236 - DNA, 1600 bp, mus musculus
gctcgagtctcgagtcgagcggaagggacttgtgccccagatcaggcccgggtagcctgcttccctatgtaccgcagtctcaagttccgcgcgattggattggggcaggcactgtgatccactcaccagaggtcttagggtcccgtggggagtcctgtgtggacccttgcgggtgttgggcaagactctgctggcaaggtagcccggggctcgagtctcgagtcgagcggaagggcctgggaactttttagaagggtttccttccaggcccatgaggtaggtcttgaagcccttgatcacttactaaggaaccccaacctgtgttgtactggcatcaggatactgagtttaataagcaccagaaggtctcagtatataggaggcagatgtggcagccactgcatgatggtagtccaggacataccctgaattcacatgatccttgaggcctgtgtcatggagtagcttcagtgactagaagaatgggtcagatttatttcctatactcaaagcaggcagaaaaggatgaaagtcctccatgtaatatcaaatatatccagaagagggtgctagatcctcagtacccaaagtatccagaagatgggataagacagattgccatccagtaccaaagtcatccagagagcatcttaagatcaaagtcagctggtgttgtagccctaggagcaaggaggaggaggctgcatcctgatgccctcttctgacagtcagaatgaaattgaggagctcttgcagagcagctgcagccttgatatttcctgctctctgtcaaacaaactgcttcccagaagctccaagctcctgattcccattactggaagtccaagctcaagcccaccttctgtaggaagctccctctttcatgcccaggattcacagtgacttccccaggaccattaattcttgctctttaacactaagaccaatggccatcttgtggctgcctctttctggtctcggtatgttcattgttctctcctccaagaagcctgcccagttttgtcaacatgtctaagggtgaaccataaaggtagttaatgaatgctccaagagcagttggagtcaccacacattagtaacatcacagaaaatgccagggctctccaggttacaacacaacatctagggaagggacttctgatgtctcacaggacagctcttaccttcctgctcagtacctcacccaaattgacctgaaatcaaagtgccttttccagagagtgggatagattgccttttgttactcaaaatattaaaaggtggctatcaatcaccttccaatgacaaacgtatccagaagagatcctttggatccccatgcaaatccacatgaaatacccagactccagaataagacactagacaatacacaacacatctagataaagtgtgatagatccccttgcagtactgaaactagccagaagaggttaatacacgtccagccagtttctatgctgtgacgactgacctggacagaatggaaaatgtcaccactaatgaccaaagtatggttatgttggccaggtgttctggaagattttacatgagaattgcagcccagcttgttattgcagga

SEQ ID NO: 4237 - DNA, 1000 bp, mus musculus
ctcatagagactgaactgtgaaccagagaatatgtaagggatggaactaggccctctccacatatgtaacagtttcatagctgggtcttcatgtgtctacttccctttttaggaatcatatggttttgttcatttccatcacctgtttggatgagttttcctgtttttctttaaggacttctacctgtttggttgtgttttcctgtttttctttaaggacttgtaactctttagcagtgttctcctgtatgtctttaagtgagttattaaagtccttcttgatgtcctctaccattatcatgtgatatgcttttaaatctgggcatttcttttcgggtgtgttggagtgcccaggactggctgaggaggaaatgctgggtactgatgatggtgagtggtcttggtttctgttagtaagatttttacacttgcctttcgccatctggtaatctctgtagttagttgttatagttgtctgtggttagagcttgttcctctggtgattctgttagcctctatcagcagacctgggagactaggtctcttctgagtttcagtggttagagcactatctgcaggcaagctttcctcttgcagggaaggtccatagatatctgggatcagaacctgcctcctggcagaagatgaaggcctggaacagggcctgtcctagaagctgttagcttctgtagtttatactctcacctgcccagaggagtctcggtgggattcacgaaccaagatggctctcctgcatgctccgcaaagccctgccgggcgggatggacacctttcctctgtcagggaaggtgcccggatgtctggagcctgaaacgggctctgcttcagaagctctgtggcttctgcctgttccagaagcagttagcttccgtagtccacactctcacctgggcagactagtctcatcgggatccgggaaccaagatagttccccctggtgctgcagccaagacatcccgtgtggggcagacacctctcc

SEQ ID NO: 4238 - DNA, 1600 bp, mus musculus
ccccctgtgtcaccctgtcaacaccccaactctgggggacctttgtttttgaaaccctgcagacctccaacactgcaccccactggatccctttcaagccacttattttcagtagtgagattcccccactagagtgtttgcagtgagaacctgaaattttcatttaactttcccctgccctaggtcctcccagttaggaacctatcactgtggagaatagccagggccaggcctggccttgctcacttgctccaaaaagactttaatttgcacacttgcctcagggtggttctggggccaggaggctcacaggtccatgtcctgcattcacccacttgggcccccagctgggaccaaagccctgaggcccctgagcctccccagctgccccgcgggtggcgccctcctccatccctccaccctctgccctctgcagcagtgcccgccccctgctcacagagtgctgcagcagtagttagttaacctgctccaaggggcaaacacgtgcaggggcaggcagacactcctggaccgcaggaatcgcgtgggtgggctgagtggcgagggtccccggggaggatcggggtgggtgagagtaatggggtgtagggggctgtgtgggtttaatcttgggctaaagttgagactgggtaggttatgggggccagctggggggagctagaggaacctcccacagcggggacatcaggacaccagggtcctatgccagcttgaggcccggagtgagggagggcagcggagaacaatgatataggtataaatattgagccatgacattgacctaccaggcgcctcccctcccctgtgctcagggcacactctgggctgctgggcaagcaccctctcttcctgtgctgcactcatccctgaggggccccagcgaccttttcctccctaagactgcatgagccctgctggggggaaaagtaacttgatttttctccaagaaacctggccagattaggaagccaaggcgagtagagaggaggaggaggggatctggtggaacccagtggaagtctcctgggcagtctgatcacactttctccttgtcctcctgtctcctcctcctaagtgcagagattggggcagactttgtaattgctgaggagggggaagaggagggattggtgctctcttgcagcaccagcaaggtgcagcaacttggctaggtggagtttcactgcagctgagcctggtttgctccagagggcaaggaaggctgtccatctagcctggtggccagtacaactccaggagtccctgaggcgtgtaaggcagcaagtgctcacccagattccactgtgctacaccagcagcttgcagccagcatggagaaggacagcctgagtcacactgatcagcagtatgagtgcatggcagagactggagaaggcgcctgcctacaggaaggtgttcaaggcctgcaacctgaagaatggcagccccttcctgactctgaagcacttgggagtgcagaccagtgaggagggcatgctgctctccaccatccacgaggtggcggtgctgaggcacctggagaattccagcaccagatcatggtcagttgagccaggag

SEQ ID NO: 4239 - DNA, 1000 bp, mus musculus
agaagaaagaaataggaaattcagatataatagaatacatatcaaggccagctgaaaagctgtcatgcacaatgaattctatgcagtgattgtacaaggctaagattaagataaaggggaattatgctttagtatgaagagcttccacaggctattgagatgtttctatcacagcctacatcaggcaatccctaatttcaaatggcaggaacccaggaggaatgtgtctcctgcttctcaagaccacagacaccatccttttttacaagtagctgctgcaggctgctgagaggtttccattttgacctgtagtgggcagtccctctaattgcatgctctctccatcacccttgaaatgtaaaaatgcagataaccaatgccaaacattaggctgtggtcagagtcttgtggaagtgttggtggaagggttgtagtagccagaagggttaggaagccacaagaggacctacagtcaactaatctgggttcttggagttcacagagacggaacaatgagccaacaccatgtaggggcttgaactaggactgttacataaatgaaacagatgtacatcttggtcttcatgtgggtgactaacaattggagtgggtgctgcctcggatttagactctgttacctgcctttggatctcttttccctagctgggctgccctgtctgggctcagtgagagagaatgcacttattcctgatgcaacttgatatgccacctgggtcatttaaaagtgatcttctggtacacataacaggaaagtaggaccatatccctgtcatgtgagtgtccagagaacaaggtggtacatgattaatccatgtgggctgaaaagagaaggagaatgttctacagaggaatgaactacagctatggctgtttctgtttgatcttgagccaactccactgtgtatattcagaagaggaagcaattgtctcagcagcaatttcacaagacagtgactttcattactctccttatgctgcc

SEQ ID NO: 4240 - DNA, 1000 bp, mus musculus
gaccacagacaccatccttttttacaaggagctgctgcaggctgctgagaggtttccgttgtgacctgtagtgggcagtccctctaattgcatgctctttccatcaccctttaagtgtaaaaatgcagagacccactgccaaacagtgagctgtggtcagagagtcttgtggaagttttggtggaagggttgtattagccagaatggttaggaagccacaagaggacctatagtcaactaatctgggcccttggggttcacagagatggaacaatgagccaacaccatgtaggggcttgaactaggacccttacataaatgaaatagatgtgcatcttggtcttcatgtgggtgactaacaattggagtgggtgctgcgtcggatttagactctgttacctgcctttagatgccatagagaagatcggaggacctggttcctagataattccggaagtgacatcctgagtcacctctccataccatagagctggaaggggttgctgtcaggggtccaggaactcctctgcctagaaaggaaagctagcagtgaccaactgggagggggacaagagcatgtggctggattggaagtggccacgaaggtcacatcttgcctggtgtcctcacctcctgacacaggtgtttgagtatttcctgtgattgctgccagcatccaggaggcaggcaagagaaagagtgctttgtgaaggccctgcagcagaagacagacacagaagtggaacttcacgaagaaacttgatcccagggccactggagtctgaggaccagtggatggagagccatgataatccaggtaagttggcttctgtggtccctcaaccaacaccagtgctttcccaccaggccagggaaccatcttttgtgactccggggtgcctggactcctgccccctgccctccaagagccccacactcctatcttagaaggataggctgttgttttaggttcctaagtgtcctttcaataagaacatcg

SEQ ID NO: 4241 - DNA, 1600 bp, mus musculus
cctgtcctcatcaggctgatatgcccccctgtgtcaccctgtcaacaccccaactctgggggacctttgtttttgaaaccctgcagacctccaacactgcaccccactggatccctttcatgccacttattttcagtagtgagattcccccactagagtgtttgcagtgagaacctgaaattttcatttaactttcccctgccctaggacctcccagttaggaacctatcactgtggagaatagccagggccaggcctggccttgctctcttgctccaaaaagactttaatttgcacacttgcctcggggtggttctggggccaggaggctcacaggtccatgtcctgcattcacccacttggtcccccagctgggaccaaagccctgaggcccctgagcctccccagctgccccgcgggtggcgccctcctccatccctccaccctctgccctctgcagcagtgcccgccccctgctcacagagtgctgcagcagtagttagttaacctgctccaaggggcaaacacgtgcaggggcaggcagacactcctggaccgcaggaatcgcgtgggtgggctgagtggcgagggtccccggcgaggatcggggtgggtgagagtaatggggtgtagggggctgtgtgggtttaatcttgggctaaagttgagactgggtaggttatgggggccagctggggggagctagaggaacctcccacagcggggacatcaggacaccagggtcctatgccagcttgaggcccggagtgagggagggcagcggagaacaatgatataggtataaatattgagccatgacattgacctaccaggcgcctcccctcccctgtgctcagggcacactctgggctgctgggcaagcaccctctcttcctgtgctgcactcatccctgaggggccccagcgaccttttcctccctaagactgcatgagccctgctggggggaaaagtaacttgatttttctccaagaaacctggccagattaggaagccaaggcgagtagagaggaggaggaggggatctggtggaacccagtggaagtctcctgggcagtctgatcacactttctccttgtcctcctgtctcctcctcctaggtgcagagattggggcagactttgtaatcgctgaggagggggaagaggagggattggcgctctcttgcagcaccagcaaggtgcagcaacttggctaggtggagtttcactgcagctgagcccggtttgctccagagggcaaggaaggctgtccatctagcctggtggccagtacaactccaggagtccctgaggcgtgtaaggcagcaagtgcgcacccagattccactgtgctacaccagcagcttgcagccagcatggagaaggacagcctgagtcacactgatcagcagtatgagtgcatggcagagactggagaaggcgcctgcctacaggaaggtgttcaaggcctgcaacctgaagaatggcagccccttcctgactctgaagcactttggagtgcagaccactgaggagggcatgctgctctccaccatccaggaggtggcggtgctgaggcacctggagaattccagcacca

SEQ ID NO: 4242 - DNA, 1000 bp, mus musculus
actcaaagaaaataggactgacaagctgctactcaggctcactcagtgtgaatcaagatctacaggggaaagggttggagtgggggacaaaaacttccaaaaggcaacagtgaaatccacttatttgtcagttacactaagctatcatccctgcaatcgatgtcctacctggaatcctacctgatccccataaagcaaatgagcttcagaactttacttcttccttcaaagctctccactgatctaaagaagggctccagcacagcatccttcaaacttaatatcatgtagagctgtgatgtgtaatcaactaatctcccctagtgaactgcagattatagcagggcagaaaaatttgcttgctgaacatatagtttcttgaaaaaggctacctccacagaaagccttgtagttgatcacctaaataaacacttggaggagaaacaggtgagtgcctggataagttggtggactgttacattggattgtctatgtttatggttagccatgagggcaatctgcctctgatacacatcatcctatgtgctactgcttagcacttgggatgtatgttcttgctggactcatcacagaacctcttttcttcaccataggatgcttccaggtcggcctgctctaccagcagctttctgttcttattcagcaacatccttactttttccttcaattgattgcattctttcaggaggtaggtgtgtgtgaagctgaaccacaaacaaacaaacaaacaaacaaacaaacaaacaaacaaacaaaggtgattcccagcaagcttccatttacctgccactcctccaagtactatgatccctgcaagggccctgatcaccagacagccccagactagagaccacagtatacccatcagtccaaaatagaggcaggtcaaatccagggaccagccacatgccacaagaatcaaaggacttctgaaaaccctgacactaagaatgtcccacgtacatcagagaggaggaaa

SEQ ID NO: 4243 - DNA, 1000 bp, mus musculus
acacctcagaatttgcctatacaaggccctgtgtcagatgcccaaaaccactgaagaaaagagatgcattattacacactgattcactgtaacagatgatgcaacgctggtgggaaaggcagaatttatgcatgtttgggagcaggggaggaatggcagctctgtgcttccctcatctttttgctaggaaactaaaagtgctcttcaaaagaagaaatgtcattttaaaacaaaaataccagccttccggtttcagtctggcccagagctgatcctctgccacagggctccctacccaaataggaccaggagagagctagcctcccaggagtgcagacaagcctgagagcacaagtaagaccaccacttctgctctgaggcacccacccagcaccctcaggacacaggaactgaggagcggtctgggacaggagccttcttccatcagttcccagagccgatcctgtgccacagtgctacatatacaaataccaaaagagagctggtctgccaggagtggtgacacacctgcaagcacagctaagaccatcacttctcttcaaattcttggcccaagagggacccacccggagccatcaggacacaggaatcaaggaacagctggggaccagatcattccagtttctgtctgcactacgaagcagaccctataccacagctcttcatacccaaattcctccaggagagaaatggtctcccaggagtactgacacgcaggcttgcaggagggacaaaagcacagtcagaaacagaaagaccagctaacaccagagataaccagacagcaagaagctagggcaagaacatgagcaacagaaaccaaggctacctggcagcatcagaacccagttctcccaacagagcaaaccctggatatgtcaacacaccagaaaagcaagactctgatttaaaatcacatctcaagatgataatagaggactttaaaaaggacatacataactcccttgaataaagagaa

SEQ ID NO: 4244 - DNA, 1800 bp, mus musculus
tcttctataattttgttgaatatatttgctggccctttaagttgaaaatcttcattctcatcaacgcttattatccgtaggtttggtcttctcattgtgtcctggatttcctggatgttttgagttaggatctttttgagttttgtattatctttgattgttgtgccgatgttctctatggaatcttctgcacctgagattctctcttccatctcttgtcttctgttgctgatgctcgcgtctatggttctagatttctttcctagggtttctatctccagcattgcctcactttgggttttctttattgtgtctacttccctttttaggtctagtatggttttgttcatttccatcacctgtttgtgttttcttgtttttctataaggacttctacctgtttggttgtgttttcctgtttttctttaaggacttgtaactctttagcagtgttctcttttatttctttaagtgagttattaaagttcttcttgatgtcctctaccatcatcatgagatatgcttttaaatccgggtccagcttttcggttgtgttggggtgcccaggactaggtggcgtgggagtgctgtgttctgatgatggtgagtggtcttgatttctgttagtaggattcttacgtttgactttcgccatctggtattctctggagctgtgcaggatacactcggtggggtcctggaaccaagatgtctgtgcagggtacactctgcagggtcccggaactaagatgtctgctgccaatgctcaggcaaagcgctcccgcgctgggcaggtccctatcctctggccaggaaaatggtcacctgcctgtacaggatacacttggcgggatcccggaaccaagatgtctgctgctgatgctcaggcaaaatgctcccacgccgggtagatccctatcctctgaccaggaaaatggccagctgtctgtgcaggatacactcggcggggtcctggaaccaagatgtctgtgcagggtacactctgcagggtcccggactaagatgtctgctgccaatgctcaggcaaagcgctcccgcgccgggcagatcccaatcctcagaattcttaagattatgtggctggtgttgtgggtatctggcggtagtcagccgactgtgcgccctagctaccccggtgctgctcggactgaaaggggcttgtgcccctactcagaccgggtttttgcttccctgactaatgcagtctcaagtcccgcgcgattggattggagcagatgctgtgttccactcaccagaagtcttaagattccttggtgggtgttgtgggtagctggaggtagtcagccgactctgcgccctagctaccccggtccccagttaacatctatcttagcttctttttcctctattatgataaaatactccaaaaaaaaaaaaaacccacaggaaagaaaaggttgattctggctcacagttcagcagcacaatccatcataacagggaagtcagggtaacagagcttggcacagctgctcacatgtatccatagtcaagggtcagagaatgatgggtgcatgctgctgtgtaccattctttctcagcttagatagcctaggagagagaatggtaacaccatctacagtggatgggactttccttctcaattgacactattaggagaatactgcagtgacacacccagaggcccatcttttgggcacttctagaatctgactccttggcaattaagactgatcatcacaacatttttgttgacccatccagcaggtccagttatttgagggtctcgaggggacc

SEQ ID NO: 4245 - DNA, 1400 bp, mus musculus
ctgtaactggcaagaagcaaaaccagctctcccattctcatgaccttgggaccaactctcccctctgtcacagttggtgagggaatcaagtggtggagccagccctcccgtgctcatgccctctggccggctcaccctgcaaccaggatcagctctactttgtttcctgagtgagggacgggccagctctccttctcttccaaggagtgaggccagctctgcacaaccctcaaatatcaaatggctccaggcagcagctcagaacaggggcatctgcctgacattttttggatcacagaaccctgctgctgcagggttatggaccacatatgaaccttgggggcagcactgggcaggacctcaccatggctttaggtggtatcccgggctacccacatcaggctgttcctcactaccctcaagtctccagttccccctctcctcactgtgcccacatccttctgtttctcctcctctcccatctctcctgtactcacttgctcttcttagcgccacctggggcctctgggtgtagagttgtctcaggagtgcagtaccggagaccagtgggacccaggcacccagcaactccacccgacccgtggcatggatttcttccagtctaagctggagccctgagcagaccttgggagtgaactccacagccagtcccaaaacacccagaggaagctccacttccaggcactctaacacttccaggatcataggatcagaggtgccccaagcagaccttgggcactaaccctgcagccagtcgcacaacacccagaagaagcaccactcccaggtgctctaacacacccaagaccacaggatcccaggatcccaggagcttggtcacaccaggatctcagggtcccagaggcagcttgattcccaggagttctgacacaggatcacaggaaggacaggctccagtcagatatagcgagggcaggtagcactagagataaccagatggtgggaggcaagtataagaacataagcaacagaaaacaaggtttcttggcatcatcagaacccagtactcctaccacagcaagtcctggataccccccaacacactggaaaagcaagattcggatttaaaattatatctcctgatgctggtagaggattttaagaaggacataaataactcccttaaagaaatacaggagaacacagttaaacaggtagaagtccttaaagaggaaacacaaaaatcccttaaagaatggcaatctcacctgagtcccagggtctcagggagactggaggactccactccctggaggcaagctctcccctggcagtgaaggtgcacagagggctgtggaacagctccagctattttgaaaattttaaaatgtacttactgataaaataatttctctcct

SEQ ID NO: 4246 - DNA, 1000 bp, mus musculus
atgaatttatggttgttgagtaatcccctgacctctgcccacaagatgccaatagcacctctgtccagctgagatcattaagaaggagtccaggcattgccacaagtccactacctctgaggatgacaggacataaaatggtcactactacctgatgctgagaactgttggctggtaggagtgacaatcctccatctggttagtaaggtaaggacaggcagcagactgttctggtcacctctatcgactgagcatttagcttggtgtgtggtgcatgatggaggctacataatactcatgtagtgttgattgaaaacataacacaagcaatgaccacaccacagaggccaatagagaaggatggctaatacacctcagggattcaaaggacagggatggggaccaataagcagaacccttggagaaggcatcatgggtaaaaaagttgagaaatcaccataagggcaaaccaggaataagccgagagattctcagcttgcctggactgtggggctgttgacggtcattctgaagggagagaagcagggactcagctccaggttgcaggggatgtaggatgtcggattggagtcaaagcaagttcataaacgagggaaatcacagcagtaatcaagcaaggttggggcccatgtccctctatcaagaatataaacctggtagtgatatgtggggtggggagaggacagagaggaagaacccagttagcatatttttctagcagttgaaaagaaggcatgaagtaggctaataataggcacagagttccaagggagatggagttaaacagggaagggtttagagcaccatgctgtgcactggctttcagttgtaccaggtcaaagctccttagggggacattcatggcccttaggtccaaggtctttagggggacatttatggccctttctaactccccttaatcccctttgcccactctctccctgtcacctctaccctcctattcatttctcagtctcag

SEQ ID NO: 4247 - DNA, 1200 bp, mus musculus
tcttatttcaaaagggaaggatgaactaaggtaccaggacaatcagagcaaagcaaaatcaaaattcaacagtgtaaaaatcttagtgtgcggtttctgggactcacaatcttctggtctccaaagaccttggacagttctacttcttcaactttggcatccacaggacacatagcctgtctcataggctcaagatggctcactccacacctgcctctgtccttccctgacatcccattgtcctggtgcctgcatcttatcaatagcctccaggcctcttttttggtactctacccctgctatatgatagcaagcctcaaattttctctatggcacatcaaatcctgggatttccactgacctttgactgcaccttcaccaatggcctctcagagggccaagtctcagttgggttctatgaccccatttgtagtgtagcttccatgccaccaaaattagtgtcactcttacatattaccaagttcagcttccaggacagtgtcttctggaccacagcttcagagttctaacctcaaggaaatactgtccatgagttttcacctcagtggtgctggtcttttcttaatcaccaccaatttcttggccctagctaatcagcatcaattgtcaaagtaatggtgctgggctcttgttaatcgcgtctgattcttcacaccccagatgaccagaaactaaagattcttaattcaaatatattacacgaatggccctaatagtctttgtttttctctgaaacatcctaagccaaatccattgtctggacctgtcacagcactcctatcttccacgtgcccacaacagctgtttttccatccctaagttctgactactttcagagtcttctcctaaacaaaaccttcagttctttcacaacaatagctcgctcactagcaccaatttctatactagttttcttttcactgctgtgatagagcattctgaccaaaatgaactcgggatggaaaggtttgtgtggcttacttcatcagctcaggagctcaaggcaagaaccaggtggcatgacctgaagacggtgtcatggaggaatactgcttactggcttgctctccatggcatgctcagcttgcttttctgtgcagcccagggccacctgctcagggatgacatcatccacaacgggcttggctcccctacttctatcattaatcaagaaattgc

SEQ ID NO: 4248 - DNA, 1000 bp, mus musculus
tatttatgttcttcttaaattcctctatcatcatcatgagtcatgactttaaaccagagtcttgcttttctggtgtgttggggtatccacggctcactgttgtgagagaactgggttctgatgataccaagtagcctcaggttctgttgcttatgctcttgcccttgccttttgccatctggttatctttggtgttagctggtcttgctgtctctgactggcctgtcactcctgcaagctctccaggaggaatttgggtctggagagctgtggcacagggtcacctccagggcacagacagataccaaaaggattctgaccctggttgttccttggttcctgtgtcctggtggctctgagagagtccctcttgggccagaaatttgagcagaagtggtggtcttacttgttgtttacaggtgtgtcagcactcctaggagaccagttctctcccggaggtatttgggtatggagcacagtggcaaaggataaactcaaggcagacagaaaccataaggatcctgacccaggctgccttcatgaaattattgacatatctagacaaatgttatctcaatggcatcccaaaagaattggtattcatacagccgatagcactatagtctactagacaattcacatgtcaagagatgatgtttccatctcagaactaagtggacattgccttactttttccatatcaagcttaaactttttaaacatgtgtttatttattgtgtgtacaggtcagcatgcaagccatgaatagaggggtcagagggcaactcacaggagtcagttctctccaaccatcatgcaggtatctcccagttcatcacataggggccaagtcatctttctagatcctgtatgcttttaaagagccagaactcccactgacgagaaggaagtacacaatcttgttgtcctggggattctttaccacactataaatgcagaagattggctcactgctgtcagggactactgcctacatcct

SEQ ID NO: 4249 - DNA, 1400 bp, mus musculus
agtcacagtctcagcattttcgctctgagttttatgttttacttcaggatttctcactgagtagttgttgcccaaaggatcactcaggtcctaaagccctctaggacccacaaaggaactagggaatatatgggtaagatgaaactataaactctagttcaatctgtctgaatgagagctatacaggaaagacatgaacacacccactcaatattgacctctccggttcccttccttagagactatcgtccaaaaaaagaaaaaaaaaaaaaaaagactaacagaacaaaatacaaaaacacatacaggttcccaggagaaaggtagaatgttaatgaatgtatttgttgtggataaaagaatggtaaatcagttccttttctcatgggtaacaaaatagcttaaagaagcaaattaagaaggatgatttattttgggtcacagtttgagaggggacagtctgccacagtctgccacagtctgccacagtctgccacagtctgccacagtctgccacagtctgccacagtgggcaatgcataggggagctcataggagtaggagaatgagggttctcacctttcaacagaccaggaaacagggatcagacagaaagtagtgctgggagatgtgtgtgcgtgtgcatgagtgtgtgtgtgtgtgtgtgtgtgtgtgtgtgtgtgtgtgtgtgtgtgtgagtacatattgtgtacagagagctgaggtacagccccaggtcctgggtgcagatggagacagaaaggatcctgccccaactgttccacactcctgaggcctgtgtgcttctggctggttctgccttagacagtcaccagagagatcttgtctcccaggagtgctgacacaggcttacaggccaacaggagggacaagctcaagcaagagacagcaagaccaaataacaccaaagataaccagatggcaaaagcaagtgcaagaatcttacctatagaaaccaaggctacatggcatcatcagaacccagttctctcacagcaaaaagtcctagataccccaacaccagaaaagcaagatttggatttaaaaatcacatcccatgatgctaatagaggactttaagaaggacataaataactcccttaaagaaatacgggagaccacaggtaaaaagctagaagctcttaaagagaaaaaacaaaaatcccttaaagaattacaggaaaacccaatcaaactggtgaaagaattgaacagaagcatccaggatctaaaaatggaagttgaaatgaagaaatcacaaagggagacaactctggaaatagaaaacctaggaaagaggtcaggagtcaaagatgcgagcaccaccaacagaatacaagagatagaagagagaatctcagatgcagaagataccacag

SEQ ID NO: 4250 - DNA, 1400 bp, mus musculus
gttttgttcatttccatcacctgtttagatgtgttttcctgtttttctttaagaacttctacctgtttggttgttttcatgtttttctttaaggacttgtaactctttagcagtgttctcctgtatttctttaagtgagttattaaagtccttcttgatgtcctctaccatcatcatgagttatgcttttaaatccgggtctagctttttgggtgtgttgaggtgcccaggactgggtgaggtgggagtgctgcattttgatgatggtgagtggtcttggtttctgttagtaagagtcttaagtttgtctttcgccatctggtaatctctggagttagttgttatagttgtttctggttagagcttgttcctctcatgattctgttagcctctatcagcagacctgggatacgagctctctcctgagtttcagtggtcagagcactctctgcaggcaagctctcctcttgcagggaaggtgcacagatatctggcgttaggacctgcctcctggcaaaagaggaaggcctgaaatagggcctgtcccagaagcttttagcttctgtagtccacactctcccctgagcagactagtcttggagggatctgggaaccaagatgagttcccctggtgtacaggcaaagccctcctgggtggggtggacacctctcctctggcagggaaggtgcccagatgtctggagcctgaaatggggtcttcctcagaagctgtcccctagggaccttgggggtgtctgctgactctgcgcccaaggtgacctggtgttggtgcctaccagaaagaatttgtgaccctggtcaggccgtgttttctgcttccctaatgctgtttcaggccctatgcgattggattgaaacagaagttgtgttacactcaccagaggtcctaagattgcatggagagtcctctaaggaccttgggttgtccgctgactttgtgcccaggtgacctggttctggcgccgactggaaggaacttgtcatataatattttttaaaaggaacaaaatcagaaatgaaaaggaggactgtgactttggtatattttttaaaaagagaaaagtaggatatgagtctcaggtaggctgtgccaaggttaggaaacttgaatccttttgagtgggctctggctctccaaattcatattaatatattcatatactttgtaaacaacatatatatatatatatatatatatatatacatatatatatatataacaatctgtcattgcatgaagcagctcagcagtggggaatggagggattctgactgcttaagttgtgatgctaacattcattaaaagcagtggctgtgactatatatatatacatatatatatgtatatataatatgtgtatatatatgtatatatatgc

SEQ ID NO: 4251 - DNA, 2200 bp, mus musculus
ttttctaatttgtattcctttgatctccttttgttgtagtattgctctagctagaacttcaagtattataatgaataggtagggagagagttgctagccttgttttgtgcccaattttaatgggattgctttaagtttctctccattatgataaaagcattatggagatgagggctgaacagatgagcgaaaaagtagctagtagaacagagatcagagagaataggaaaggcttctccttaaaatgggacagttttttccctaactgcaaagcaggcttcttcttactgataagacaacctttttttttttaacagacttgagtttctttaattgatcaatagaaaggtagaatctttttctttttctatgcaataaaggttgaagcttatttttcatatagaatgatagagttcctcggtgctgatgcttgggcttttgcttcggacacacataaaagtgtgtgtgtgtgtgtgtgtgtgtgtgtgtgtgtgtgtgcaagcatgtaagttattgagaaaaatggtgggacccagcaagagtctatgaaagaatacatgaatgtatatgtgttcatcatatttgctttgtaaaagtttttctttttgtgactgtgactctcttctcctgttcaataaaagttaattgctttcagcctccctcctgcctagacagcaagagaagcaaggcttctgggcaagagagaaaggaagacaaagcaatcaattgcagttcagcttctggtttcagagtaatttagtatcaagacaggtaaagattaggtaaaggttattatagaaaagcaaccttacccctttgcaagaccaagtcttgtccacactaacttccttctcctttgctgccttccagagatcttgatcttatatcctgttaattctttgtcctgattactcatatattaccaaagtgtaaacaattgtatttctaagaattgtaccaatgactattgtaacccctgctcactagagaaatatgtgggttcctgaaaatcatgctatattagctaaagtatatgttgttcttagagccaagatactccagtccaaaattatctggaactaaagtgaatgaaagagtattcactagtggatcgcgaagaatgatgggctgtagcctcccccagccttgaagcaggctgattcagactttgctgccactgaatatgagatcacctggggtgtatccttctgacttagatggctatattgttatgtcaactatctctgctcttctctgagactctgctacttgctgagagacccttgagacattctggatacacatcctatcctgcaggtcacctacaggttggctccaggcactaagaatggactcggggtggggggaatgggccttaaccctaataagcatagtctcttagtaaattcgcaggccttaatcagagaaaaatttatcttggcatcattcttctctcaaagtctaagtctctttcagccccagcctgccttccagtagtacctgaggccaggttggcctacaacaacaatgggcagagaagcctagcttaattcttctcttagtttttggaattttgtgttctagtcagtaataatatagtatcccattttaattttaattcactatcatttcttgagtttctcatctgtaaaagagtatagttgaaatgctggcttttctttctctttattaaagcatgtggttctttaacagcaccatccatactataaaaattaatgttattcctactgccattatcattgtaaaacatgagctgtaacaaagcaagtctttgtagaatgcaatttctgtaagtaaacctcactaagtcaattagttatccaaataattgatgtgtgatcaaaaatagaaaggtcatgatgagaggaaagttcagacattgccatctgtggaagaatcaatctaatgcaaaaggtcatacctgtaaatggcaagtgttcagatacctatctcatctgatcatagatcaagaaatggcatcagcagtaacacgagccgaaaaactttacttaaggtgaacctaatgcacttaacacatttacagtctcaattatgcatcctgttgtttctcatgaacgttttgtttgtgtgcacatggggaacaaagaaaaccagccaactgaaagctaactgttttcttcttttggttgtctactctgaggaggacaactgatgggat

SEQ ID NO: 4252 - DNA, 1000 bp, mus musculus
cctcccccttgcctctgagacacacacccaggactaaccctcccctgggacctcaagtctctcaagaattagtcacgcccttctggccagcgccagcaccaggtcacctagggctcagagtcagtgaacacccacatggttcctagaggactttcccctcgatcttaggatcattggtgagtgaaacacaacatctgttcaaatccaatcacgcgggacctaagacagcagtagagaagaggaagaacagcttgaccaggggcataagtcccttctggttggcgccagcaccaggtcaccttgggcacggaataggcaaatacccccacagtccccagaggactctccacacagtcttaggatcactggtgagtggaacacaacatctgttacaatccaattctgatgggcctatttcagcagaaacaaggacaccagagcccttactaaccagaggcttgggttccttctgatcagttctggtttaccttggttttgaacagaccagacagctcgacggtcttcaaaggagacaccacttccaggctctttaacacccccaggatcttaagacaacaggatcccaggaaaacagaggctgagtcacactgactgccaaaaactctgacacacacataatctcaagttcagaggagcccacaatcaaaggatcacagagaaagctagactctgaggagtcctaaataaactgggaatataggaaggacaggctccaatcagatatattgagggtaacaagcacttgagataatcagatggcaagaggcaagcataagaagagaagcaacagaaaccaactttacttggcatcatcagaaccaaactctcccaccatagcaagtcctggatacaccatcacaccagaaaagcaagacatggatctaaagtcactcctcatgatgatgatggaggactttaagagggaaatacaggaaaacacaggtagagggctaggagcctttaaagaggaaactcaaaa

SEQ ID NO: 4253 - DNA, 1000 bp, mus musculus
atgtttataattaatatttacctattatatttgtacattctgttaattagttatttaactcctgatttaacctttttaaccacgtgtattgatttagtatgtgtatgtgcgtgagtacacatgagtgagtatagaggtcaggggacaacttgcagaggttggttctttccttctctcaagtctcaggttgttagatttggcagcaagcagctgaatccaccaaaaagcaaaagaaacaatccaagttttatgttgttgttttgagacagggtccagtgcatccccggtgggccttgagctgtttaagaccaaaggtgaacttgaagtccttatcctcccacttcagtagctgagattacagagacccttcacctcagcagccaccctgcactctaggctcactcgggaccttgcatcaactctaaccagcctgtgtgagttcagagaactctgacctgcaactctcggcccctgtacactcctagcatgcataccctggagatcttggtctctgtagtagccatgaaacatcatacctcatgcccgtattccatatgcacttgagcttctgagaacagaggtttatgaaacactaccacgttacccacacaccaggcattctggcttctgaggtcagaggtgaacccctgccatactgtagaccactctgtgaggtcaaaggccaaactattcctacagttggagaatatctcaactaacacacctatagatcatcactgagtagctctatgactgagcttcagagagcatttatttagccaagccaagaggaaagaatagccaatgagatggatcagggacatatggtagaaagaactggcttccaaaagttgttctctgacttcctcacaagtgccacaggatggacaccacacacacacacacacacacacacacacacacacacatgaggattaaaaaatgtaattaattttttctttaaaaaaaaaaaaaggaaaataaaggcatagccagcaga

SEQ ID NO: 4254 - DNA, 1000 bp, mus musculus
aactctgggggtactggctagttcatattgttgttcctcctatgggactgcaaaccccttcagctctttgggtactttctctagctccttcattggggactctgtgctctgttcaatggatgtccataagcatccacttctgtatttgtcaggcactgacagagcctctcaggagacagctatatcaatctcctgtcagcaagctcttgttggcatctgcaatagtctctgggtttggtggttgtttatgggatggatccccaggtggggcagtctctggatggtcattccttcagtctctgctctgaactttgtctctgtaactccttccatgggcattttgttcccccttctaaggattgaagaatccacactttggtcttccttctttagtttcatgtgttttgcaaattgtatcttgggtattctgagcttctgggctaatatccacttatcagtgtgtgcatatcatgtgtgttcttttgtgattgggttacctcactcaggatgataacttacctgttcttttgagaggaatcatcagaggttttacagatgtcaagcagagttacataagttcaaagtacaacatcttccctagcagaagttgctgatcaatgatgggtaagattgtcttgaaaatcttctcaatgtaagagaggctacagatacaagattattcacatgccaatgatggctaagagttgtactttccaatggcaacctacgacaggcacaactttctgctctgtgattgataaagtgcctcctctagataaaaaagatgggtaagattctctcagagggaagtcccttccggccggcccactgcagcaccgtggtccctggcccgggggagtaggcgaacacccgcaaggacccacacaggatctgccacgggatcctaagacctctggtgagtggaacacaactactgccaggaggcaggttcaaacaccagatatctgggcagcatccctgcaagaggggagcttgcatg

SEQ ID NO: 4255 - DNA, 1600 bp, mus musculus
agaaacacactctcaactagatctcccaggacctctgtaacctgatcccccaaccctcagaaatcagtgtgggggcatctctaggaggtgccagagacatgagactgaggatggggggtgttccagggagtctatgcggtgactctagctgagattcctagtagtgggtgatatggagcctgatgtggctacctcctgtagccatgcaggactcccagtgaagggataaggacaccaacccacccataaaaccttcaacccaaaatgtattcttcctacaagaagtgcagggacaaagatggagcagagcctgagggaacagccaacaagtggctcaacttgagacccatcccatggacaagaaccaatccctgacactattaataatactctgttgtgcttgcagacaggagcctaacataactgtcttctaagagactccacatagtagctgaccaaaacaggtgcagagacccacagtcaaacattaaacagagctctgaaagtcttatgtaagagttggggggcggggggaattgaggaacccagagggatagagactccacaagaagaccaacagaataaattaacctgtacccttgggggctgtcagaaactgaaccgccaacaagagaacataagtgaactagatctaggtcccctgcacatacatagcaaaattatggcttgatcttcatgcaagtcctctgagaactggagctgtggctttttttgcctgtctgtggatcctgttctcttaactgggctgccttgtctggccacagtgggagaggatgtgcctagtcctgcagtgacttggggtgcctcgataggttggtacacagggagggggatctgcccttctcaggggagaagggttgggggaggggaggggtggtgtgaagagaggactggaaggcgagcgagctgtgattagaatgtaaagtgaataaatacattaattaatgaacaaaacccgaacagaagcacaatttctctgagggttctaataccaagtggtttatcctatatattactctggtaatcttttaggtttttaattttattttaattttcttttcttttatttttttatgaaatgagaagaacatgatatttgtcctgacttacatattactctgttactctctcagtgtgagatgagaaggcaggggtagtgtaaacaatcgtaagacacagaacctacatcagcctaggaatgttcacatataactttccagtgcactcacctgctgcaggagatagggtttcccattcttgcctctgcatgtctggccaggctgagaacttcaggtccctggagttctatggcagagcttcctgtgtttctccgtctgctcatctgtatgcagttgatgtatccacatgttcttctgtgcagcatcatcatccgacactgtcattacagtacagtgcctcatatccaaacatagcacactctgttccactgtgtctcacggtggctagacaaggaatcgttagagattaaatatttggttgttagtgggtcaaggtacaggctaatatagatttttataccatatttatttgcaaaaggtgtgtctctaatgtactttag

SEQ ID NO: 4256 - DNA, 1600 bp, mus musculus
gtaacctgatcccccaaccctcagaaatcagtgtgggggcatctctaggaggtgccagagacatgagactgaggatggggggtgttccagggagtctatgcggtgactctagctgagattcctagtagtgggtgatatggagcctgatgtggctacctcctgtagccatgcaggactcccagtgaagggataaggacaccaacccacccataaaaccttcaacccaaaatgtattcttcctacaagaagtgcagggacaaagatggagcagagcctgagggaacagccaacaagtggctcaacttgagacccatcccatggacaagaaccaatccctgacactattaataatactctgttgtgcttgcagacaggagcctaacataactgtcttctaagagactccacatagtagctgaccaaaacaggtgcagagacccacagtcaaacattaaacagagctctgaaagtcttatgtaagagttggggggcggggggaattgaggaacccagagggatagagactccacaagaagaccaacagaataaattaacctgtacccttgggggctgtcagaaactgaaccgccaacaagagaacataagtgaactagatctaggtcccctgcacatacatagcaaaattatggcttgatcttcatgcaagtcctctgagaactggagctgtggctttttttgcctgtctgtggatcctgttctcttaactgggctgccttgtctggccacagtgggagaggatgtgcctagtcctgcagtgacttggggtgcctcgataggttggtacacagggagggggatctgcccttctcaggggagaagggttgggggaggggaggggtggtgtgaagagaggactggaaggcgagcgagctgtgattagaatgtaaagtgaataaatacattaattaatgaacaaaacccgaacagaagcacaatttctctgagggttctaataccaagtggtttatcctatatattactctggtaatcttttaggtttttaattttattttaattttcttttcttttatttttttatgaaatgagaagaacatgatatttgtcctgacttacatattactctgttactctctcagtgtgagatgagaaggcaggggtagtgtaaacaatcgtaagacacagaacctacatcagcctaggaatgttcacatataactttccagtgcactcacctgctgcaggagatagggtttcccattcttgcctctgcatgtctggccaggctgagaacttcaggtccctggagttctatggcagagcttcctgtgtttctccgtctgctcatctgtatgcagttgatgtatccacatgttcttctgtgcagcatcatcatccgacactgtcattacagtacagtgcctcatatccaaacatagcacactctgttccactgtgtctcacggtggctagacaaggaatcgttagagattaaatatttggttgttagtgggtcaaggtacaggctaatatagatttttataccatatttatttgcaaaaggtgtgtctctaatgtactttagtcaaatcaccaagctaagaaacttcatttaaaaatg

SEQ ID NO: 4257 - DNA, 1000 bp, mus musculus
tacctatcctgccacttttgtccccaggttcccccagtttcttcatgaaagaggacgtctagcagtgtgagcatttgtgcacacacatgaatgaacaggctttgtgctagaccacaaagcagacactaacaattcagttgctcctttctttgcctgcacccaatattagtctaaaatagctctcaatagaattattgttcctctctaaaactatatgatgtaggcctccactagattggtgttctcggcatacttatttctatgattccactaaaatggacataagctttgcttccagaattcaatgcccttttagtccaatatactaaatgcttctacaaaataggcaaaggtgtaaaagacatttgatcaggtttatcattaaaatggcccttcttccttggcaccagtttgtagttagtttcttttttattgtgacacaataccatgaccagaagcaacttcaatagaaagatttcttttaactcacaattccaggtcatataccatcccatctgggagccaaggcagctagaatatttttttttgaatttttttttaattaggtattttcctcatttacattttcaatgctgtcccaaaggtcccccatacccacccccccaatcccctacccacccactccccctttttggccctggcattcccctgtactggggcatataaagtttgcaagtccaatgggcctctctttgcagtgatggccgactaggccatcttttgatacatatgcagctaaagacaagagctcccgggtactggttagttcatattgttgttccacctatagggttgcagttccctatagctcctggggtaatttctctagctcctccattaggggccgtgtgacccatccaatagctgactgtgatcatccacttctgtgtttgctaggccccggcatagtctcacaagagagagctataactgggtcctttcagcgaaatcttgctagtgtatgcaatggtgtcagcat

SEQ ID NO: 4258 - DNA, 1200 bp, mus musculus
gcaacgctggcagctgtggggttgctgcttgaagcggcctcctatcattgcatcagacacagatctgagctcatccatttgctcttaactatgggatgtgtgagtggaattgccattctcctggctttgggtaagtgttctgagcctaaggaaggatagattttgttcctaaagacaacgaagatgcatctgccgccaccacttctccttctgtgattttccaaactgctggagagaattgatgtcggtgtgattgtttcatgagtctgcgcattacaagcataagccgctcgtatcagactcacgaataggagctctgagttcctggagctcaaggaaagtggaaagtgggcaacttatccttcactgtgtgattctgcatagctaaggagtcaatagcagcaatgtcctcagatctgagcaaagcacctctcaagagcagagctcaggaggggagctccgggcttttgtgagtctgacacctgggcactctgatctctgagggtccaaagcttgactgttgtttcttaactccttaggtattgcgggtgatgctaagactacacaaccagattcaatggaaagtactgaaggagaaacggtgcacttgccttgtagccacgccacaatcagtggaaacgagtacatctattggtaccgacaggttcctcttcagggtccagaatatgtgactcacggtctacaacaaaatacaaccaatagtatggctttcctggctattgcctctgacagaaagtcaagcaccttgatcctgcctcatgtcagcctgagagacgcggctgtgtaccactgtatcctgagagtagcacactgtgacagacagggctgcacctgtgcaaaatctgcccgatgggggaggggaagcagaggcatccatttcaagaggcctctgcacctcagtgagcaatgagctcagcaggaatctgagaaaacagtgaagcaccaagaagggatggagaaagagattctgcgactgggcaaaaacagctaatagtagtggaaggatggacatatctgcacggtgacagataccacaatttctagacctgcagtaagaagagatgagaacttcagactttttcctttaatagcaacaacaaaaagcttctttctgtataaacttaagtaaaaattatgagaaaatccttatggagccagggaagtgtccaagcacaagga

SEQ ID NO: 4259 - DNA, 1600 bp, mus musculus
cctggactgggcgaagtaggagtgctgggttctgatgatggtgagtggtcttggttcctgttagtaggattcctacgtttacctttcgccatctggtaatctctggagttagtagttatagttgactctgtttagagattgttctactggtgattctgttaccgtctctcagcagacctgggagacagattctctcctctgagtttcagtgctcagagcactctctgctggcaagctctcttacagggaaggtgcgcagatatcttgtttttggacctcctcctggtcgaagaagaaggcccaaaacagggcctctctcagaagctgtgttgctttggcagatcccagaagctgtcagcttctgtggtgcagactctcacctgtgcggactaaaatcctaagttccagggagtcctggaaccaaaatggtgaccactgctcctgaggctgaggccctctcccgagccaggcggacacctgtcctctggtccggatgttggccggttgtctgcggcccgcccaggctgctgcctcagcggctctgtgcttctgcccgtcccagaagctgtccggttctctggcgcaccctctaacctgttcagactaatttcctaggtcccgcggagtcccggaaccaagatggcgaccgctgctgctgaggctaaggccgcctcccaagccaggcggacacctgtcctctggtctggatggtggccagatgtctgcggcccgcccaggctgctgcctcagtggctctgtgcttctgcccgttccagaagctgtccggttctctggcgcaccctctaacctgttcagactaatttcctaggtcccgcggagtcccggaaccaagatggcgaccgctgctgctgaggctaaggccgcctcccaagccaggcggacacctgtcctctggtccggacggtggccggatgtctgcggcccgcccaggctgctgcctcagcggctctgtgcttcctcccgttccagaagctgtccggttctctggcgcaccctctaacctgttcaacactaatttcctaggtcccgcggagtcccggaaccaagatggcgaccgctgctgctgaggctgaggccgcttcccaagccaggcggacacctgtcctctggtccggacggtggccggatgtctgcggcccgcccaggctgctgcctcagcggctctgtgcttctgctcgtcccagaagctgtccggttctctggcgcaccctctaacctgttcaacactaatttcctaggtcccgcggagtcccggaaccaagatggcgaccgaggttaaacttttatctatgagccctgatacaactaaatgcaagtcacatatttctgatggacagtaggtgaaattatgccccagtatagaggactgccagggccaggaagagggagtgggtaggttggtgagcaggcggaggaggtaagggataggtggtttgtggaggggaaattaggaaaggggataacatttgaaatgtaaagaaagaaaatatctaattaaaagaaattatactacacgaagtaggaaataaaaattcttcataggaaaaaataaaggcattagaatttacatattttattt

SEQ ID NO: 4260 - DNA, 1000 bp, mus musculus
gactctgttaaacctgatggttgctaaggactctgtcctctgaaagtgttggtctgtctgtgctggctaattctttttttgttgttgttttttgttttttgagacagggtttctctgtgtagccctggctgttctggaactcactctatagaccagactggcctcgaactcagagatctgcctcctaagtgctgggattaaaggcatgtgccatcactgcccggtgctggctaattcttatgtcgacttgacacaagctagaatcatcagagaggaaggaacctcaattgagaaaatgactacaagatccggctgaagggagacctgtaaggcattttcttaattagtaattgatgagggagggtccgctccactgtgggtggtaccatccctaggctgctggtggtcttgggttctgtaagaaaacaggctgagcaagccatgtggaacaagccagtgaatagcacccctccatggcctctgcagcagctcctgcctctagatttctggatcaagccagtgaatagcacccctccatggcctctgcagcagctcctgcctctagatttctgcccctgcttgagttcctgcccttatgtcctttgatgatgaactatgatgtggaaatgtaagccaaagaaatccttttctccccaagtgtctttggctaaggtgccttgtcacagcagaagtagccctaagtcactgtaattctagagagtgacaggcttcaatgggatctggcttggtgcctctgctttacatctgaacaacggagccctgtgctgttcctttatagagccttagaatcctcttcaccaggggctggtgtgatggctcagcaggttaagagcactgactgctctttgcaaccacatggtggcttacaaccatctgtaatgagacctgacgtcctctactggtgtgtctaaagacagctacagtgtatttacatataataataaagaaaaatctttaaaaaaaaaaaaggaaaaaaatc

SEQ ID NO: 4261 - DNA, 1000 bp, mus musculus
actggcatcttcaccaccatagagaaggctggggcccacttgcagggtggagccaaaagggtcatcatctccaccccttctgccgatgcccccatatttgtcatgggtgtgaaccacgagaaatatgacaactcactcaagattgtcagcaatgtatcttgcatcaccaactgcttagcccccctggacaagttcatccatgacaactttggcatcatggaagggctcatggccatgattcatgccatcactgccactcagaagactgtagatggcccctctggaaaactatggcatgatggccatggggctgcccagaacatcatccctgcatccactggtgctgccaaggctgtgggcagggtcatgccagagctgaacgggaagctcactggaatggccttctgtgttcctacccccaatgtgtccatggtggatctgacgtgctgcctggagaagcctgccaagtatgaagacatcaagaaggtggtgaaacaggcacctgagggctcactgaagggcatcctgggcaacactgaggaccaggttgtctcctgcgacttcaacagcaactcccactcttccacatttgatgccggggctggcattgctctcaatgacaaatttgtcaagctcatttcctggtatgacagtgaatacatctacagcaactgggtggtggacctcagggtctacctgacctccaaggagtaagaaaccctggaccacccaccccagcaaagacagtgagcgcaagagagaggccctcagttgctgaggagtctctattccccaacactgagcatctccctcacaatttccaccccagacccccataataataggaggggcctagggagccctccctactcttttgaataccatcaataaagttctctgcaccccccaaaaatgaaattccaactgtcacataataatcaaaacaccaaatgcacaaaacaaaaaaagaatattaaaagcagtaagggacaaaggtcaa

SEQ ID NO: 4262 - DNA, 1000 bp, mus musculus
tagccccccacttaactcccacttcttggccctggcgttcccctgtactgaggcatataaagtttgcaagaccgatgggcctctttttccaatgatggccgactaggccatcttctgatacatatgcagctagaaacacaagctctggcacaatctgcaaattcatctggaataacaaaaaacctaggatagtgtttcctttttaaaggcttctacctgtttacctgtgttttcctgtatttccttaagggagttatttaagtcctctatcattatcatcatgagaagtgactttagatccgagtcttgcttttctggtgtgatggtgtattcagaacttgctctggtaggagaattggattctgatgatgccaagtaatctttgtttctgatgcttctgttcttacacttgcctcccgccatctggttatttgtagtgctacctgccctctctatatctgactggagcctgtccttcctgaatcctggttgagtcagaactcctcagagttccgttgtctgtgtgatcctgtgattctaggatcctgtgatactgagattctgggtgtgtcagagttcctgggagtcaagctacctcagagaccctgagatcctggtgtgaccaagctcctgggatcctgggtatgctagagtgcctgggagtggagcctcctccgggggggctgtgggactgtctacccagtttgtgcccaaggtaaaccagggctgactggagggaactcaagccattgatcaaggcagggttcttgtgtccttggatcctgctggtcccagttactcccagtggtgttgggacagatgtcgtgttctactcacccctgatcctaagattctgggtgtgttcgagagcctgggagtagagcctactttgagggttatgggagtggccaccgagttcgtgcccaaggtaaaccagtgcagaccagaaggaaccaccagaaagtcttttcatactcaagtgtttcaggttttttttttc

SEQ ID NO: 4263 - DNA, 1000 bp, mus musculus
tccctaagataatcaataaggtggtgagaccagcattgagactatgtccatcagtcacttacaaaaccacggggcgctgagtgtggtggtgcatgcctttaatcccagcactcgggaggcagaagcaggcggatttctaagtttgaggccagcctggtctacaaagtgagttccaggacagccagggctatacagagaaaccttgtcttggaaacaaacaaacaaacaaacaaacaaacaaaacaacaacaacaacaacaacaacaacaacaacaacaacaacaacaaaaccaggggtagaaggagctggagcagccagacatgccttaaccacactgtgtgcagccagacccccttaaccacactgtgtgcacccagacccgccttaaccatactgtgtacaaccagacccccttaaccacactttgtgcagccagacccccttaaccacactgtgcaagccctccaagctgtgctgtcccagctcagccaagcagattggcttctccattgctctgggctgttggcaagcagaacgtggtgatgggaacacatgataagaaaagctgctcacaattgtgataaaaactgcatggtactggtatagagacagaccagtagaccaatggaatagaattgaagacccagaaatgaacccacacacctatggtcacttgatcttcgacaagggagctaaaaccatccagtggaagaaagacagcattttcaacaattggtgctggcacaactggttgttatcatgtagaagaatgcgcattgatccatacttatctccttgtactaaggtcaaatctaagtggatcaaggaacttcacataaaaccagagacactgaaacttatagaggagaaagtggggaaaagccttgaagatatgggcacaggggaaaaattcctgaataggacagcaatggcttgtgctgtaagatcgagaattgacaaatgggacctaatgaaactccaaagtttctgcaaggcaaa

SEQ ID NO: 4264 - DNA, 1000 bp, mus musculus
ccggagctcttgactctagctgcatatgtatcaaaagatggcctagtcggccatcactggaaagagaggcccattggacacgcaaactttatatgccccagtacaggggaacgccagggccaaaaagggggagtgggtggctaggggattgggggtgggtgggtatgggggacttttggtatagcattggaaatgtaaatgagctaaatacctaataaaaaatgggaaaaaaagaaaaaaaaagaaaagctgctcacctcacaatggccaggatccagacgagaagaggccagcctcccagtattcccacccaaggacacacccagtggtctaacttgtttctaaatggaccccagcccttttaaaacaaatttgttacgtgtgtgtgtgtgtgtgtgtgtgtgtgtgtgtgtgtgtgttacttgagtggaggtcagagaacaacttgtgggagctggttctctccttctactacctgggttctgagaatcatgttcaggtccttgggcttggtgtcaagcccctttctttaccctgagccattaagattccacctcttaaagctcccatgctccttcctaaataactccacaagctggtcaaccaacactctgctctatctcagaagaaaatggggaagttggctgtggctgcatatttaatcagcttatacagagaatgttgcccgggaccctctcaggagcagttcttcctccctggccaatgtaagcagcagcctccaggggtttgatacactgactacgctttatctctgggttactttacagtccttctatacgtgttcacctttcaccatcctgaagccattctaatctcacagagatgttctagaactttctctctgctgtacatttatttatattttcattttatgcacatgagtgttttgcctgtctggatgtatgtgcactgtgtacgtacttggtgcatgtggagtttggaagagggcaataaaaatggctgtgagctgccacgtggg

SEQ ID NO: 4265 - DNA, 1000 bp, mus musculus
aaatctaggactgaattattttaaagtacaaaagaggggccttgaaagtaacacacagtgacacacactccagacgctgatgacaaaatgtgggggcactgggtgtctatgagtggttacagtgttcctggtctctccttactctccagtgatggcgatggttaggcttgctgaactggaatgctgtccttgaatccatccactacacctacagcagactcaaagctacacgggctcagacaccagggaagcagtcactaggtacaccacacggtggctaggattcctagatagtgtgaacctggtaatatagaccatgcacctagaagacggccaaggcaggacattgcatccagtccaactgcatccaggatagtttctcaagctaccctctcatactcagtgttaccaggtagttgaacatttgtagcacaataaatacaattaggtcagaaatttgatacatggggttttgaatgataagctgagcaccgtgggagaactagagagctctgagtgtgcccacagtcttttttcccagcccagaactttgtagctcaccagctgaaacacatcatccattcatcacgaggcacatggtcacactgccactgtattaaaggacatgaaagctgaaagactttcccagcagcacttcatgaagggtggctccctggaactgtgattgatggatggtgaagaaggggatggatctccttggaaagtcgtgagtgtccaggatgtcctgaaggagtcctggggatatacgctatacaaaggaaagtagtcacagaaggacagctttgtaggatgccactcacgcaagctctacacaacagtctacatcacagagacgagaggatggtgggcttcgggagccattgggagggtgatgtaagctgctattcactgggtacagacttctgctttcacaggatgaaaagagctacgggggtggacactggtgatggctgagcaaaatctccactgtgcttcatat

SEQ ID NO: 4266 - DNA, 1000 bp, mus musculus
accacatcactttcagaatccagatagtgagagcgagattcacaacgaggatggcgagcaggagaagaacgaataggtataggcagcgcttcctccatccgtaaatgccaatcttgtagatgtgctggttctcgggcctctctatgtgagtgccctcggtgaccgtggtgtactgttctcgaaccatcttctagagaggggaggagggagggaagagaacttagtggtcagtaccgatatatcatgagtctagaaaacaattttaatccaaaccagaagccaggtatggtgtgtacacctgtaatcccagagctcagagcggggaggggaagagagcagaaggttcgagggaattcttggtttcatagtgagctcaaggtcagctgcataagtctctatctcaaaagaagaacaagagagagaggggggggggaagaagaagaagaagaagaagaagaagaagaagaagaagaagaagaagaagaagaagaagaagaagaacaagaagaagaacaagaagaagaacaagaagaagaacaagaagaacaagaagaacaagaacaagaagaacaagaacaagaagaacaagaagaacaagaagaacaagaacaagaacaagaacaagaacaaaacaagaacaagtacaagaagaacaagaacaagaacaagaagaacaagaggagaggagaggacaagagaaaaagaaggaaaagaccttcctccagagaagcacggtttgaatgaccaggtaacatacaatataaatagttttactaaagagctgattttgttgtttgtactgacaccaaatgcctgtgaaaagggaccctagaagttcagataatgagcaccactgggcagaatgccaggtacccagggctttggggtcacacaaagtggaactcatgttggcaaaagatcatgctgatctgaaaacacagagcgctctgtgatctgtttatagccttatacaacggtaacagagggagtgactattctg

SEQ ID NO: 4267 - DNA, 1000 bp, mus musculus
tatactcttccataccctttccattctctctctcctctctctgtctcaggtgggtgaagtaaagggacttcttcttttgcaggaagatttctgtagacaattcctcatccccttcccaatgcctgtattctgtgctattcaatcaatacagagcaaagccctttgttagggacagactcaaggacatggacagatccagacattcagacacatgtagaccagacaggcagcagggacaaatcagacacacacaacaggcagactacagataagccagaccacggtgtacagatggaagacagagagagactaatagagagctcaagattgggctcactcttggtccaactaacctaaaggaagtgtctctgctttcatcccataaagctgaggttatcttgaatgcactaacagacatagttaaggcctagagacagagggaggattgcagctaccagggaagtattcttaaatacacagccctcactggcaaccccttatggaccactatttttatttactctactaaaaattccttggacattcaacaaaatatttcatttcagtctatatgttttagatgtaaaaataggattcattttaaaaagttttggattccaaaccaagttaattcaaactgagggagtttaatggtcagccctgagagatgtctgtacataaacgggatcgggacagcaggtctccaagatgccaaggaccacacttcccttctcttctggataagcagagtgccctcacctgatatgggataactaaccacggctagagtgctattcaagactagccaaagggtcagagatcagctggactattcccagggtaaggacaagccacatggttctggaaaccattcatgctgactagccatgaggctaatctatatatagactcataggcaaatggtgactcaaatactatttgtgatgtttaaataccatcacaagggaagaaaactgcattgaaatataagacaatttaa

SEQ ID NO: 4268 - DNA, 1000 bp, mus musculus
accctgatacccaaaccatataaaggcccaacaaagaataagaattatagaccaatttcccttagacatagatgcaaaattttaaataaaacacttgcaaacagaatccaagactatatcaaaaagaccatccgcaaaaccagactcaggttctttgcctcaagccctggtcaagctttcctgaaaaattttcactccctgtctgtcctggcattcattcccattggaggagaaactgtggtactggtagggaaaccaaggcccagaggtgggaaagagtagtgagtgatccccactatgactccacagagcccaggcagagctatgccctcctgttcaagggttccaggctgggggacatggcctaccatttcactttcaatgataacagctgcctgcagctagcagcttgtgtttttggctattttctctgagctggccctgtgcctaggctgcccccacaccgaatatgactgagggtctttcccaagccagcaccattcaaatttgctctacctggccttactgcctcggtgctcaggtaagcaaatggccttcatgatgagaagctattacaggtgcctcaagatgcccctgtcctgcaggagacctgtcccctcaatgctgtggatggcctaggtaacttccaacccagatccaactctccttcatagctgctggagtcatcctgcccatggaggctttgggtcatgtgagcctgcagctcagctcctgtcctttcagtcttgcaattctttgtggaatatgaacggcccgtggactttgccacgtgctccattggcatgtatctcttcacagagaagagatggtgttctgggcccagcccaggagaccaacattgctgtgttatggtacctgcttactctggccttcattttgggactcagcaggctggcaaatgggactcaggcccaaccttccctgtccctttaagttgctgtctgtggggtcacccactgactcataaatctgccctaga

SEQ ID NO: 4269 - DNA, 1400 bp, mus musculus
ctgaagacccagaaataccactcttgggaatatacccaaatgatgccccaccatgccacaggggcacatgttccactatgttcatagtggccttgtttgtgatagccggaagctagaaacaacccagatgtcccacgacagaagaatggatacagaaaatgaggttcatttacacaacggagtactaatcagttattaagaatgaggacatcctgacttttgcaggccaatggatgaaactaggaaaatatcctgagtgaggtaacacagatccaaaaggacattaatggtatgtactctctaataagtgatattaggagagagagagagagagagagagagagagagagagagagaacacataactcaaaaaggtcaacaggctgaaggacccaagtgaggatgcctcagtcctacttgggagggagaagaaagcaaccacaaggggggagggagagagctgggaggggagggggatgagagggcggagtggagaacatgattgggtattgggtggggggaaaggactaaaatccctgagggccagcagaaagaagggaaacatgaaaccttgggaggtaggaggtttggggggaccctccagaatgtaccagggacccaggaggtgaaagactctcagaactcaaagggaggggccttagatgaaataccctccattggggagagggaacttgtaaagcccatgtccagcagaaagacagcgcatcaagtaagggatggggttgccttctcacagtcaaaactctaacccataattgttcctgtctgaaagaactgcagggatggaaatggagaggaccctgagaacaagaaggtccatctacaggcccaaagtgggatccaggtcaaggaggccccaagacctgacactactattgaggctatggagtgctcacaaaaaaagggacctgtcatgactgccctctgaaagacccaacaagcagctgaaagagtcagatgtagatatttgcacccaaccaatggacagaagctgctgacctctgtggttgaattaggggaaagctggaagacgatgaggaggagggagaacctgtaggaggactagtagtctcaattaacctagacccctagatctctcagatactggaacaccaaccaggtagcatacaccagctgatatggggcccccagcacatgtacagcagaggactgttgggtctgggtttagtcagagaagatgcacgtaaccctcaagagactggaggccccagggagtttagaggtctgattgggtgtgggttgactgtggggacatcctcgtggagagagggggaggggaggaggtatgggatgtggaacagtcggaggtagaccaggagggaaataaaatctggaggtttttttttttcttcttttta

SEQ ID NO: 4270 - DNA, 1200 bp, mus musculus
cccattgcatcctgtcttggtctctgctaattaaagagagagatgtaaagttctgttgtcccctctggccaccttttatatatcaccggaatggagagacacagcaaaggccagacatggccactattgtgtctccaggatggcctctctcccacacctttcccattctttttggaggccatcccaatgaggattctgcttgtccacacacaggatcccctggccctgaaactccagctctccacccttctagctccaaacacctttttgtccaaagtcacaatggcatctctgtctgtactgccacacagaatgtacagcagtttgaaagtgacatctcctgtgtgccctgccccagtgtagccctttcagctctggttacccctgacaactgaggtgaaggggggacacttaaagaaaactcgcaagaaaagcaaactgaattcatcttgttaaaatcagtgcgtgtaaactggtctttggctatttcagagtgtttgtgtaagacactgcaaagtctcgccggcctaggcttcttgatccagcccaggagtcaaggcggcttctgcgggaaggtgtggagggtagcaagttcagaaacctgagcatcaacttctcctcctcattgcttcctttgggaagtaactattaacctcccgctgtacacctggcatggtgtaagacccagggacactaagaatcgaaacagactccccactccatcccctcatgaagtccgagtgtcatataaacaagtgacaagcaaatatttaattttctctcttagagagtgttgtgtgtaatgaagccagggagggatgggaaaggcagcagcgcttcttgcagcttgcagtggagttgtaaaagacgattcatgaggtcagtaggtcaccttgaggccaagaagtacaagggagagaaccttggcaaatacagaaaaaggtgtcgcagaattgaggaggatccagggctgagtcctgagatcaagcgtgcttgcagaatctttaatgacgtttaaacttaacagcaaaggccaaaaagaatggggtcacctcagtctatgtccctggcaccccagggttctcatggggtaggtgggaagctgtgcttgcacagatcagctctgtggtgagagtctgcagagagaaggcatgaaatattgctgctgaagtccactggactagccgctgggaagggcgc

SEQ ID NO: 4271 - DNA, 1000 bp, mus musculus
ttggactctggccccgatgtcagagctgggctgagtgtaaacgccatagtgagtgctcagtcaggccttgctctcagaggcactgtcctcctcttttctcttggaacagcatggcttcagtgacattaaggtggaagacacagccaagggacatattgtcctgctgcaggaagccgagacactcatccagattgaagaagactccactcacatcatctgtgacaatgacgagacactgagggtccgactgcgggaccttgtcctcaggttcctgcagaagttctgagtggcatccgtgacatcctaggcccttcacccagagacagtctggtggtgtcctatgacttccggagaggagaggtgtctccagctaggatctgccagtgtgacttcctcgtactgctgaccccaagaacgtttagaggcctgttcttttcagttctgggctcctgagcagctatgggtgacaacatgacagacatcctttcctaagggaaatgaaaaaaaaaaaatgcctggcctgtgtttttggggctcacagggggtgactctcggacttaccctcctacagtgctacaccgtataaaggtcagcccccaaattagaaggcaaacctatctcgctgttctgtggcccgttttgctaaaaataaacattatttttataaaagtgcccagttctattgcactacagtctaaataatgacttagtatctgggggaaaagtctgcagctacactcagcagtgaaaacgccacagcacatctgccacacctctgccctaatcattaaccctgtctgcagaaatgcagatgcacccagtgctggaggctcatcctctgacacagcaggctcgtggcccccctgggctcataagaccctgtctcaagaagcagaaacaacctggcaggcagttcatggccttttaatcccagcacttggaggcagaggcaggcaaatctcggagttcgaggccagcctggtctacagagtgagttcta

SEQ ID NO: 4272 - DNA, 1000 bp, mus musculus
tcaaattctggggggaagcagggtgaggcaaaatgatggcgcttgaagaggggcgagggtgggttcagggcatcatttttgttccagatgagtgggatatgtcggaggttcaagctgagttatttcttcattttaaaaaatgtttggttttgggagaggaaggtttactggagctcggcttcctctggggctgctctgactgaagaccctatttcagtggatgaaactctgtgaaattttcatctgttcttgttgtatttgcttttcgggactatcttgtctttcttccttagttctgtgcagtcttgctttttctctcttggccctaaggatacagtgagatcatcccctcttccttgccccgccccaccctgaggttagcctaattctaactggctcagcaactggctctaaggcagaggatgcaagcttgcaggactgccacacccaggctctctgatcttgaccagtcacagctagcccccttcaggctcagcccacagccccagccaggagttttagcatcccctcacccccacatatagggatccagagctttgatgtccgtctgatagctgtgttcccacgtggcagcgctgtctttgttttatatctcccaggaaaattatatctgcccaggtgtggaggagcctcattgtcctcaacctggacagttcttggggagactttagaggacaggtcagacagctttaggtcaccctctgaagaccccaaacagggataccctataccccaacaccaagcagcagatgggatgacctgatggtgacctgctggagttctgaggggggaagggtagagatggaatgtgtgggaatctgtctcccctaaggttgggtcctctggggggtgggagttctccctcagatgggtgcttgggagatgagatcatgcaccagatgtggaaataatgatagtggtggagggaagcaaagacaaagggggcaggtcaatgtaaagccagaaggcagccacagcc

SEQ ID NO: 4273 - DNA, 1000 bp, mus musculus
gacacggggacccaagtctgggtcccaagaacacatgtcaaaaaaccactgtgcgcggtgaggcacacctgtaactccaccctgcaagatggcagcttattcttagaagtttgctggccaatgaggactggcacccagaattgttctctgacctccatgtgtgcaccatgcacatgcctgccagcaaccataagcacatgaatacacacacacacacatgtacactcacatatgcatgcacacatgtgctcatacacacaggtagacagaatatcttttaaaggaggaaagggaatgaagaatagttgtgattaaataaggacttgaatgaatttttaagtagttctatgtgcctcctgcaaaaaacgtaattcaaaatgaagggcacaaacagataaaatttcaaaatggcgccatgtgtggggttgcacgtctctcattcccatcacttgggagatggaggcaggaggctcaagatcaaagtcaccctcagccaacatgactaatttgaggtcaatctaggctacaagaacctttgcctcaaaaaccaaaacaacaacaaaaatgtcaactatcctaagtctttgtagacactgcaaagttgagttttctcagtctgttctactgaaatcgaagtctcctggactaagggtgggttgtctagagcagtcttgactaaatcaaaccttccagtgttgtcatttaaatagtaacctttctcacacgctcctaacagctgactttcctcacagtggccatagagaccacggagttcaagccattggagctaccaagatcacaatccagccagttgtagcttaacaggcagttccctgctcaaagacaatgggacacaatagaaactgtcaagtagcggctgactggtttctggtcaggcagaccagccttggaaagtcccaggtaaaaaagaaaatctggcaaaaccaaaccaaaccaaaccaaggtggataaaagcttcggttgtcctctggcctctgtc

SEQ ID NO: 4274 - DNA, 1000 bp, mus musculus
tctagactaagaccaacttcacggaggaaaacagattctagggagtcgaggttgtgtgaggtagagagtgccatgtctacagacttggtgctcatggccacggtgtggatggagtcactgagggtactgtcagacatcccattgacccggtttgcaatgtggtcagtctccatgaccataggaagctccagaccattcccatgaatgggcatcacaccaccatgtcctacagtgtctgctgtaaggctgttgctcacagaatccacagagagaggctcatgacttctggagccacttgggatttgggaatgctctcctgtaacaccgtccattgtaagctcctctgccattccatctgtggagattgggctggtaaccctagaaacattctccatagtgattgttgtgtccaatgctacttcatggccttcattaggatgaagactgtgggtaccatgtgtgtttacagagtgagagtctattgaaacaatgtctagttctaatccaacacttccattggcctgatagagatctagtgctgaagggttgttggtgatacataatgctgtatttccatcaacatttatagagttgggatggatatactgaggaggtggtctgtcagctaaataagataaaatgccaggtagaatggttctgaagtatctgctttctaggtgagggtaaggtggtggaagtagggtatagtttctttcaggtaaaccacacattacccacggggagcatcagagacaaggcagaaggcagagagctcagggacagaccccaggtttggaattgccactggaagtcctggggtagggatggcactgtgagaagaagaggcagccaaacccaggtgacttcctgagcctggcagggcattgctcacagaggatgaagacagtagctccatccccactggactcaaattcctgttcttcatcctgcgagttcagggtggggggcgggcgtctgataggtgcgctctggggccgat

SEQ ID NO: 4275 - DNA, 1400 bp, mus musculus
cagtactccggagacaggcatatctctcagttcaagaccagcctgttctacagagcagagttccagggcagtcaaggctgcatacataaaccctgtctcgaaaaactaaaaaaccaaagaagcaaaaaagcaagcaagcaaccaaccaaccaaacagaaagacggcggctgcattctgtccagtcacagtgaggttctagtgcaagacaaggttctagcatccaggagagtaatgagcaacagacacacagatccatgccttcaagaccccgggtgtgtggcctcctaggttttgtcttatggtagcttttgacagttattaacggagtacgtaagctggagcaggtaagaggttctctgccacttttgtctgtgccaaggtttgcattcaatctgcgggtccaattctccaaggagcccaggctcctcaggacatgggggaagagcattggggcaggagtcaggtagacgctttgtgtctcaaagcaaagaaggccacattattgattcctcacttggcacttgacgcactcatcccgaatgtgcccagcagggggcagtgccagcctgtggaaactgcaactagggactaagcttgcgaggcgcggtgggtgcctggtcctgagggacgaatttctctacctgaaggatctggtggtgaggggcagcttcgggagtcttccgaaccttgggattcccctccggaaatgtgaacacgctttcaaaatatgggatcctgagccgatccctatctctttgcgcccttcaccttcaagagacagaactttctggttgctctactctgagatcacgtgatctcaccaggggacgtggtggacagcttgattggggaaaagtggggtgaggggttggtagctgcggaagtagagcatttggggaagctgggagtggcaatgaaagtccttagaaggctgttggggaaatgctgactaggtttttagtgtcctcggaggaaatgagccagtgggtgtgccccattctgcagggagctctgaatgcctcttagctagctttagctgtgtctgtgtcaccgcgatgtgtgtgcatcattcatccagtaatactacagagcaactgccacttgtatgtccctctctctcagaagctgggattccggaaggttccccagcccctagccccaactcaaaggagcaagcagtggggagcagcagaggcggtcactgatgggtcagggagagaagcgcttgagagcaccacagacagacacactgaggcaaggcctccttcaagagccgctgagccacccaggcggccaggggaaagtgcacaggcaaggaaggaaacagacctgccattgtgggcccgagcaaaggatttacaaagaccttgccacccagaatgggtctctggctctaggc

SEQ ID NO: 4276 - DNA, 1200 bp, mus musculus
cccgcggaacgtgaggcagaagcctcacggactgtgcgaacacctgtgctctgaccaggaagatggcagattgtctggagccgaaaatggcgccgtctcagaggctctgtggctctcgcctgttccagaagctgctggcctctgtgttccacactctcacccgcagaccgcccgcctcggattcccggaaccaaggtggcccccacggaacgtgaggtagaagcctctcgggccgggtggacccctgtgctctcaccaggaaggtggccggttgtctggagccggaaatggcgccacctcagaggctctgtggctctcgcccattccagaagctgctggcctctgtgttccacactctcacccgcagaccgcccgccgcggagtcccggaaccaagccacaattttctaattaataattcaaaatagagaatttgagtcttataagtagaaaaattgtgagtacttgtattaattatttaatttatttacatttcaaattttctcccccttcccagtctacactccacaaatcctccatctctcccccatcccttttgcctctaagggatgctcctccactcacccatccactcctgcctcacccctctagcattcccctacttggggcaacaagcctccacaggaccaagcacctcccctctcattgatgccagataaggcagtcctctgctacatatgtagcgggagccatggactggcccatgtatactctttggttggtggtttcgttcctgggagctctgatgggtccagttagttgatactgttgttcttcctatggggttgcaatccccttcagctcctccagtctttaccctaactttcccattggaatccctgggcttagtcctggtctgtgagtatctgcatctgtcttaggtgctggcagagcctctcataggacagccatattagtctcctgtctgcaagcacttcttggcagcagcaatagtttcagggtttggtgtctgtggatgggatagatcccatggtggggtggcttctggaaactaaaaacaatatactttgaagtttttaattgtgaggctgtactgttaacatttaacgtaaatgggttggtgtcagaattataatctaggccatgatggaactttgcatataatttcacctatcaatgaacataaacacttcacagttgttagtcttctctagatgtc

SEQ ID NO: 4277 - DNA, 1000 bp, mus musculus
aatgccccctggaactgggtgaaagattgctgacttcattgttgtttcaaagatgtatgccttgccttcctttttaagaagcacttcacctcccttgcaggactactcccctcatccctgagagtgaagcagagaagtcacagagagatatcaaagcctgccctgggagcctggatccctccttctttccctcctcctgtgcctctgcagcccctccctcccactgtctctctttattctgatcactaaccttttcttcaaaggctgctttctggaagaggaattgtgcacactttgtctcaaacatgctgtcttttctgttaacagcagccctgcaccaaaagagatcaaaaggggggcagagagaaaaggaaaaggatcgcacccccagagttcataatttaaccctccccacccaagaaagggggttctgggagaaatggggtatcactcaccctccctggggctcaagttgctgtgggttcttattgtttgtttgtttgtttgtttacattccaattgctccccctccccattctcccctcacaggatccctccccctatcctccctccccttatcctctgaaagggtggggctccaccatatcacaaggacaggagctctactatgttcatagctactatgatttttgtttcttattctagctgtcaagctatgcttgccaggacttttggtgaccctatctgaggtgaaggaggagtgggctctgccatcctgggttcccagctcccagccctgccaaccttgtaatctctgatccactcagagttgttttttgtttttttaaactctgctgtcaggtctggttatattgctggaagtgggttttttttttcccattcctgttttcccacggaatccccttgcagcttgaaggccagaagcagaatgtacctgggcgaaagaataaatttgacaatgtgattcccagctctgggagagagagagcctgagacattggggatgttgggagttgtg

SEQ ID NO: 4278 - DNA, 1200 bp, mus musculus
tacatttacattgaatctgaacaaagaaatagccaaaatgtggttcacacttcctggtgaatatttggaatactaaagttaaaaccaaatcatcttgcctgagaataaatggggttaaggcaagcacggtggcatatgtctgtaatcccagcactcaggaggcaaagcaggagaattgtctcaagataggctgataaccatagcaagttcccactagccagggctgcatagcaggaagtggtcttaacaaaacaaaatacaataaaaagtagttttaatgtttttaaaaatggaattgcaggatgtaaatacatcttgctacttagactcactgtacttctctcattatcctggaacaactgtccaggattgtaaaaccccagcatcttttctatgcctcactgcatttcttagaaataaagacttgtacaccattacaacccatggaactaattgataattcactaagtatttttcttgcctgttttttattaaggcttttcagggatatgcattccttttaagaagggaaaaagagaaatatgcagcctcagggggtgggaggtagggggaccctctagaagctaccagagacctgggagttgagagactctcagtactcaatggggatgaccttagccaaaatgcccaacaacggggagagggaactctaagtgtccacctccagtagataaacagggcctcaagtggagggatggggttacaaacccagaactgttcctgtctaaaagaactgcagagaccaaaatggagaagagtctgaaaggaaggcagtccagtgaatgactggcccaacttgggatccatcacatggtggggcaccaaggcctgacactattactgatgttatgatgtgcttagacatgggagcctggcatggttgtcttctgagaggcccttccagcagctgactgaggcagacgcagatacttatgcctaaccattgtactgaagtttgggacccctatggttgaattaggggaaggattgaagaagctaaaggggagggcaaccccataggaagaccagcagtctcaactaacctggtgtccagggaactcccagagaccgagccgccaaccaagcagcacacacaggctggtctgaggcccttggcacatatacagcagaggactgcctggtctggcctcagtgggagaagatgtgcctaatcctcaa

SEQ ID NO: 4279 - DNA, 1200 bp, mus musculus
agtatggaaagtcaatttttatttattctgtgacgaggcagtttgctttaggaaggctgcctgaggtaatttatagaattctcagaaatggagttccttgaactgcctggtttgttttttttttttcccacagatttttgtgcttggcacaaactgcagtggctgtctgggggtaggcgacattcagagcactattgagcctcggagactggattctctaactggcaaaaaaatagccagcctcagctatgggagtggccctcatatcgtccttgcgacaacaggtaacagaaactcaaaggacaggtttgaagcattgcttatttgttaagaaataagaccagtatgccctgaaattgagagcaaactctctgattgagcaagagtggctggctctgccctgtgagcttggccacgcgttgggcaacatgaagcaggacggttctggagcaatggggcaaggtggtaggtaacacacggggcctaaacggctgcaagacgatgcacaaagcccttctgttctcagagtggaatcattgcgtgacaacgctacttattttggagcttaggaagcctacactttgaacttagattcctgggctgggaactgagagaccaaatgttcattttgccagccctctaaatcttagcagtctgtgcttctttcattaagtagtggctgataggagaagtttgccttagcagtggagcgagaacagtctcttggctacgtcaccagaatttaatcacgcctttgagatgtacattccaggaccttgggaggggatgccaggataggcccgattattcagaccatttcttagttaaaaaacgagctcaagcctgaggctggagggatggcttagcagttaaggaaaggtgaagtcaggtaaggatagggtcaagtaagggtagaggagacctataggctgttctgctgttgagacacctacctgcctagctgatgctgagctgtggtttgtacgcttgaggtagagggttacaggttacaggtagctggagtggaataggagatttcctataccctgggactgcaaggccagaccctcagcacaggattggcctcttcctaagggttgaacaggagactttccttggtgaattctaggaaggaaaaggagaagactgagtaaaaccatccctgaattcgcagctatagatctgtgtcacattagactg

SEQ ID NO: 4280 - DNA, 1200 bp, mus musculus; identical to SEQ ID NO: 4279

SEQ ID NO: 4281 - DNA, 1400 bp, mus musculus
gaaaagcagtttgtaacgtaccctgctggcttactccttgcgcttttgcggtgtcgtccgcgctggtgtgaagatgctggccgtcggctacgcgataaagggaggcggctccgccccgaaggcccaactgagtaattgcggccgcgagcggagtctgttctgggtcgccgctgtgccgcccctgtgttggcgagggaggcgtgaggaggagccaggcgtctgcagccgttctcgccctcggcgccccgccgccatctccaccatgcagtcccgggaagacgccccgcgctctcgccgcctcgccagcccccgcggcgggaggcggcccaagaggatttccaagccctcggtgtcggcctttttcacgggcccggaggaattaaaggacgcggcccattccgcagccctcctggcacagctcaagtctttctacgacgcgcggctgctgtgcgatgtgaccatcgaggtggtgacgcctggcagcgggccgggcacggggcgcctcttctcgtgcaaccgcaacgtgctggcggccgcttgcccctacttcaagagcatgttcacggggggcatgtacgagagccagcaggccagcgtgacgatccacgacgtggatgccgagtccttcgaggtcttggtggactactgctacactggtcgcgtgtcgctcagcgaggccaacgtgcagcgcctgtacgcggcctcggatatgctgcagctggagtacgtgcgcgaagcctgtgcctcctttctggctcgccgccttgacctgaccaattgcactgccatcctcaagtttgccgatgcctttgaccaccacaagctgcgatctcaggcccagtccttcatagctcacaacttcaagcagctcagcaggatggggtccattcgggaggagacgctggcagatctgaccctggcccagctgctggccgtcctgcgtctggacagcttggatgtagagagtgagaagactgtgtgtcatgtggcggtgcagtggctggaggctgctcccaaagagcggggtcccagtgctggggaagtctttaagtgtattcgttgggcgcacttccctgcagaagagcaggactacctagaggagctactgagcaagcctattgtgaagaaatactgcctggacattattgaaggggctctccggcagtttcgttttgatgatggtctgcctaaggctttggcacagattccaagcaacagcaacaatagcaatagtaataataatgacaccagcaacactgttgtcccagcagaagaaaatccaccccataggttagggatgtgtgtgaagagaatgatggttttctgtggacaccccaaacatcactttttctgctttgacccatactctgaggaaatttacaaagtgtccttgcctgtga

SEQ ID NO: 4282 - DNA, 1000 bp, mus musculus
agtcccccacaccctccctcacccacccactcccacttcttgaccctggcatttccctgtactgaggcatataaagtttgcaaggccaatgggcctctctttccactgatggccgactaggccatcttctgatacatatgcagctagagtcaagagctccggggtactggttagttcatattgttgttccgccaatagggttgcagatcccccagctccctgggtactttctctagctcctccattgggagccctgtgatccatccaatagggtagctttgttttgtcctaagtcattagtaaggtcttgtagtgacttcttcatattatttggtctctctgtgtgactgagatcagatatctttttcttataaagtgagttagtttctactttaattattgaattttaacatgattttctctaaaaaaaatgacattctgtggaattatgaactttacttcaacatatagatttttttccccagtggggacatacaaatcaatcaaaccaacagtatcaccaaagggggaaacaaatacagtcaggcatgtgaaaatattcacatatctcacccagcatgttatatgtgtagtcagatggagtgggaaggttgtcgttagtactctacagatgattgtcttgggtggctttaaatgaaattggaagttttcatcactttcttatactgccatgagcgtgaacgtggcagctaaggcaatagatccactggtagggttttacaaaagggtgtgattagaagcagcagattttaggctacatgagggtacccatccactagacaatgaaaaaggaacaagagatgaagctgatataatgcttttctggggaggtgtggtatcggtggtggtgggagacaggaaaggagtgttatctttaagcatcataaaatcctgctgcattttgttccgagaattgtaaagagactgagcccaagagtaggcaagagtgagtagggctcattgcagagatttaggcaag

SEQ ID NO: 4283 - DNA, 1200 bp, mus musculus
cacttacaagcaacatattttgggatagccctcttactccagttattcaggacccacatgaagaccaagatgcacatctgctacatatgtgtgagaaggcctaggtccagtccatgtatgttctttggttggaggttcagtgtctgagatccccatgggtacagtttagttgactgttggtcttcctgtggagtttctatcccttccaaagcttacaatatttcctcctattcttccatgtccccaagctccatccactgtttggctatgaatgtctgcatctgtctgagtcagatactgggtggagcctttcagaagacagccatgcttgactcctgtgtggaagcataacagattttatagtgttaatagtgtcagggattggtgcttacccatgggatggggctgtaataaaaacaaaaacattgggaattttgcagaccaatggatggatctttagtgatgtaatgtagttctagaaggatatgcatgttatgtactcacttataagtgaatattagccataaaatacaggatatccgtgctacactccacagacccaaagaagctaaacaagaaggaaggcacaagctaaaatgcttgaatctcacttagaagggggaataaaatagtcatgagaggcaaatggagagagggaactgggagggagaagagatggggaggagattggggagttcaggatcaggtgttaggaatgattgaagggataaccagatggccatgggaatggatagaaatctgcaactgatggggtggggcagtagggggcatcttcaggatatcacagagacctgggataagagaggtgctcaagaatcaatggggatgggcttaggtgtagctcacagttggggatatggagcctgaagagtccacctcctgtagctaggcaggaaccacaatggagacatagggacaccaataccacccacaaaattagaaatgtaaggacagaaaatgcagaaacagagggaatggccaactactaaccgaccataccactgttcttgttagttcctatttgttggttgctgtccatgtcaccaacagagaattttatttgggaaaccatgcattttatcataatcatgaggctttgtgtctgagctcagttccataatttcttggcacaacttcatttcagactgtatttcattttaccaacccatcattttacca

SEQ ID NO: 4284 - DNA, 1200 bp, mus musculus
gactctgctggcaaggtagcccggggcttgagccgagcgggagggtgtcagtttgttttcatttgttgaagttctattgcaattcttgttataatttctatttctttattaaaatgccacatttgtcattataacattttaaatatttaattgaaacatcatttattcttattctttagttatatttattgcagaccttctgtaattgtttattgctatatcaaatattgatttccagttagattctccctcaattgagatatttattctttttttttaaatttaattttattttttaacttattcactttacatcctgctcactgctcccatcctggtcagccactcacacaatcctttccccctcctgttctcatctggctgggtgggggctcccttgagtacccactacccccccccacaacactttcaagtcactgataggctaagtgcttcctctcctactgagaccaaacaaggcagcccagggagaagaacatattctgcatacaagcaacagcttttggaatagctccctttccagttatttggcacccatatgagggtgaagctgcacatctgctacatatgtgtggggaggccagggctagtctatgtatgttcttttgttggtggttcagactccaagaaccccaaggctccaggacagttgactttatttgttttcctgtggagttcctatcctagtcagtgtctgcaatccttcctcctatcttccagaagagtcctcaacctccatccactgaatggctgtgggtgtctgtgttttcctgagtcatccactgggtggaggctcacagaggacagcatgcttctgtctgcaagcacaacagagtatcattaatagtgtaaagtgttggtgcttgcccatgggatgggtctcaaggcaggctggttattgctggacaatacctcagtctctgttccatgtcctgtacctgcatttcttgtagacaggatgaattttgggttgaaagttttgtgggtagattgatttctctattgttccactagggttcctgcctggctataggaggtagtctcttcaggttccattttctcaatatcaggagtctgtctaactcattctctcagaaggtcttttgctttgcacaaaatatgatatagaaatactaaaaatatttattgaaaaaatacaggtaaattaatctaaagttt

SEQ ID NO: 4285 - DNA, 1000 bp, mus musculus
caagtttacgaaaatttaaatatgaagtttggggcttgaataaatattcagattctatgttgtgactttccattttttctatggactgtctgaaaagaaaatcttatgttgtagtaatttttaacattaattgcagttttctaacccaactttgatcattgaattcccaataaatttctcatttagttcccattaaagatataaaacctttatatttgcaataaatctaatggcactagagctgggaagatatcaaccctttaaactattttgcctactatcctgtcaacaccctgagacatgacttaccatggctgggcatagcaagatattacttactgcctggcctcctcttattctgattgactagcccttatggccagtggtcaagatcccttatcccatggcctcctaccctctctcttcctctcccttctctcctccttgtctctgcctcagaccacaagcccagggatttgatgccccacctacatcccttctgcccacctatgaactctaggcatccttattcaaccaacagttttaagttaaggaacaaggttacatagcatcacttgttttacttaagaatttccttgtctctgggacaaccagatcttggggaccagtatttaggattaaaatacatagtaatagaccaaatctcaacaatcttacattatcatcactatgatactattacagtgtaattgttcatttttttgatgcagaacctcatttaagaacacatgaaatcatctcttagggacatctgcatataatctaatcatgactaaaactttgatttgttggtatctattcactagtttttcaatagagctgactgtaaagtggcaataagtatattgataattacaatgaaaaataagttgggcacatgccatctgtcaacattccccttatttattctctagttgtctttgacttaccactccaactgccatgaacacaggtactcagaaactttatttttattcta

SEQ ID NO: 4286 - DNA, 1400 bp, mus musculus
aaataataaccttcaaaggtacctgaagcctttggtacaacaataataaaacatacccaaattagagatgaaataaacaaattcgatataatcaaaacctaaaaataatacagaagagcaattaaatgaagattagattttctttttagtttagttttggttttggtaaagactactaagactgttattattatcaagtctttactataattctatactgaattagtcagtatagaagatctaaaattatgaaattaggagtgcaaagatagtacacaaatattaatgaagtacagaaaattaaaaagacagacttaagaaacccctactaaagatcagctgctcaaaactctctctctctctctctctctctctctctctctctctctctctctcagtccagcttgcttacctcccaggaggtctgaagaaactgaggacaaggacagaggtaagagtctcactttaacttcccacacccatgtaacacccacagagctcagctaatgtgttccactccagttcaaccattcttctggtcttcttccccacccaggccagatcatctggccagctaacttcccacatgcttcagcctgggacagaggaggcctgctctaactagaaacgcaggaggcccaccataaccagagatagcactgcttgcctagaaagggacctgctcttacacaggtcgcagagctctacttgcttccaataaggttggctccagtcagagacacccaggccaattaacgtcagagataaccagatgggtagaggcaagtgtaagaccataagcaacagaaatcaatgtaatttggcaccatcagaactcagttctcccatctcagcaaatcctggatacactaacatgcctgaaaagaaagataatgccctaatatcccatctcatgaagacaatggaggccgttaaggggaacattaaaaaaacaaaacaaagcaaaactcccttaatgatacaggaaaacatagacaagcaggcagaagcccttaaagaagaaacaaataagtcccataaaaaatacagaaaaatagaatcaacaggtgaaggaatagaacaaaatggtccatggacaaaaaatgaaataggaaacaataaagaaaacacaaatagaggtaaccctagagataggcaacttaggaaagagatcaggatctacagatgcaagtatcgccaacaaaatataagaggtagaagatgggatcttaggcatagaaggtacattggaaatattgacacatcagttaaagaaaatagaaaatgtaaaaatctcccaacccaaaatatccaggaaattcagaacacactgaaaagataaaacctaaaaagaatagaaatcgaaaaaggtgaagaatactggctcaaagggacagaaa

SEQ ID NO: 4287 - DNA, 1000 bp, mus musculus
cctggacactattgtgaaagctgggaagtttttgctgaagggagtgcaatatggctgtcacacctgagaggctctgccagagcctgataaatactgaggtgggtgctcacagccaaccactggattgagtgtgggttccctgatggaacagttggaggttggagaatggagtgaagagctgagtgggtttacagccccatggaaagagcaacagtgtcagcaggtcagcccttggatctctgggggaatggaccaccaaccaaagatttcacgtgagttacctatggctcagacagtatatgtggcagaggatggccttgttcaaaatgggtggaagtggaggcccttgggcctgggagtactcgatgtcccagggtaggggaatgctatggcaggaagacaggagtggtgagtggggaagggaagatggaatatgggatttcataaagagggacctagaaaggagaaaacatttgaaatgtaaataaataaaatatcccattaaaaaatagattgaaaaacaatgttctagagaacagagaaagactatcaaatttctgtatgcaagggttaattgtttcccaaaacatagcaagtattttatgttttatatggtccttataaactcttgacaaggttacaaacagtgcttagtttctcaaaatattaaataagataatcttgcaaatgcctgatcatctgccaaattctctgtctcaaggtaataatgacacatgtaaagtctactagcctttttaataatattactcagttagtggaatgaggttgtacaatcccaactaaaatatctaactctgggtggaccagtgccagtacattaaggaagtataatctgtagagagtacacagtttctgaatatgggcaacataattatttgctggctcagatataaaaaagtctgagagaaaaatggtgctgcttgtttgcttggtaatgtttctgattattcttattattatatatctatgccattgttgc

SEQ ID NO: 4288 - DNA, 1400 bp, mus musculus
ctatttttatgtttactatgtaaagatgatgtgatggctatcagattagatacacaaagatgtggaaatctaaagacaataaagacaatagaaaccaatttgtggtctcatccattttttttttttgatgatcatatcaatagatacagaaaggcagctgatagaatttagtgtctttgttaagattaaaaattccctaccaattaactatgcaaaggatatgcatcaacataataaaggccatttccaagggtaccaaattttacattatggttaatgacaaaacgtttaaagtttgttttctaagctcaaaataaaacagtgttcacgtacttggaaattgcattaatcaaatttctaaaaaattgagcagaaaacaagaagaaataaagtcacccaaatcacaaagaaagatgttgtattatcccagtttgcaaatgatatggtcttacatacacattttttaaaaattggatatgttatttatttgcctttcagatcttatctcctttcccggtttcccctctgcaaacctcctatcctatctctccttacagggcttctatgaaggtgctcccccatccacctcacctacttgcagatgtcaagatatgcttgctgacaggaggctgatacagctgtctactgagaggctctgtaaggccctgacaactacagatgggaatgctcaaagccaaccattggactgagcacaggaaccccaatggaggagttaggggaagggctgaaggagcagaaggggccttatatggtataaatgagaggggaggccattggtcctgtgaaggctcgatgccccagtatagaagaatgctaggtcagcgagaagggaatgttctcatacttttgaaaagaaagaaactgtagtctaaatagaagataactttttctgcttctcttgaagattcaactgatttgaggattttagtgttctcactcttggtcattctgttagttcatttctagatctcagatatttcctttccattctacaagaaccaggtcttatacattacagtcttttcaactttgtaaacacactttaatcataatctgtgtcctaaatcagaagagtatttttggaagtcttacaattttcataatatttcttaacataacacattcttttctgaactagagaattcttttttatgttatctaaatgggaggataagaacagagcacatttttactaacttagcagtctttcttattaacaatacacaaatatatttttatatattacctaactaaatgcaaaagtaatgtaatcatcataattaactttcaatgaaatcagagtaactaggatgttattgccaattaacaagagtcccacggactacttgaatttaagtgtttgttgtttttatggttgc

SEQ ID NO: 4289 - DNA, 1000 bp, mus musculus
tttctgctggccctctgggcttcagacctgtcctctccaatacctgatcatgttccctcttcctcccacccctgccccctctcccatccagagctgagagactccaaggtctcaaagggagagatcttggatgaagttgtccacagtgaggagggaaaacatggaaagtccacctccagtagaaagacaggacaccaagtggagagatggagttgccatctcacagtcaaaagcactgacatagaattgtttctgtctgaaagaacttcagggacaaagatgtagaagagcatgagagaaaggaagtccagcaacaggctcaaattgggatccagctcaagggaaggactggaacctgactcttgttactgatggtgtggtatgcttggagacaagaatctatcatggctgccctctgagaggcccaacaagcagctgaaaagagtcagatgcagaaactatcaagtaaacaatggagagaagccagggattccctagtggttgaattggggaaaagctggaagaagctgaggaggagatggccccatgggaagaccagtactctcaattgacctggaacccggagatctctgagccacgaaccaggcagcatacaccaggtggtatgaggcccttgacacataaacaacaggcctgcctggtgtggcctcagtgagagaagatgcacctaaccctcaagggctttgaggccccaaggagtggggaggtctggtgaggtggggtgggggagtggggaccttctcttagagacagaggtggagctggggtgagggaggagggatgagggtctagggacagactgggaggtgaatgaagactggagtgtaaaaaaggattaataataatatccacaatcttatacacagaagagaagacttacttggaaatgtaaagaaaaacatctaaatacatttataaaaccaccatgaccacgctgaatactaataattctggaaaaataatcaatagtataaaaaaa

SEQ ID NO: 4290 - DNA, 1000 bp, mus musculus
cttggactcctctcacatatcctgttattaccctgtttcatggaggtgttgtagatttagatctgtaggactggctccttcaagtgctccagcaattcaatgatgggttacatattagagtgagccaaaccaaagctatggatctgggcctgaaaggtctctgagcaggtcagcccacaagctcttaggttatagatctctgacatcaggctaactagcaaacccctgaaaccagggccaccataccctgctgtccaagtgatgtgcagtcccactctccccagtgttgttctcccactttcatgaccctgagactagctctcttatcaaacatggatggtgagaaatgaaggaacggaaaagaatgtctctctctcatctgaaccaccgcacagcttacaatagtcaaggtcagttctcctgcaaccctcacatccagggccatctctaactgtgctgctcagataaggtttaggaccctgtcttctgagtgatacagcagatgagggtaaaggccagctctcctgtctgacataggtagcaaggagagaaagggtgagggacaacatctcttccttgcctattctgacacacagtagacaagttgggagatctcctacactttgtccttgtggttggctatttgacccacaaatcccatattgagattcagctctaatgtcctgcccaggtgaggtacagggcctgctcttctgagttctttagcttgtgaggagctgggtcagctatcctttccttataaccccatggacaagtctcccagttgccagaggtggtgaggtgcatgggtggaatatatctatccctcatcaatgcagttctcttgcttgttcgctcacttgcttgcttgcttgctctctgtctctgactctgtctctgcctgtctgtctctgcctgcctgcctgtctgtctgtctgtctatctctctctctctctctctctctctctctctctctctctcacacacacacacacacac

SEQ ID NO: 4291 - DNA, 1400 bp, mus musculus
caccttttcaacgtctccacatccattacagcaaaacctggttgattccaacccttggctgattttagtagaactatagtaagaatgagtgactgtctgacatgctgattttattttctataggattcatacatagaaattacggaaggttgataaatagtcttagttttctgcaagatatactgctaaaaatatattatccgtagtactccagagtctcataaacagtttataagtattctttctctatattgtcaccagcatattttatattttatgttataggcttgggttcatgggtttgcatatatatatatatatttgtagacttagatttttttcaaaacctactttatctggaattcttttttttttatgcttgttcatattgttttattgagggtagatgtgggggcatatactttatttggggtgaaccagggattatataattatatacctcttggggaaggaatacccaggaagagaaggtcattggttgaaggcttaggataccaagatgccccattaacatggggaggcactccaggtgttgtgctatgtgactgagtgcccatggttctctcagtggggtgccatggttacatgtcccagagcaggtacaggacagaagcagctcaaccactgttctcaaatctttgagattcctagggtctgagatcaaccttagcaggtcttatgtctgtatggtagcatggtcctacatttttctgtaaaacgggaatcaggaaaaacttctctatcttgtcctggcagagttcagccaggactttctttgtcctgcttgtccacagcttggacagcatgctgtcagcagttatctggaattcttaagtacttcaacatccctgctagcccactgaccagatttaaggaaggttaataaaaaacaggagttgtgatcctactttgaaatagttccttgggttgattccactcttctttgtcatggtacagcagttcagttcaatacaaaagagccaatacatatcagtatcagtgccatgatcaaacagaacatcaaggctcagcacaagtcagcaagaagtagagagaatcagctagaataccatgagaacttatttggcatgtttctctttataagaggaagatgagtgaaaaccagtgaagaccaggaaaatattgcatgctgtaacaatgcaagaacatcctttcattgtttgtggtgttctatttatattctttctaaacatcatgcaccctctcaagtatctaaatttcttcaaaacatctcaagccctctcaaaagacagcttaaaaaaaagaaagaagagaagagaagagaagaggagaagagaagagaagaggagaagagaagaggagaagagaagagaagagaagagaagagaagagaagag

SEQ ID NO: 4292 - DNA, 1000 bp, mus musculus
aacatgaggctcccaggactcaatgggattgactttggccattagggaaaatagaacctgtggtgaccaccttcagtagatcagcatggtctgtgatcgagggttggggccactcatccatctcgaagtttttaagccacgaaatgttcctgtccaaaggaagaacagggacaaaaagtgaaacagagactaaaggaagggccatctgggaatcgccacaccaggagatacatcatgtctgcagacaccaaacccaacactattgccttgttcaagaggtgctcgcagacaggaaccaagtgtggcagttcctgggaaggtctggtcagcaactgaccaatgcagatgtggacccttggagccaaacatcagactgaactcagggaactggaggagccaagggtgattgcaaccccattagaagaacaacacagagtggcctgaaaacccagttctagactaccaatcaaggagtgtacctggagggatccatgactccagatacatatgcagcacaggattgctaagacagcaacgggaggggaggcccttggtcctgggaatgttgggtgccccagagtagggggatgctggagaggtggggcaggagagtgtgggtggatgggggagcactcttatacagccaaaatggagagggcagggcagatgtgggatgggtgttggtggaggggtaaccaggaagtaggatatcatgggaaggagggttggtggaggaggtaaatggaaagtgggatatcatttgagatgtaaacgaatggtatgattaattaaaaaaaaatgatgatacctcatgaaactgaaaacaaaaattcaccttagtagcttttccatggttctagaaacaaacacccaggttaccccccaaactacaaacaatttcagaaatccctgaagattgggttatagacaatggtagaccacccagtatgggtgctgggacctggactaaggacctctggcaaagcagccagctctcttc

SEQ ID NO: 4293 - DNA, 1000 bp, mus musculus
ttgtatggtttttatcatttccttagcctgtgtgtgtgttcctgtaattcttttagggatttttgtgtttcctctttaagggcttctactcatttacctgtgttttcctgtatttctttagggagttacttatgtcagccttaaagtcccccatcatcattatgagatgtgattttagatacaagtcttgcttttcctatgtgacgatgtatcagggacttgctatggtgggaatattgggttctggtgatgccagctaaccttggtttctgttgcttatgttctaattctttccttccaccatctgactgtctctagtactacctaccctccctatatctgactggagcttgtccttcctgtgatcatggttgtgtcaaaactccccagagtccagctatttctgggatcctgttattctgggatccggtgatcattagattcttcatgtgtcagaggtccttagagtcatgctgcctctgagaccctgagatcttagtgtaatcaagctcctgggatcttttgatcctgtgatcctgggtatactagagcccctgagagtggagcctcctctggggggctgtgggattggctgctgagtttgcacccaaggtaaacgaggacagactggaaggaacccaagccactggtcagtcaggtttcctgcatcctttaatcctactggtaccagttactactggtggtgttcgaaaagatgttgtgttctactcacctctgatcctaagcatcctgggcatgctagagttcctgggagtggagtctcctctggatgctgtcaaatttaacatttatatttcaaatatatctttttatttttataaataaagatgtggatttaataaatttaatgtgggaagccagtaaacgccattacaagatggcactggttttaataagccgacgcccatgaatatgggtaaacaaccaatgtgcgcatgtgcagtagagttttttgctgagtcactgcctggcccgaggc

SEQ ID NO: 4294 - DNA, 1000 bp, mus musculus
acttagagaattatttcctttacccactctgcttttccccttatatagctttcataggaaacgttttacaacttagtaataaactctataatcaaatttctaagtgtcttctcttcctttgacttcagactagcagggcgaaagttagagcccagcagtttctgctgagatagaacaaagcctgcattaggctacaggtgttaattgcccaagccagcagtcttttaccctcagaaagagcaagaaaatatttaggactttttagaagttatcaccagcatttcagtataattagagagttagaaagcccggagacactcagactttaaagccattaccagaatcctactctgtgactccaccaccaccctggcccgagccacgaggctcccagcagtagtggatcaagttaattgaaagtaatactcagtccttttatttattatataatgacaaatatgtaattaaaatggaatgaactaacttcactaagttttgttgtttttagataattactaataaaaattctaacatatggtttcactgtataaactaataaaactacacagttaggaaacattaactaatggcctacattcaagtttctctttctttcattgtaatctactagaacttctgtcttaccacatacaattgtacatatgcggcaattttagaactctttagggatgctgccccatatatagaagtgtatttgcattgcaagtaacctgtggactcttaggacatacttaaaccatcactaaaattgttacaatcattcacacatataatttttttaaagtaactgctgaaccatatcattggaaaatactgagaataaaagtcccacatctgtttgcttagaataaatgtaactttaagtctcttgttactttctactttgtttaatctaaagttgcatcaaatcacaaatgtggacatgtgactatactgtctcttaagaatcagctaagtgtgtagcatcataagaaaaatg

SEQ ID NO: 4295 - DNA, 1000 bp, mus musculus
caataaaagagtaaattgaagtaaagacactataggtatgttttcatttttgtaagattgttgcatagggtgtcaaaacaataccagtaaaattttaaaataatggacagtgtagattcaacaggattaattagcttctaacaaagagtactataataaccaaaaaattaaatcaccatgaaaaaaatacacttttaaacagaaatgaaaactcttatcaatatagttcaactttaatatgattgctgtaactcacaatttttgtaggacaatgtgcatacaatatttgcctgcaaacaactctaaacattttatctagaaactgtcatggagaaatttgaaaccagtagggaaaaaacctgtagtctcaatacaagttttaagcatttttaaaaaatcattttatttacacaatagaataaaaaggaaataaataattaaataagtaacatgatattttttaattttaaaagcaatgagaaggtatttaaaagtactaatatgatcacatttggtgagttgaaagaaatatgattagtattttgtcaagaacacttctaaatttttaaactctatagtttaaatttgttaagcttcatttctttaaagaaatgttacataatttaatgttaattttgaatcttcctacctaactgaagtaatgtaatctttatagaattattttcatgtaccttaacatttttggtaaaatataacatccttctttgtaatttaattgcttgtatttcttccatatttttgttatctgatcactttaaatgttgtcatttgaaataacaaatgtaagattagcttctcactcaataactataaattaagctgggcagtggtggcacatgcctttagtcccagaacttgggaggcagaggcaggcagatttctgagttcaaggccagcctggtctacagagcgagttccaggacagtcagggctacacagagaagccctgttttggaaaaagaaaaaagagaaaagaaaa

SEQ ID NO: 4296 - DNA, 1600 bp, mus musculus
tctacttgtatttattataataaaacaaaagataagaaaaaacaagtatgagattaaaaattgacatgaataaacaaaatatcataaactaaatcccaaatactgattattttgtgattccatagggttatttagacccagggatgatgagaacatttgaaatatacacattttaatagtaatttaattaaaagtatatctccactaacacctcaagtatctgagtgtgattgaaggtgcgtgatataagtggttattctgaaggaactctaagtggccagaaaactcaaatttgtctacattttctaagtggtttttagaaatatctatacctacagaaaaaattcctatttttgtgaaaatataattaatcataattcatcttaaagtcttctcttttaataaacaaatatacatgtctacgtgaactaaatgggacaaatatatgttttcccctttcctggtttcacctctgaaaaccccctatcccatctcctctccccacgctcaccaacccacccactcccacttctctgtcctggcatttctctactctggggcattgagcctttacaggactaaggacctctcctctcattgatgtccaacaaggtcatcctctgctacatatgcagctgtagtccctctatgtgtatgctttggttgttggtttagttcctgggagctctggggggtactggttacttcattttgatgttcctcctatggggctgcaagccccttcagctccctgggtcctttctctagctcctcctccattgtggatcctgtgctccatccacaagttggatgtgatcatccacttctgtatttgtcaggcactggcagagcctctcaggagacaactatatcaggctcctttcagcatgcacttgttggcatccacaaataaagtctgggtttggtaactgtatataggatagatccccaagtggggcagtctctggatggcctttcattcagtctctgctccattggttttataatctgctacaaataacttggttttcagcaatttcaaaaaccttagttagtcattgctaccaaaaccatgtttaaaatgtgtaagtttggatcacaaaggaggctaagaagtctctcgctgttcaagcttcatcacataattaaagtacccagatcccacgagctagagggaattaactcacaagagttttcctgacttctccacagcacaggtgtatcttcaaaaagatacactcatgtatacataaccaccctgcacacatgtaaccaaaatagaagtcatttgacagaaataaacaaatttttctaaaacaggaagatatgacaaataaaacatcttcattttcttcaattagttatgctggttttctttaatatctacagagttcaaaagccatctgaatatttcagaacacattgaaacttacaacaataatcaggagttgttgcaaatgtattttgttcacatattttttacatttgtatacatttatctctttgaaacattaatataaacaaccagagtaattgctataagtgctcaacagggctttatttcttaacaaagaaatcatatattaacaaaaggctgttt

SEQ ID NO: 4297 - DNA, 1000 bp, mus musculus
ctgggctaatatccacttatcagtgtgtgcatatcatgtgtgttcttttgtgaatggattacctcacttaggatgatatcctccagatccatccatttgtctaagcatttcatgaattcattgtttttaatagaagacttcgacccttcttagaagggggaacaaaatacccatggaaggagttacagagacaaaatttggagcagagactgaaagcatgacaatccagagactgccccacctggggatccatcacataaacaaccaccaaacccagacactattgcagatgccaacaagagcttgctgagaggagactgatatagctgtctcctgagaggctctgccagtgccggactaatacagaagtggatgctcacagccatccattagacggagtccaaggtcccaaatgaaggagctagagaaagtacccagggagctgaaggggtttgcagtcccataggagtaacaacaatatgaactaaccaataaccccagagctccctgggactaaaccaccaatcaaaggaaacacatggagagactcatgattctagctgcatatgtaactgaggatggcctagtcagtcatcaatgggaagagaggtccttgcttctgtgaaggttctatgtcccaatataggggaatgcctgggccaggaagcaagagtgggtgggttggggagcagggggaggggataaaggataggaaatttttggtggggaaactaggaaaggggataacacttaaaatgtaaataaagaaaaatatgtaataaaaatgttgttggtataaatagcattaagaaatggttgcattgtaaacaacatatttttccccttatgagatacagaaggcatccgttttggcccagaagtcaagagggaatacttgactctctaaaggaaaggtgcagctggaattcatgtagcaagtaatgcagggtacctccaatttaattagtttaaccacttgagtccttctgaatgagctaag

SEQ ID NO: 4298 - DNA, 1200 bp, mus musculus
ggtagtgataatttgaggtattaattttggaaaccagggaatgtttatatataacacacagctcacctaggtatattatttgtaaaaggtcttgaaattatacccatttctattgcaacaggaatattggagaaaaggaatcttccactacctaatgtattataccttctccatcatgaacactacaataaatatggaacaacaatatcaattaaccagtacccccagagctcatgtctctagctgcatatgtagcagaagatggcctagtcggccatcactgggaagagaggccccttggtattgcaaactttatatgccccagaacagggaaaatgccagggccaagaagcaggagtaggtgggtaggggaacagggccgggggagggtatagggaactttggggatagcatttgaaatttgaaatgtatataaagaaaatatcaaaaaaaaaaaaacaaagttacagtaactcatttgtgtccctgtttgctcagaagaattaacaaaaatattttctaaagaaaataggttctaagaaataaatcatagctgggtagtggtggtgcatgcctttaatcccagcacttgagaggcagaaggaggaggatttctgagatcaaggccagcctggtctacagagtgagttccagaacagtcagggatacacagaaaaaatcctgacttgaaaaaacaacaaaaccaaccaaccaaataaacaagtaaacaaaaatcaaaaaacaaacaaacaaaagccaaagaggagtagaccattgatgtgataaaactgatcatattatttatagtccttggaaagtgacattaggagaaagaatatagaaaaactttgtgtcagtgattaaaggataatgagagtgtagtacacttaagtcaatgtgtcattttttatgtgagtttcatatactagagtgctagtgatagtttgggaagtcaaaaatgtttccataagtacttataagtgaacactgacttcataaggaactagaatagtagtcatgcaccttacattttattaaagatcatggagagcttatgaacatgtcctggacaattttctacacagatactaaataccaaagttaaatcaggataagataaactaaacagtcccacaacccaaaaagaaatagaagtagtcattaaaagtctaccacaatacccccccccaaaaaaaataa

SEQ ID NO: 4299 - DNA, 1000 bp, mus musculus
ggcagacacacaggttcaaggagtggccagagcattgtgcacctctgttttactaaatcagtgaagctagttctgctaacactgatgtctatcttgccaatttcagggcttctgtgtccttttacattctgccaggatctttcacttactctttgtaataataatttatgccacatgttcacatgatgcttagagttaactggcttactttttgtgatacacactcatatcatattgataaaaatgtaattttacatgatttcatgatttacatgattgcaattaaaatttcttgatataaacaagattcttttactgaggctggactagctttactctgaataggacaatatctctttttctattttgtttagaggttcttacatacaaaaattgatttttaaagtgtgacatttgcaccagaggaccaatgctggctgtgtttcagacacacagcatctggggaccttgtagtttttcagacctaaatatagttttgaagccactgctttttcagaattctctagtttcgtttattagaaaataattgaagatgagaatttgcattgttttcatttttcatagttttcataaaccaattctttgggcaaaactgggaggaatttttatgataagccatcaacatcattgctgtataaggaaaacacatcaccttgtcctctttatttcacatgcaagagagagccccactcaagggaaatgtgtctgttgttcacactcttcctctacactcttggaaatatcatttaactttgagtgctcagtgtcacacctctgaaacttgctgagcttggcaatcctggcacgaatccttgacagcttgtcaggcctaaggcaaatgcatgtaatcttccctcccggtaattaataattaattattgttcattaatctgtaatgaatggtggtttggaacaatgtagcctcataaaaacgtgaaacaaaaatcattgttattttaaaaggcacattccagctgaa

SEQ ID NO: 4300 - DNA, 1000 bp, mus musculus
gtggcacaaatgtttggcaacaccccaaattgcattccagtgggatttagtgcccacttaacaagatgcatggagctgcaagagtcaacagcaatagaggtaacacccatggcacagtctaaactaggggctctcaacctgcaggtcgtggcccccttggggctgaacaactctttcacagaggacacatatctgatatcctacctataagatatttacattatgattcatagcagcaaaattacagttacgaagtaacaacaaaataattttatggttggggcagagggtcaccacagcataaagaactgtgttaaaaggtggaaggaagcattaggaaggttgagaaccattggtctgaacacttgcctgatctggaaaggcatcaaacatggttcccacgccatccttggagccgaacttggagaccttgaaaggccagatgacatcctgtggggggtggggtggggggaagccaccacaaagtactcctgcatcagaagcagataacttcccttcaaataactgcaagccaaggaaatagaatgagagagggtggcagtgaagcccactgcgactgaaacgtgatcaatgtcccctgcctgatgtctgcggacaggtgacactgtgaaagaagaaatattcacttttgcttcccggaaaccctgttcaaatgacagccaggagctcttaggtgggtgtccagacaaaagacaaagaagccgggaaagaaggtagtaacactttcggtgtttcatttgctttgcttttaaatgaagaatttcttaatattaaaaaaaaaagaagaagaacctatctactactattattttcttaattggaaattgccagaacatgatctgagaatggtgtcctgtgaggataattcagagtgtttgtaagaaaactccacgaaaccaagacaagagtcatatgaccttagtacctgcaatggtacatagttggtttggggataatcatgcttccatagcccctctaa

SEQ ID NO: 4301 - DNA, 1600 bp, mus musculus
atctatagcagtgaaattaagtcaatcaccagacactatgagtaaacaaatagatatttgatcatcaggtttctatatccttggtgtagtgctatatcatgtcacagtcacactgactagaaccagtttgttctcctataaaaattggtgaccagttaccaaactctcaaaggactattgtctactcctgctacatccactccagtagtgacaagcacaagaggcccccaaaacctgggtgctgtccagagactaaaagttcatggaaacttagtctcctggaaccatggtatcctgtataacgaatgctccaatatccttgctatagttggtaaatggatctgtgtgctttcccttaatattgctttattataagtgcttctaatgattgaacttttgacatataactcagttaggttcttcaccaatactaggcagtccttgagctgaccctgggcattcataggtaagctactgccctacacagcaatttaccattatctaggaaaaagggaaggttgtggtctagggaggaaccagagtagatacttagaacatagatagctgaactatacccatacacagaaatttacaatggcctatggggaaggtggactatacaatagactagaacaggaactatggcatgaagcccttgcccctgacttctaagattaagtggaccttaggtggagctgcttttgattcccatttgttaacattgaattttatcccagtttgttcctgcctttcctttgtaggcattcctctgttttgtgtcagatgtaccttgcctgctgtgatatctgactcctttgttttctatgttataaaactggtgttttctttgagacacattacattcaaatccacactcccttctgtcgcgtctgtttgtcacccctcattcccgccgactcaatgcccatctgctggaacccctgattcccacggattgagggggctgactaggcccgatccatggcctacccccacaccatatagtacacttgctttccttttgtatagttcaatgatttacttaaatttaatagatttttaagaatatgtcagtatgatttttctagatattatataattctaaaaaatacacaggagacctcaccataatctcattcaggaaataattaggtacaacattgtttgaagaatatcttaatatgaaatcaaaacacctacagggttgcagttccctttagctccttggataatttctctagctcctccattgggggccctgtgacccatccaatggctgactgtgagcatccacttctgtgtttgctaggccccggcctagtctcacaagagacagctacatctgggtcctttcagcaaaatcttgctagtgtatgcaatggtgtcagcatttggaagctgattatgggatggatctctggatatggcaatcactagatggtccatcctttcgtcacagctccaaattttgtctctgtaactccttccatgggtgttttgttcccatttctaagaaggggcaaagtgtccacactttggtcttcattcttcttgagtttcatgcgtttagcaaattatatgtatcaaaagatggcctagt

SEQ ID NO: 4302 - DNA, 1200 bp, mus musculus
atatatatgatagactcacagctaatagcatcatgagtcaaagaacatttaatacaaaaatatttaaaccaggaaagagacagtcacctattccaattcctcatcaatataatgatcaaagcaataactaaataaaagcaatagaaggaaaataaagaaatgcaaataggaggatctgtacccatagggccaccccccacacacacacacacaccatcttccttctaagtccagcagaggccattaagggctccagagtgctctccatgcagcaggacattgagatcacctcgggttcacaggtgagtggaaaacaacatcagctccaaagaattgtggagggtcttgtgccagcaggaacatggaaaagggaacactgcccaaccagagactgggatccattcaggccagggacagccccgccatcttatgtgtgaaccaggctgagggcatctagggcaccagaggactcccactcctcagaaccctagcacacccaggacctcctgatcacctgagagcatgtgggcaatagaagcaacacagcttcttggtcagggtcctgtcagaccctcaccctcagccaggaggcagagctaagacccagactcctggacacattccttgcaagaggagtgtcagcctacaggacgagttctgacctcagaactcaggaggtggatcagacctccagactgctggacacctgccctgaaagaggacagcttgcctgcagagagtgctctgaccattggaactcaggagagagttggactcccaggagtgctgacagaggctaaaagaatcacaggagaatcaaactctaaccagagacagcttgaaaattaacaccagagatttccagatggagaaaggcaaatgtaagaatcttactaacagaaaccaagaacactgggcatcatcagaacccagtatgaacatcacaagtcctggatacccaaacacaaccgaaaagcaggacacagatttgaaatcatatctcatgatggtgatagattattttaagaagggcattaataactcacttaaagaaatataggagaacactgctaaacaggtagaagcccttaaagaggaagctcaaaaatcccccaaggaattgcaggagaatactgctaaacaggtagaagtacttaaagaactacaggcaaactctgctaagcaggtagaaaacacaca

SEQ ID NO: 4303 - DNA, 1000 bp, mus musculus
tgccacacccactccagtggagtctatgtgacaagtccaaaagcttggccgcagtcctgaggcaaaatgtttcatggaaactggaggccttggcatcctgtaacacagatgtgtttcagatttgtccctgtgatagtaggtggagggtcttgtgtgctttccttcagtattgttttattataggtgcccccaaggaataattcgacttattcagacaaaatgcctctagtgttgaaagagagatagtgaaagaaatcaggcattgcagtttactggataagagtagaaatctcagggcaagttctacaaagtaaatttagaattctcattacagtcaggtatggcagactacataatagaagaaagttggtgggctcctctgataaatggaggttcaccacagatgtttaaaacaacagctaactcactcccatatgcaggaatttacaatggtctaggaagaaggtgggttgtgttttaaggaagaactacagtattgcgttattcatgaaaatgctagcaagagcagaacccccctgctgcaagttttcacaaggctcagaggaatagcataataaggtgcttactaaggaacacttgtgatcctcacctggctcctagaatagctgactttagatagggcctcttttatctcagttgtaatcactgcctggttcctttcagtctttatgtatgcatttctctgttttgtgtcattatgcataagatgacttcaatgtactttggctgatcatctaatgtccttgttttcttctataatgtaagtctgatgctcactttgagaaattacattcagattccacactttcttgtgtttgtgtctatttgttgcttgccaatttcttgcctgcctgagtaccaggaccctgatttctcccccaggttgagggaccaactgtgtccagcccctggcacagagaggggtgtgttatgttatatcctacagaactatcttctcagacagcaagtggatgaaaga

SEQ ID NO: 4304 - DNA, 1000 bp, mus musculus
ttttatttattttatttttccaggaagatctctggccaggcctgttatgagggttcagggaagcgaagcaaatgcaggcaggggcagggaggggaagttacttccctgcttccactagggcatttggctccaccttggtctctgccatggctgtaattctgtgctaccctgcactgagtcgggtcgggctgggcctagaagaagcctactagccggtgaggagtgtggcagagcctcaggccacgtgcttcaggagagatgaactcttcccaagtgttgaagcaaaggctatgacgggattagttcttgcacacctttactccctggatcaaatttacatacagtttgggggatgattcagggtttgacagcaggtatttctcattagcttggacttagagtttggggaaaccttattgcatgtgggagggcttgatgcagctactacctgattgattcctcagagctctcggtaaaggggctgtgggaggctatagctacaggacaggagccaggtgcccaggaggcatggccgaactcctgctgtcccaagcaggtggaaatctctgcccgccagggctctgaggttccagacttatgctccaccaggctatctgtgcacagcccaccactccacataccaggtgcatagattttaattctttcataactttttcatcattgtcaatatgtaacaatttaaataaattagcatatatatgtgtgatggatagttttatgttaacttgacacaagctagagataatttaaaagaaggacactcaatatagaaaatgcctccataagacccaattctcaatcatttgcttagttagtgactgagattccatcccactatgaatagggccacctatagactgatagttctgcggactataagaaagcagactgtgcaaatcccagagaaggaagccagtaagcagcacccctttgcattagcttctgcctcccgggttctcttctgcttgagttactgtcc

SEQ ID NO: 4305 - DNA, 1400 bp, mus musculus
ccgattaggccatcttttgatacatatgcagctagagacacgagctctggggtactggttatttcataatgttgttccacctatagggtacagagctacacatcaattctatagttcaaagttaacacaaagaccttgaagagttcaacacaccaaggtctaaaacaatgcttgaattttcacaaagccagaagtaagggtatctggcaaaatatagctattaaaaatgccgtttcttgtgaatttattccattctataatttaagaaactgtaggatacaaatgtgtctgtgtcttgacagttacttcaagatgaaatgcccaagtgaggaggcctcagtcccacttgggagagagaagcaagcaatcacaagtggagagggaacaaggaacctaggagggaaaggggacaggaggcaggagagaggtggggagaggggaacctgatctagtaatggctgagggaaaaggactgaagccctgagggccagcagaaagaatggaaactggcagcctcaggaggtaagaggttggggaaccctccagaatgcactagagacctgggaggtgagagactctcaggactcaaagagtgggaccttagatgaactgcctgtcagtagggagagggaacttatagagcccacctccagcaggaagacggggcatcaaatgagggaggtggaggcatcccacagtcacaactctgacccataattgttcttgtctgaaggaatacagggatggaaatggaggggagcctgaggaaaagaaggtacagcgacaggccaaaagaggcctgacattattactgaggcaatggagcactcataaaaagtgacctagcatgactgcactctggaaaccccaacaagtagctgaaagagttagagtcaggcagttgcacccaacgaatggacagaagcagctgaaccctgtggttgaattagggatggctgaatgaagaggaggagtatgaccttgtaggaggaccagcagtctcaatctgaacccctgagatctctcaaacactggaccaccaaccaggcagcttacaccagctgccatgaggcccccaacacacatacagtagaggatttctgggtctgtattcattcagcaatgatgcacctaacccttaagagactggaggtcccagagagtttacaggtctggtggggtgggagttggggaaatccacgtggagacagcggagtggggaggaggtataggatgtggagtagaagaagggtggatggggcagggggaataaaatatggagtgtaaaattaataattagttaattattttaaaaacttattttaattcttgttcattgtctgcttttagctcttcttcatgctttgctaattaacctttctttacttttttcacattat

SEQ ID NO: 4306 - DNA, 1600 bp, mus musculus
gattcaactggagttaccagtctttccttaataactatatcttccacaagtagattcatatactcagatacctgaaggttgaaggaggggagaggaacaggacctagaaggaagattaatataaatataaaattgctgctttatttttttagcattgaacacacaataaaagctctattttccaggtttattctcacttaggtgagtggcatgttatttttgagtttttatgacttcacctttcattattaagaaagtaatccagctggctatataggagataaatgcaattataaagacattagccaactactccttcgggaaaaagcaaaggatttgctgtaatatataatttaaagaacttgcaaaatatacatagtagagtactgtgtgaaagcgagatcagcaaaaattggtgtctaccacattcaaagcagaagatgcattcaagcaaacaatatatctgaaattcactgaagtatcacagcagtgataaccacaacgaccatttcccacgaattaaatgactcgttttcttgttttttgttaggaaattattggaatcctatgcttcataattaggtcatatgtgaagccataccaggagtcaaatataattccagaagttgatgagcaaatgtgccttgcagccatcttgccttcagcttatctggacctgacactgatgctgcgtgccatgcacattgtgccagagaaatgatttcacaagaagacagttgtgttgtcagtctgtttccaaaatgtgatcttggctaaacagatgtttttcctgaatatctaccactcaattccactggatatatatttgctttagatgaattttcagtttccggtgtttgattaaaaaaaaaaaaatcttggaaaagaaagttttttagggttactaaacaaggtaatggaaatactgcataaagagaattggaataaaactcagctaaggtctgttgaattcagcgtcattttcctaattggaaaacacagtttttaataataccacatattttagattcctgagactttaatcatcaatttcagcttagcgatgccatgtcaatgtgacactcaaggacttttatatttccgtgatttctcctattctcaccccctttcacaggaaagccaatgtggtttttcctattatcacatatatcattgaatgcacatattttccttgtggacaaaatttatatataattaacagaagaaagcttgtttgttttttctgcaaaatcagagagtgacaaggaataatacattgatcactgcttatcaattaacataatattaatatactcaagtttagcctggatttgaaagactaatttgttaaaatattactttcaattcaataatattgatagaattttgaaaatagttccctaaggatattcaattagttatgacctcttaaaaatttgaaagatatattactttaatatataaagaacattcttaacattttggaattccattctgttgtttataatttagtcaaaaatctaaaaagggtcaaaattttaaggtaatttaggaatacattttctttcttctgtacacaaattacaaagaaactaatata

SEQ ID NO: 4307 - DNA, 1600 bp, mus musculus
taagtgtatagtaatgaattattcttgtatgttcctatctcttttgttgggaaagatactggatattgacttttccactttctactattgatctatatcctcaggcctttgtttatagcttttgagagccagtcttatcagattgttgagctatatgggaggttatccattacccaatatagttcttaaacctatgatctccttcttcagcttcaaggaatattgaaactactgagtacatccacagtaccaggcttatatttcttatactgatgtttcccttccatgttaattactttaggatgaagagaggagggatgtaggaaaaaaggtggtagcatcagttatgggaggagacagggaagatatacagaaggtcaggaatttgaacagaggtgtgtaacaatgggggatggggaactggagtagctaccagcaagtccaagatgccaggaaagcaataggctcacaggtcccaacagggatgaaatgtgcaacaaaggaaaggaagaacctgtagagaatatatccagtggttaggcaaggtccgccgttgggggatggggccactcactcatctccaaatctgttacccagactggctcctgtctaaaagaaatacggagacaaagagtggagcagagactgaaagaaaggtcatccagagaatgccccacctggggatccatcccacatgcagacatgaaacccagttacctttgctgataccaagaagtacttgctgacaggagcctgttatagctgtctcctgagaggctctaccacagcctgaaaaatacagaggcagatgcttgcagcagccaaccattagactgagcactggtccccaactgaggagttagagaaacgattgaagaagctgaaggggtttgtaaccccataggaagaatatcaatatcaatcaaccagaccccccagagctcctagggaataaaccatcaaccaaaaagtacacatggagagacccatggctccagctgcatacatagctgaggatgacgtggtctggcatcaataggaggggaggcccttgatcctgtgaagggtggatgccccagtgtaggggaattccagggcagagaggtgggagtgggtgggtaggaggaggagcacccacatagaagcaggggaagaggggatggaataggggttttctggaggggaaactggaaaaggggataacaattgaaatgcaaatacataaaatagccaataaaaaaggataagacagagaacataattgatagaaagtcacttaaaaattctccaagagtgctgatatgaattatctaaaatgtacagaaaattctgatgtgctctgaagatgttccaccagttatgaatactctaagcacaataggaaatgtgtggcatttatttggcctccatagtgctatgttaagcactatcaatgtggctgaaaacatttaaagtattttataacctcactaaatttctattaattttcacatagttttgtataaattcaaattttaatgcaattttttgtttcatattgtgtcacagtgtcctatgaattgcatacaaaattttattcaaattttattacatgcattta

SEQ ID NO: 4308 - DNA, 1000 bp, mus musculus
cagacactattgtggatggcgactactgcttgctgacaggaccctgatagctgtctcctgagaggctctgccagtgactgacaaatacaaaagtggatgctcacagccatccatgggacagaacaaagggtctctaatggaagagctagagaaaatatccaaggagttgagggatttgcagctccataggaggaacagcaatatcaaccaactagtaactctagagctcccagggtttaaactaccgaccaaagagtacacatggagggacccatggctccagccacatatatagcagaggatgaccttgtgggacatcaaagacaggagaggtccttggacctgtgaaggctctatgccccagtgtaggggaatgccaggccagggaagcaggagttggtgggttagtgagcaggaggaatgaggatgggatggggtgctttcagaagagaaacaaggaaaggggataacatttgaaatgtaaataaagaaaatatctaataaaaaagaaaagaaaatcctgtacaggtattaaaaaaaaattactgatttctgaaagacccatcaccagctagagttagatgcagatatttacactcagccaataaacagaagctgctgaccgttgtgattgaattagggaaatgctggaagaagctgaggaggaagacaaccctgtaggaggaccagccatctcaattaaactatatctccagcctccaaggtctctcaaatactggccaccaaccaggtagcatacaccagttgatttgaggcctcaaacacatatacagctgaggactgccaggtttggactcagagaagatgtatgtaacactcaaaagattttaggccccagggacaagggaggtctggtgggctggagtgtacaggagtggggacatccttgtagatattgggggagatggtacaggaggtgaaacattcagaaggtagactgggagggggataaaaactggaatgtaaaataaaaagatta

SEQ ID NO: 4309 - DNA, 1000 bp, mus musculus
gctgttaatgtctgtggggcattgggctatgcacagacaggcaggtctccagttgagctgaggtctgaaccctgaagggtgataattcaccttcatgacatggtaggcattccctcatgctcctggaactctggctcctgcctaagttaccaccccccacccccagcccctacaagagaagcatggtcagtagtcatataggcaatggcccaagcttctgaccttcaggctaaactcctccccagttacctagcaacagtaaagaccataaaaggggctgttaggcctccacctccgcacctcactctcttacctcttactctcttacttgtcgctcttacttctactctattgcctcttacccctcactctcacccactgtctcctctctctttgtcttctctcctctctcctctctctttgtcttctcctcttctctctcctctcctctctccctcttgctctctctttctctctagcctttcctctctctctctctctctctctctctctctctctctctctttctctcaccatctctctttctccctgcctttctataataaagctctaaaaccatagacagtctctgctcatcaaggttgtactcactctcatcagtgttaggaacctcttcccactctcaaacctctctcccataactctggtagctttagcaaagtaactcctggactcccaggaaggcctgccccttgccacccctccaagagtgggtcagaggcttagatgccctcccaggggtgagtggaaggtagatagcagccctcccacgcctgacagaccagagaataggtaaaattctggcagggtgtgggtcttcccctacactcttttcccttgggcctcctttttagttcccaacaaatgtcttctttatttcctctgatgaatagatgagataagagccatactaaagctggatgaatacatggcttgggctgagcacatgatgttgctttttctcttctaactattccta

SEQ ID NO: 4310 - DNA, 1600 bp, mus musculus
aggcatctcttccttaagtttgggaagttttcttttaagacttcgttgagagtattttctggacctttgacccttttttttttttcctctccttactctattcctattatttgtagatttgctcttctcatagtgtcacagatttcctggacgtttctgctacattctacactttttagatttaacatttctttgatccatgtatctacttcttctggcttgccctcaatggctgagattctctcttccatctctgacattctgttttttggggcttacctttgaggctctagcttgagttccttaattttccacctcgagtttccccccaattttggcttttcttattgattctattttagttttcatatcttgaatagttttcttcttcatttcatttcactgtgtgtgtgtgtgtgtgttttcattgattttatttcacttatagaattattaacatcctcctgctggtcactgatagctattttgaagttctcttgtttttcagctgtattgcatttttcagagactatcaaaagtaaagttcctgggcttttgtggagaaatattctcatccttgttattgattgtgtttttatgctgtggtctagacattgggtatggggattattgtaattctttttgttgatatatgttcttgttgttgggtacatttttggtcatttagtttctgattttctctctgtattttaaaagagttgatggttacatgttgcatagtatgaagtgttcctaagtccctgtcctgtatacaatcttacagtcagcagtagtacttgtttctagtttatgggagttataacacaggaatggaaatgagttagaagtgcagcgagtgagagggtccgcatgaggaaggaaagccaggtctgccatgatgatctgattgcctgtaaagcattgctagcaggtgtccaggaacagtgcctatgatgttggtgggtgacacaaagagatgtggtgaggaaaggaaattgtaggaaagatctgcttctgaagacagcagcttttataagtgatggcaattcaaactcatatcagtggaatgaactcccacaagcattgctaaattatttgctatgttattcatctctatgtgaatgtacctgcagcatcaaaatcatctttgcaatattctttacaaaagaaactgtgaagccctgttcatgaatcttgaaagtagactaatgctaaaatagcatcaaaattagattaagatatcactttaagagaaatttaggtaatgaactaaaactttaccattttttatataaatatacattttaaaatgttaaattcctattgtcataattgtattacttcatatttttgtattacatgaaaaatcattctactcccttattaaaatctctaattagtttattaatgaataaataaagatatatagttcattagtgtcattctcttggtgatgcaatctgactcttagttttcctgtgtttctttattaagtggaaaatctctctcctggatgaacacatttgtaaataagtaataccatgtaagaaattacctgaccattgctttcatcaaatcatcctcctaatctcttccaaca

SEQ ID NO: 4311 - DNA, 1200 bp, mus musculus
gtcttaacagtttaaaatgtggaggcaggaggataacgatttcattcaagttctagtaagaaaataagtaagaaaacaagacaatcctgagcaactttttggaacctggtttaaaagaaaaataggatatagagcagtatcagaccaactgcctaactacctaacaactatcatttatgaggccatggattcaattcctggaaccacgataaattaataaccttcaaatatagatattgttgttaaggaaacaataatatgaactatgtgccaatctcatataaagacaattggccctatttaaggctctttgccccagtgtaaggaaatgccagggccaggaagcaagagtggatgggttgatgagcagggtggggcagggatagggggcttacagaggggaaaccaggaaagggataacatttgaaatgtaaataaagaaaatatctaataaaaaattttttaaaggtgaataatttaagtatataaaaaattttaaaaagcaatgaaaaaataatatgagaaattataggttaataaattgcataattaaaaaatatcaataaacctcgttggaactgactcgtttagaagtacatattctaaatatatttattatatactatgagaatgaaagaaaaataatcatttaaatgaactgaaaaacataaatgaacatgaaaatatctaatattccacaattataaaaagtttaaaaataagtataagggatttctttagcccaagaatgatggttacattataatggtgaaagattgaatgttgctttcaaatatatccatttgcagaaaatttatttgtagtttttttaagatttatttatttattatatgtaagtacactgtagctgttttcagacacaccagaagaagccattagatcccattactgatggctgtgagccaccatctggttgctgagatttgaactcaggaccttcagaagagcagtcagtgctcttaaccactgagccatccctctagtcttgcagaaacacttatatctgtaccaaaatctttagcaagtatacctagtcatactaaaatcaatggaagaatgtataatatacgccgaatgcaacaagagtgtaaaaacatggcatttataaattggttctgattgcttttaatataagatattctgagaatacaactaatattaatgtatatgtcaaattgt

SEQ ID NO: 4312 - DNA, 1400 bp, mus musculus
atataatgatgacaaaatttaaaagctattatatcttatattaaataatgaaaaactaactagtaaattaactaaatatatgtactgtattgtgctgggaattgatctctggtcgtcttcaaggttagaaaatgcctttagccactgatctattaattcagcctctatttagaagattgcagtatttatttccatatttgaaatttctaataacaattgcagagatcaatcagcagagcacttgctgtagagacctgagaacctgcaggcagatggccagcagctaggtaaatattcattgtgtccatatgtacctgtaactacagtgctgtggaagaagaggcagagagacaggatcaccacatcaagttcctgtttccaagatacagcatctcaaggcattaaggcactgcagaccaggaacaagtacaagatatccccttctggcttccacagatgtacatatcagcacacacacacacacacacacacacacacacacacacacacacacacacacacacacacatacactttgatacacatgtatataccacactcatacccaccccaaaaccccatttttaccccccccacacacacagagatagaaagaaagaaagaaagaaagaaagaaagaaagaaagaaagaaagaaagaaagaaagaaagaaagaaagaaagaaagaaagattttataaaatattctgataaaaatcgccaaataacgtatttgggaataagttagattttcttttacttgtttgagccacatggagcgcacagccatctccctcccttaccatattttttatgtaatgtggtttatagagcaaaaattcctcaacatttctgtctacctgctatgtgttatggatatgattcttccccgcagcccgtctgtcttttcacctgctctttaaatttaggtttgaccactcaaatgccttaatcccaaaagtcttccagagcaccgttattccctaacactattccgatgctcatactttttgtaactggttaccaaagaaatgcagttacacacacttctgtgcaattcacttatgcaatcagtacagcaaccgactcaggacccagagaacactcaggatttttccctccagacctgagtgtctgtagtaactctactaatctgttatcaaatcattcaactctgtctgatctagttaataagtcctccccttcttttaactcctgccttactaccttgcattccatacgttacatttctcccctaaactgtacaaatgtccttaagtaaggcaccaatcccaacattcttttgtgactttatccatttccctcttacaatctgaatctgaagacatgaatatggcagttcacatcacaggggaaatacacattaacttacagttttct

SEQ ID NO: 4313 - DNA, 1000 bp, mus musculus
ataggccttaaaagtaatttgatatagaaataatgtcagtagcaaacaaagaaaattgattttttccagttttggtctaaaaatcttttatctttttatatttttaaattcactttacacctctatcactgtgcccactccaggtttaccctcccacagtctctcccctgtcttctctccccttctcttatgagaaagtggaggcctcatctggttatccccccattatggcacatcttatctctgcagaagaggccaatcaagacatcacagatgggcaacacccttagggatagacgttgctagtttttcaggacttacataaaaaccaaactgcacatctgctacatatgtgccagggcctgggtccagcctgtgtgtgctctttggtttgtggttccatctctgagaggccctaggatccaggatagatgactcttttggtctttttgtggcattcctctcccctctgtggctcttagttcttctaactcccccataagaatccctaagctctgtccaatgtctggctgtcggtctctgcatctgtctgagtcagctgctgggtggagcctttcagaggacagacatgttagactccagtcttgcaagcatactagaatatcattaatagtgtcatggatttcttcatgtgttagaattagagttcaagtcactccaatacctcctaaatagatagggatcagggttatattattgatgctatttactgaagaactttcctggatccatggttgatcatgagtgtgctcataatctaaggtagacagatcagagctgaacacatccttccaaaattgttcacagttttgagatttatctgttcacgtttcctatcattgagtttgcttgtaatcaaagctaagataaaaagtagttgatgctgtttcattttaagaagtgttttttaactttaaaagtttatgtgtttgaaactgcagattgcattttagatcatgttatgtgtaatgctgaaaaa

SEQ ID NO: 4314 - DNA, 1600 bp, mus musculus
acattaaaagcatggatcctgtgaaatagaaaaacagttcatggtaccttctttaggtatctcccaagatgatattcagtattcaaaggagattatataccttcataagttacaattatttaaggattccaagatattaaaaggaaaatgactttcatagtcaatgaattaatgctacactaaaatgtaggtgtatttaaccatttattagcatgattaaattataaaatgtcatttttatagggctatgttctattacttgtgaaactgggtgctgatctgatagcttgattcagagtgtgaaaagaaacttatgaaaaggttaaatgggagagagaactggtggaggagatctgttgtctcacaaaacctgtgtaagtccccgcaaagttttcacatgtgttgtagagttcacctactacattgtgattatgcagaaaataaagcaactggagtggatttgttccagttaatttgttatacggtttttatttgttatggtgagagacaaaaaggtcttaacgaattaaagcaaagcttctctttgttcagccattgaaaaatcattaagcagggcttaagacataaaagaaagcccgtgtgcctgtccacttctaaacagtgaagaagacaaatgaagagctgccttcaaatctgaagcgctctcaaatactccctcatggaaataaataatagaaatagaactttaagttcgtggtcagaacagccacccttgtgtgagctgttcccaatgatttcatctgcatttagctctttctgtttgcttagcatccacccttgtcacagccacacagccacacagccttctgcaaagaaggctttatctgtatcccaagcttctagaacataataaaggagcaagctcttctgcacaaagcccccttgagttctttaaattgctttttgacaaagggagaatgacacgaagaactccataaagaacagaagcaaattttcatgctgtgaaattcaaatgttaatgtactcattcctagaattatcatcattatgtattcaggtataccctgtactattttgggggtatagtccagtatgtcttggccactaaacatctttgaaagatgatttacaatttcttagaaaaaaaaacattaaaattttatatttcacatgttagacagggaatgagaagaaaacaattataatcaaatagtgaggaagcttagctttgcacctccactctgatcattttatactactatccatttttctatttctggaaagacagaaacacctttattatgtatattttcaagataatctgaaaattaaaaaaaaaaatctaagcaatccaggaattagtgagattgccaggtagtttggaggtactgcctcaattactaaaaactgtatgatcgatgcagctacttgatatatcatacttaaaagaaacactatcaaacaaaataattactttgcaaactattgttttatatttattttttaattattacatatgatttgaaatatgaaaattatgagcctaggctgtgagttgaaaatatcacaatgttttttatctgtttccttataaacttaaacttcacaaaatatactg

SEQ ID NO: 4315 - DNA, 1400 bp, mus musculus
attttagatatttatgtgactctttatcaggtaatttgtccccaaattctgcatgaaatatttcatcatctattgaagttaagtattggtgattttatagaaacttggcatgaaagttgctttaaggtaaagcccatggaactcaatacttcaggatctactaagacttacacttcatattgtattagaaaatcttgtctccttcacagtaagtcccagtctagtggtcttagcctgcttactaggttagcaacaatgaatactgagggatatgttggaggtcctgagctttcttcctcaaactattttaataggctggggattattccatgatgattttcatttatttatttatttataatctattttttttatccagactttgtttccttccctgtccaccctctgactgttccacatcccatacctcctttatcccacccccatctccaaggggatgctcccaacccctaccctatcagattttcccactccctggggcttcaagtcttttgagggttagtggccacttctttcattgagtccagaccctgcagtcctctgctttatatgtcttgagggcctcatatcagctggtgtatataccgagcttttgtccccgccagcaagaacacactcaggacaaccagaatcttctgcggaaaaagctttattgcttacttctcaggaagaccccgacctcagaaaatggagtctcttatatagccctcagccatggtgtttcagcacctgatatggcatgtcagctcctgatttgttgctcacccatcaccccattactaagccctgagatgggcagtgactaggagtgagttcactctcgcacctgcgtacaaggcttgtttactagttaggcacggaggccagcgccatcttataatggcgattgctcgctgctcgtgattgctcgaggcacagctctccaaaggtgtatgttgcctggttggtggctcattgtcagagagatcctggggaccaggatagagactgctggtcttcctatagggttgccttcctcccctgcttcttccagagccaagattctaacacacacacacacacacacacacacgcaagatgttattttaaatatatcttgttcatttctatctataagactaacaaggcacttcagttttagaacatattatatattgtgaatttcaatttaattcaaatttcacttatggatgaataggatagtggtttagtttgtttattagtatagatactgcatagaggatacttttgtagttggaggaggatgtcaccgctttagtatgatcagtatgggttttagttttcttacccaaaatatcattgactagtttttgtttcagagtaaaattcccttcatagaaagaattactagttacttt

SEQ ID NO: 4316 - DNA, 1200 bp, mus musculus
gattaaagggtttgccattaagagctagatcagaaaagtactcacttcggcagatagacattatataaaatgtagccacataaaaggaaaaagagtagaatgtaaatggtgataatctagaacaagatgaaagttagaattggagtattaaagtgagatgacaactatagtttataactgtgagtagttaataaatgctgaataaattacatgaacaacctacataaatggttaatgatttttattctcaaattccaaaaaacgggcctactactatagctatagtagttagatatgataaggcgatttcaggttctcatgatttctgggaaactttgaattatgttggtgggatatagaatgagtctgtgatgaccacgtttaaaagttattgaccctcttcctgtaagcggccggaggtgacctgtgaagatggttcactactcccttgacccagaaaatcccacaaaatcatgcaaatcaagaggttcaaacctccgtgctcactttaagaacacccgggaaactgcccaggccatcaagggtatgcatatcctcaaagccaccaagtatctgaaggatgtcactttaaagaagcaatgtgtgccattctggcggtataatggtggagtcagtaggtgcgcccaggcaaaaaagagtgctgaatttttgctgcacatgcttaaaaatgcaaagagtaatttgaacttaagggtttagacgtagattctctagtcattaaacacatccaggtgaacacagaacctaagatgcgccgacgaacccacagagctcatggccagattaacccatacgtgagctccccctgccacagtgagacgatcctcactgagaaggaacagatcgttccaaagccagaagaggaggttgcacagaagaaaaccatatcccagaagaaactgaagaaacaaaaactcatggcacacaaatgaattcagcataaaataaatgcagataaaagtaaaaaagaaaaaagttattgaccagcctctttagtcctatttctactgtaaaactcaactttgtgtggatattagaaagttaagatggcttattatgatgcatcccaagtctcataagaagaagtctctaaaaccaaatatcattccatcctcatattttcagtgcctagtaccatgctagtatcattgtaaatgaagactcaacaaccctttgcta

SEQ ID NO: 4317 - DNA, 1200 bp, mus musculus
cattaaaatagatgaccattggggtggggtgttatttcaccaaaatcataagaaataaaagaaacagataacagatactatatgaacttgaaattttgattttatattgtagaatactcaaaatacagagaaatgatgtacagaattggagaaaatacctttaaaaggattgggagcagagactgaaggaaaggccagggactgacccacctagggatccatctcacctgcagactacaaaacccagacattattcctgatgccaagaagcacttgctgacaggagcctggtacagctgcctcccaagaggctttgccagagcttgaccaatatagatgcagacacttgagccaaccatcggacagagcacatgggacacaatgaaggagttagggaaaggaatgaagtagctgaaagggatttgcaactccataggaagaacaataatatcaaccaaccagaccccatagagttcccagggaataaaccatcaaccaaagagtgaacatggagagacccatggctccagctgcatatatagcagaggactgtcttttctggcattagtgggacaggaggcctttggtcctgtgaaggctagatgccccagtataggggaatgctaggacagtgagataagagttggtaggagggtgggggatctccctcatagaagaatggaggagggggatggaatagggagtttgtggaggggaaaccaggaagggagaataacatatgaaatgtatataaataaagcaaacaattaaaaaaaggaaaaagaaaggattggcatccaggtattgtgttataataaggttatgaaaatataataatttttggctgtgagcctagcttttaacgaaagagccatctctccagagtgggtgggtaggggaagagggcagagggagggtatagggagcttttgggatagcatttgaaatgtatataaagaaaatatctaaaaaataaatgaataaaaaaaaaagaatgttgaacatagctttaagagcttctcaaactgggaaggcagtaccatttgaaatgtaaataaacaaaataaccaaaattttttttaatttaaaaaagaaaatataagaaaatataaaaatataaataacttaaaaggatctgatggtgttttggatttcttcaagatctgttgttatgtctcccttttcattcctgattttgtt

SEQ ID NO: 4318 - DNA, 1000 bp, mus musculus
gctacatatgcagctagagacatgaactctggggatactcgttagttcatattgttgttcctcctatagggttgcagaccccttcagctccttgggtgctctctctagcttctccattgggggccctgtgttccatctattagatgactgtgggcgtccacgtctgtatttgccaggcactggcatagcctcatacgagacagctaagcagcagaactactgctgcagtattctgctaggtttccactgcctgtaaattctaagcacattgtttctgcagtctcttcagagggtagcagtttctccacaggtttcctttgacccttgcagcagtacacaagtcaaaccataactcacctgtgtccaccagcagcatttccttctactacagtttgctccctgataggcttctctgtgctccatttttattttgtataaaatacccttaaaataatggtttgtttgtttcttctttctttctttctttcttttgaaattttttattagatatttatttacatttcaaatgttaaccctttcctggtttacactccgcaaaagccctatctcatctcccatcccccatccctcaccctgcttctatgatggtgttcccacatccatctaccaactcccactttcccatcctggcattgtcctacactggggcatcaagccttcagagtaccaagggcctctgctctcagtgatgcccaacaagtgatgcccgctgctacatatcatgggttgctctatgtgtactcttttggttggtggtttagtccctgggagctctggggggtctggttggttcatattgttgttcctcctattggactgcaaaccccttcaaggactccatcagtcctttctctaactccttcactgtgaaccccatgctcagtcaaatggttgcctgaaagccaacctctgcatttgtcaagttctggcagagcctctcaggagacagctatatcaacctcctgttagtaagcacttc

SEQ ID NO: 4319 - DNA, 1200 bp, mus musculus
tcccttcaggtccttgggtactttctctagctccttcactgggggccctgtgatccatccaatagctgactgtgagcatccacttctgcgtttgctaggccccggcatagtctcacaagagacagctgtatcagggtcatttcagcaaaatcttgctaatgtatgcaatggtgtcagcgtttggaggctgattatgggatggatccctggatatggcagtctctagatggtccattcttttgtatcagcttcaaactttgtctctgtaactccttaccctggagctcttgactctagctgcatatgtatcaaaagatggccttgtcggccatcactggaaagaggtccattggacatgcaaactttatatgccccagtacaggggaacgccagggccaaaagtgggagtgggtgggtaggggagtgggggggaggggacttttgggatagcattggaaatgtaaatgaggaaaatacctaataaaaatattttaaaaaaagaagtaagcaacaatagaagctgtattttatggttttccttaagtatattttcatatttctatatttcacatttctgtttactttgcctaggaatttggtgggccagagacacctgtttaccttggaaatgaaatggaattatttaatagaaataaaaaacatggaaaaaaacttaaaagaaatggcttgtggatcaaagaaaacgtttaaaaaacacggagtgacttagtgtatatgctactgggacatacaaaactgagactacaaactgaccaccagatttaacaacgtgatgatgaaagaccctcgtttcggggaggctctcactcaagtcccgggatgagccaacacctcaataactcgagagaaacaatttttgatgtgatattgcatgaggtttattcagaaatcagcatgttgaggccgagctcgtaacctgcaccggggcagaggagatcgacccccaacagttgcattagagggtttttaaagaataaacagtaaagcgaggggaggataagatcacaaagactaggtaagttgagtgaacgtcgtaaaaatgaggatggtggattacagctcatctctcacggaaaggttacaggctatctttggcaaacattcttggtcccttacactatgggtcaggcacctgggtgggtcacccagtggtcatcattctctcaggatgaaggcgaa

SEQ ID NO: 4320 - DNA, 1000 bp, mus musculus
taccctgctgagcttccagggttttgaatcctaaaaacagcatgtcaagaaggttatagatcttgtgtccccagtccctatgagaccagtctgagcaggtgagcgcatggactgtggagggtgagggagcagactgcagaagctacacagcttctggaacagaccccatttcaggctccagatatccagggaccttccccgccagaggagaggtggccgcctggaagggctctgactgccagagcaggtgagggaggggtcttgtgtagcctgtccctctgagaccagtctgctcaggtgagcatgtggactgagaaaggtgagcaagtggactgcagaagcaacacagcttctgggacagacgctgtttcaggctctagacatccgggcaccttcccctccagaggagaggtggccacctgggagggctccgaccaccagagtaagtaagggagctatctagtgtcccaggtccatgggagaccagtctatgcaggtgagtgctcagacttcagaggaaacacatcttctgggacaggccctgtttgggccttcatcttcagccaggaggtaggtctgaatgccagacctctgtgcaccttccctgcaagaggagagcttgcctgcagagagtactctgaccactgagactcaggagagagctggaatcccaggactactgacacaggctaacagaatcacgagaagaataagctccagccagagacaattttaacaactaatgccagagattaccagatggtgaaaggcaaacgtaagtatcctactaacagaaaccaagacgactcaccatcatcagaacccagcactcccacctcaaacagtcctggataccccaacacacccaaaagataagattaagatttaaaatcatatctcatgatgctggtagaggacttaaagaaggaaattaataaatcacttaaagaaatccaggagaacactgctaaataggtagaagtccttaaagaggaaacac

SEQ ID NO: 4321 - DNA, 1000 bp, mus musculus
tgaatctgtcatatcttcattctcttctgtaggtcagtatcatggtccctgaaggtgagctggtaggatatcaaatattccctttggtccctgtgaccattcctactattagactgtcctttcttcctgttttccacaattgtatgatcatacttcataataatcaaaggtatccaagtgatcccagtctctagcctcaactctcaagtgcacgcacatcacatagtgtgaagaatctgcactaaatggttaagagattctttcttttcagtaggatgacttgtttttgtttttgttttgttctgttgggagggggggggcggagttgagacagagtttctctgtggcatgctctaccatgcctggctcagtttggcttggttgttcttacacctgagctcttgtcactttgttccatgctaattaattccttcctctctttcgtccttttatttcatctctgtggcttcagaagcctgccaggaatgccccctttaaattagcagccatggccataccttacactggatctgcatagtgcctaacaccatgatcactgctcaatttatggtcttcattagactacagagcacatgaaggaagaagcactcctgcctggcttaggactatgccttgggagttagggcacttcagagtggacaatatcccatactgtgtagcttggtagacgaggcagtcagctggctgtttggatggcaggatgattcaccatgattggctcataaaacaaattgagagccctgcttgctgaaagcagataactgcatccgaggcataatacttagaagcatctggccctgaaggagtctgatttgtatatccaattttagtcagtgacagaagaagcagccacactagcagagaagacttaggtactaatacaatagagattacagagctctgaaggagaaaaatgttcttaagcacaaagatgtcctgatgttcagaaggggaaaaatgtactttgcacaaagcaaaa

SEQ ID NO: 4322 - DNA, 1000 bp, mus musculus
aatgattcttgctgcaagttcatggctattttaccttccaaattcctagtggagattgagtaggtacatttcagatgttttgaccatcccctcaagaatcaggtcagggattgtgatggtttgtatatcctcggaccagggagtggcaccatctgaaggtgtggccttgttggaataggtgtgacctggttggaatgggtgtgtcactgtgggtgtgggtataagatcctcaccctcgttgcctggaagtcagtcttccactggcagcctttggatgaagacattgaactctcagctcctcctgcgccatgcctgcctggatactgccatgcttccaacttgatgataatggactgaacctctgaacctgtaagccagccccaattaaatgttgtttttttataagacttgccttggtcatggtgtctgttcacagcagtaaaacccgaactaagacagggatggacacagaactttgtaaagagccacaaagagaatacttaggtaatatatctgggagtcaccatcctctgaatctcataccacctagccacttttggtatgattgattttgcaaggtgttttggtgacctgtgtttattctttaattctttttgtttgtttgtttgttttttgagacagggtttctctgtatagccctggctgtcctggaactcactttgtagaccaggctgacctcgaactcagaaatccacctgcctctgcctcccgagtgctgggattaaaggtgtgtgccaccatgcccggcttattctttaatttttatactcttgacagaggaactttttcattcttttataaaatgaattgaataaaataaaacattctataaaatgagttatatactcaatataaatgcttggcaaatactaatttaaagtaaagatacagatgttttatcacttattatttaaaataaaattatttcaaaatctacaaagatggcttcttggatttgggttttggttgatgtttgagg

SEQ ID NO: 4323 - DNA, 1400 bp, mus musculus
tgaaatcttctgcacctgagattctctttcatctcttgtattctgttgcttgtgctggcatctatggttccagttctctttcctagggtttctatctccagtgttgctcattttgggttttctttattgtgtctacttccgtttttaggtctagtatagttttgttcatttctatcacctgtttagatgtgttttcctgtttttctttaaggactcgtacttctttagcagtgttttcctgtatttctttacgtgagttattaaagtccttcttgatgtcctctaccatcatcatgagatatgcttttaaatctgggtctaggtttttgggtgtgttggagtgcccagaactgggtgagttgggagtgttgcgttctgatgatggtgagtggtcttggtttctgttagtgagattcttatgtttgccttttgccatctggtaatctctggagttagttatagtttagttgtctctcattaagagataacttgttcctcccgtgattctgttagcctctatcagcagaccagggagactagatctctcttgagttttagtgatctgagcactctctgcaggcaagctctcctcttgcaaggaaggtgtacaaatatctggctttggaccagcctcctggcagaagatgaaggcctgaaacaggacctatcccagaagctgttagcttctgtagtccacactctcacctgtgcagactagttttggagggattagggaaccaagataacttccccaggtactctggcaaagccctcccaggcatggaggacactgaaactgggtctgcctcagaatgtgtcctctagggaccttggttgtgtcctctgactcctcgcccaggtgaccagtgctggggtcgactggaaggggcttgtgaccctggtcaggccgggttttctgcttccctaatgctggtcccacgtgattggaatggaacagaagttgtgttccactcactggtggtcctaagatcacgtggagagttctcttgggaccttgggggtgtccgccgactccgtgccaaggtgacctggttggataagtttttagtatagggtataaaacactactaataaaaactaattgtgcatcacctattttcataatatagtgtatttaaagatgatgcaaatgtagaaacaactattatgttgatatttgaatttcttcatgcaaattatttaggaaaaataccactttgaggaacattgaccttaaattcaagataacagaggtttaaattatcttaaatccaaatgacttctttttgatatctgaaacatctctgccattgtacttatcaacatagatactaattctagtcatataagtatgtatttgatctttgtagccttgcagctaaccaatatcaattagtatt

SEQ ID NO: 4324 - DNA, 1000 bp, mus musculus
aaaaaatatttaaattaaaaaaaaaaaggaaaagaaaactcagacactattgttgatgccaagaagtggttactgacaggagcctgagaggctctgtctcctgagaggctctgccagtccctgagaagtacagagttggatgcatgcagccaagcattgtactgaacactgggtctccaatggaggagttagagaaagaactgaaggagctaaagggtttcgcaacccaataggaggaagaacaatatcaaccaaccagacctcccctcccctgcccaagagctcccagggaggagaggcccttggtcctgtgaagactgaataccccagagtaagggaatgccagggcaaggaggtgggagtggggtagggtaggggaacactctcataaaagcaagaggaggagggtgagatagggggctttcagggggaaatcaggaagggggataacatttaaaatacagtcaccaaaagcaaacactattgtggatgtaaagaaatgcaagctgacaggggcctgatatggctgtcttcttagaggctctgccagagcctgacaaatacagaagtggatgcttgcagccaaccattggactgaatacaggtccccaaaggaagagttagagaaaggactgaaggagctgaagggatttgcaaccccataggaagaacaatatcaaccaaccagatccccccaagcttccaaggactaaactagcaagccaggagtacacatggaaggattcatggccccagctgcatatgtagaagaggatgcccttgttggatatcagtaggagaaaaggcccttggtcttgtgaagacttgatgcctcagtgtaggggaatgctagggcagaaaggcaggagtgggtgtgtgggtggggaaacaccctcacaaagcagaggggagggagaatgggatagaggacttctaggaggaaaccaggaaacaggataacatttgaaatgtaaataaagaaaatatctaatgtggtaca

SEQ ID NO: 4325 - DNA, 1000 bp, mus musculus
aatattagcataaaactctaagcacctgcagaatcattccccagcaggtgacaacagctgcatcttgacatctgattctcctgcatgacaggtgcattggtgccatggcaaggaaaggtccaaggtccctgctgatgccacagcagctgctgttgagagacagcatctataacagctgggactgagagacagcatgaagtcattttctatgactgattaactgttttgttgggggctggtctgactttgatccctaaaccatgttcttcattcttctgagaaattttctcagcactgtgccttcaaacaatagccctttgtcctttgtcagcctgagtcaacttctattacatgaaactttaaaacctgaagattaagataccttagtaatttcattaaggttttaaaaaataataaataagtaaactatatccttggcaaggctgattatcacatgaaacacatcgttgtgtctataatcaaaatcagttacatggttatttctttaaaatattttccatttgtacaattatgcagacatgggcggtcaagtcatttccatcttagagtatgttagcagaaatgacattcacttagataacattttatttttacattttctgtttttgtcctaaccaatgaaacttataactcataacataaattaggtttatgtggaaatttaatgagtgtattaattatattactctcctctttttctccattgagaaattgtgcatatgtgttaacatgtatgtgtttaggtttgtgtgtatgtgcatgtgtgcatgtgtgtgtgtgtgtttcttgagggaaggagtggagagagagagagagagagagagagagagagagagagagagagagagagagagagagagagattgattctctccctgatatggaactcagaacactagactaactgcaattggcttataagcctatatctttctatccccagtgatttgattctaagcatgcaccactcacaattttt

SEQ ID NO: 4326 - DNA, 1400 bp, mus musculus
gttagttaatgaatgggactcagagcatggatatgaactcacctgtgcaaaggaaacagagatctgaaagttccgatgaaagtctaaaccaaaacaaaagtgaacatcagtttctaagacgtgaaaaagaagacgtgaatgtagtaagacaacacagacagattcttgaatatgagaaaaaatatttcacagaattgtgttgatcttgcacatgattatgtgcatgagagaaggcatgagaatgtgttaaagatgaaaaatcctatttcctgattgcatttgcttaagaatatacaaaaagaggacttgtttaaacggacctccagtgaacatattattgtgcaagcttgaggacatactatgacagatatagatgtctataactctggtagtgtaagggtttacttatcttaaactccagattttattcccctccccgtctaccttataactgtgccatgtcccatacctcctccccattcccgactctccacaaggatatctccccacccccaccccaccagatctctaaactccctggggtctctagtcccttgagggttaggtgcattttctctgactcaacccagaccaggcagaagtctgctgtatatgtgttgggggcctcatatcagctcttgtatgatgccttattggtggtccactgtcaaagagatctcaggagtccaagttaattgagactgctggttgccctccttctcagctttttccagctttcccctaattcaacaacaggggtcagctgcttctgtccatcggttgggtgcaaatatttacatctgactctttcagctgcttgttgggtctttcagagggtagtcatgataggtccctttttgtgagtgctccaaagcctcagtattagtgtcaggtcttgggaccacctcttgagctggatcccactttgggcctgtctctggacattctttacctcaggatcctctccatttccattgctacagttctttccgacaggagcagttatgagtcagagttttgactgtggcactacagcccctccctcactcgctgccccgatgagttctacaagttccctctctccactgtaggacattttatctaaggtccttccttttgagtcctgagagtctctcacctcccgtgtctcaggtatattccggaggttactgagtgggggagaaggactgaggccccgagggtcagcagaaagaatagaaatattcacattcatatatgtaaaactctgcacgtactcagagacacaccaatcacacacacacacaaaaaatctataaacaatttaaaaaaataacttttactcctctgtcaaactctataaacaaatattttgtccacactgtgactgagaatgtaattcaaatgaaagttggatggcg

SEQ ID NO: 4327 - DNA, 1200 bp, mus musculus
cttgtctggtttgtggaatgactcttagaacagagcctttggtgtgctgaccaggaagcttccaaacctcacgttcccctcaattattgacaatgaactccaccaagccaagtgggccctctgtaaggagatcagatttttctgtaactgcacagttccttttctttgtttggtcttgtttgtgatactttttaaaattacccaagagtgtaacacctgacatattgtttacttaggtatgaggacagggaatgctctgactacatgggtggcatataagacacactctttggaatttgacttggttgtgactcttctgagagcccatgcagcaatgtatccatcttttaaacgcagtttttttcttttatttgtttgtgtgttttgttttgttttgttttgtttcttccatcttcattttgtttttgttttgttttcattttattctttgtctctaaatccttcactatgggacatctggatctctttgaagggatattagggtctgttccttcccctccactccctctattgattctccttaaaaatgaagatctatctatgactattagtttgtttaaagttttatttaattccttgagtgttgctctgtttcatgttcagaggaaaatgatcacaacttcatctattgaccattaaccctttgacaatattttaactcatttcaagaatttttatacaagatagaagtctcaattgggacaagaaaaactcaggaactgcccttggagccctgtacctgcagcttggactttaacactgctggagaagtcagagacttcttgtctgtaagagctactcttttttaaacttacattatttttttacttacatttcaaatattatctccccttcccagtttcccctccacaacctcctccaccctctcacctcctcctgcctctataagggtgctccctaacccgcccacccactcctgcctcagtgccctagcattcctggatcatgtgtcattgagccttcacaggaccaagaggctaccttaaagaggaaaacagctgtttggcttctcagcctctctaggaaggaagctgatgtcttgtcttactactttctgtgactattaattttggattcagtgggtagtaacatgcttttccctagaagtgagaactagaatgtaataaaattttgtctgtctattcaaaatttataagt

SEQ ID NO: 4328 - DNA, 1000 bp, mus musculus
caggacagcaagaggctcctgggacccaaccggaataagattagttaaaatgctcaacaaaggggagaaagaacctgtagagatcaaatccagaggttaggcaagtcaccaagttggggcctggggccaccctctccaaatttttaacccggaattgctcctgtctacaggaaatatgggggcaaagtgtgaagcacagactgaaggaaaagccatacagagactgccccacctggggacccatcccatatacagacagcaaaaccagacacttttgcagatgccaaaaagtgcttgctgacaggagcgtgatatagacatctcctgagaggctgtaacagatcttgacaaatacagaggtggatgctcacagccaaccgttggactgagtacagaacaacgatggagatgtctgagaaagaactaaaggagctgcaggggtttgcaaccccataggaagaacaacctttttattattaattattattattaattattattttatttactttaattagatatgttctttatttacatttcaaatgccatcccgaaagttccctataccttcccccctgccctgctcccctacccacacactcccacttattggctctggtgttcccctgtactggggcatataaagtttgctagaccaaggggcctctcttcccagtgatggccaactgggccatcttctgctacatatgcagctagagacacaagctctggggttacttattagttcatattgttgttccacctatagggttgcagaacccttcagctcctgggttctttctctagcgcctccattgggagccctgtgttccatcctatagatgactgtgagcatccacttctgtatttgccaggcactggcatagcctcactcaaacaacaatatgaagcccagattccccagagctcccaggtactaaaccaccaactaaagggcacacatggagggacccatggctccagctgcatctgtcccaga

SEQ ID NO: 4329 - DNA, 1000 bp, mus musculus
caagttgtcctctgcaattgctgtcctgttgtgtctgtaaataacacaaaaattgagattctgaaattcagtattaaaagaaattatttgtcagtctgaagaggtggcccagtgttaaagggcatttactgttcttatgaagagcctgggggttccttccagtcccctccagtaccaggccaccttgggctcaaactcagcaggcagtcccagggtctccagaggactttctttcccacaagtgccctaggatcttaaaaccactgctgagtggaacacaagtgttccagtagagctgagggtgcctgggggcagctggagcatagacacaggaaccctgcatgatcagtggctcaggttccttccagtcaacgctggtcaaccttgatttagaactcagcagacagacccacagtccccagaggaagtatcacttccaggtgctctaatacattcaggatcttaggatcccaggggcttggtcacaccaggatctcagaggaatttgagtgccaagaactctggcatatccagaatcttagcatcacaggatcccagaatcacaggatcacaaagaaagttggactctgagaagttctgactcaactgggaataaggaaggacaagctccaatcagatatatcgaaagcaaggagcacttgagataatcagatggcagaaagcaagtgtagaaagagaagccacagaaaccaaggttacttggcatcatcagaactaaactcccccaccatagaaaatcctggatataccatcacagcagaaaagcaagatatggtattgcgtcccgctcgactggcaagaaagacgcaacaaaccagaatcttccgcggcaagagctttattgcttgtttctcaggaagattccgaaccgggaaaatgcgctgcttttataacccgcagcgtgacgtttcagcacctgatatggcgtgacagctcccgattcgttgcttgcccatcaccccactattacaccctgaga

SEQ ID NO: 4330 - DNA, 1200 bp, mus musculus
agatgacatatttataggcttttgaaattatgatgaggaatattctttgggtaaatgttgggagccgctcccacattcgccgtcacaagatggcgttgacatcctgtgttctaagtggtaaacaaataatctgcgcaagtgccaagggtatttacgactacttgtactctgtttttcccgtgaacgtcagctcggccatgggctgcagccaatcagggagtgatgcgccctaggcaattgttgttctctttaaagagggtttggggtttcgttttctctctcttgcttcgctctcttgcttcgctctcttgcttcttgctctcttgcttcttacactctggccccataagagatgtaagcaataaagctttgccgcagaagattctggttgttgtgttcttcctggccggtcgtgagaacgcgtcgaataacaattggtgccgaattccgggacgagaaaaaactccggactggcgcagggaagatccctcattccggaaccagaactgcggatcacgtttataaaggttcccgtaacacagactgttgagaaggattcaactgccgaattcagaactcatcagctggggaacgacggtgataaaggttcccgtaaagcagactgttaagaaggattcaactgtatgaattcagaacttttcagctggggaacgagagtaccagtgagtatgtttggccttgaattttttctggtgttaggagcccttttgttctttttcacatgctatcaagtgattaagatagggctgaaaattctagaggaaattcaggacaagctatcagaagtaaagcgggaagaaagagtaggaaaaaagaggaaatatgatacacaaaataagtatacaggcctttccaagggtcttgaacccgaggaaaagttaaggttaggtaggaatacctggagagagattagaagaaaaagaggaaaaagggagaagaaaaaagatcgattagcggaggtctctaagagatactcgtcactagatgagctcggggagccagctcttagtagctctgaagcaggtgaagaatcctcctttgaggaaacagactgggaggaagaagcagcccattaccagccagataattggtcaagaaaaaagccaaaagcggctggcgaaagccagcgtactgtccaacctcccggcagtcggtttcaaggtccgccctatgcggagc

SEQ ID NO: 4331 - DNA, 1800 bp, mus musculus
atcagtttttctttataatatgttcaggtgtgtctgttgaaatttagaacagattagcttaattgtgggagttttacaaaggataagacacataaatcgaattcaaaattcatggaagtaatagctaatttaataaatactcatagaagcaaaaataaataagcataaaataaatatgcaaatgaaacagatggtacaacacttagatattgtgaaagtcacagtgaaacatgactctaagtatatggaatagggaattatttagatagggtagttgtacaagactctctatgcagaaaaaaattggagttaagtagcatcatataatagaaattacaaaactagatacatccaggaaaggcccatagaaaagttgaatggaaattaattgaccaaattttagctgagagcaaaagagaaagaaacgatatatgtgagatatacttaaccatgcatggacgtgtatatttatatttatatttcttctgtaccagaaggtctttgaggaatattacatgaatgtataataatactcatcttttaaatacaatgatccttcaactttgtaaaatctactttggaagaatcaatgtttcaagctccaaacctatgttaagagtattttatcaagattgctatgtattatacagctaagggtaaatgctcactaccaaccactggactgagcacaggttccccagtgaaggagctagagaaaggactgtaggagctgaaggtgtttgcagtcccatagtaggaactgaaatatgaaccaaccagtacatcccagcattcccagggaataaaccaccaaccaaatgcacacatttaggcacccatggctccagctgcatatgtaatgcagcatgaccttgtggaccatcaatgggaggagagcttcttggtcctgagaaggcttgatacccattgtaggggaatgccaggacagggaggcaggagttttgaattctttgttgcaccaaaccattgatgacatttttccccaaaaaactttcttagcacatccagatcctctgttattttggtagaatgccaaatgtgatgatatgaaagggtcaattgtttgttttatgcttttgggttctttttctttttctttttttttgttttctttcttcctttttatttttattataaatagcacacagcaattatttctgtgtaactctgactgtcctcgaatttgttttataggacaggctggcctcaaggtcacatagagttgcctgcctctgcatcttgagtgttgggataaaacacatgtaccacttgaggcctgttgactcccttgaccaaaacttcagtggaaagaatacattataaaagtgaagctgagattggtttatttcaatgaactatggtttcagagaacaggataatctgcacatgtggataccactgtccaaaataatattccatgttatattttctagttagcttatagaatagtagtttgtatatttccatacatcatatatatatatatactaaagatgcatgcaacttgatgttggacattagataattgaatgatagaaataaatatatagaagagggatgggcagggattttgagatgcatagctcagaagcataggcagaaaaacaatgtgtgtgtgtgtgtgagtaaaaactaattcaacataagaaagaatttaaagaatacagaaagacaaatttgtgactttatatagttccccacagtttatgcacatgttaatgaatgatttctgtatacatgagaatgactttggcagaagataacacaattaagacttct

SEQ ID NO: 4332 - DNA, 1400 bp, mus musculus
ccatctcttgtattctgttgctgatgctcgcatctatggttccagatttctttcctagggttcctatctccagcgttgcctcactttgtgttttctttattatgtctacttccctttttagcccttggatggttttattcaattccatcacctgtgtggtcatgttttcctgcaattctttaagggatttttgtgcttcctctttaaggtcttctacctgtttagcagttttctcctgtatttcttcaagtgagttattaaagtccttcttgatgtcctctaccatcatcatgatatatgcttttaaattcgggtctagattttcggatgtgttggggtgccctggactgggcgaggtgggagtgctgggttctgatgatggtgagtagtcttggtttctgttagtaagatccttatgtttaccttttgccatctggtaatctctggagttagttgttatagttgtctctggttagagattgttcctcttgtgattctgttagcctttatcagcagacctggaagactagacctttcctttgagttttagtggtcagagcactctctgcaggcaagctctcctcttacagggaaggtgcacagatatctagcattcagacctctctcctggccgaagatgaaggcccaaaataggaccgttcccagaagctgtgttgctttggcctgtcacagaacctgttagcttctgtagtccacactctcacctgcacaggctagtctcagagtgatctgggaaccaagttggctcctccaggtgctcctgcaaaggactcctgggcagggcagacacctctcctctggaagggaaggtgcccggatatctggagcccgaaaagggggatgcctcagaagctctgtggctcccacctgtcccagaagctgttagcttctgtagtctacactctcacctgtgcagaccactctcatcggagtccgggaaccaagatgtctctctttccatctttttatatggtgcattacattaatggattttcgtactggaactatccatacattagatggattatggttttgatgcattccggcattcagtttgtgaaaattttatttagtttctttgcatcaatgttcataaaagaaactggttctttgttgggtttttgtatggttaagtgtcagcgtgaatgtagcttcatagaatgagtttggcagtgttccttctgtctctattttgtggaatagcttgaggagtattggcattagttcttccttaacaatctattagaattctgccctaaaattatctggccctgggcactttttggtgggagatttttaatgagtgattctatttctttaggggttctaaggctacttaaatagttttcctggtcttgatttaactttggtaaatgata

SEQ ID NO: 4333 - DNA, 1000 bp, mus musculus
aatatatatatatatagaaaactgttgtgagttcacagtacagatacccacttccttgctgtgtctagaagcatgtccttgtagtcattctgacagtctgccctcctctgactctttcatttttgattctccatcttctacaatgagccctgcatctttgaagaaggagctgagatatgtatctttttctttggactgagtactctaaagctccttattttctgcacagctgcaagttgtgagtattcatattagtcactatctgtttcaaatagaagcttgtgaaaaacattaagagaagcatgaatctatgaatgtaattgtaagtcattaggaatcaataattactctggctattttttttaagtttttttgtattagatatttcttcatttacatttcaaatgctatcccgaaagtcccctatacactccccctgccctgcttcccaacccacccattctgcttcctggccctggcattcccctgtactggggcaagaccaagggactctcctcccaatgatggccggctaggccatcttctgctacgtatgcagccagagacacgagctcctatagtattgcagacccccttcagctccttgggtacattctttagctcctccattggtgtccctctgttccatccaatagatgactgtgagcatccacttctgtattttccaggcactgtcatagcctcacaagagacagctatatcagggtcgtgtcagcaaactcttgctgacatatgcaatagtgtctgtgtgtggtagctgtttatgggatggatccctgggtggggcctgaggaaaagaaggtccagttacaggcccaaagtgggatccagttcaaggagaggtctcaaggccatggagtacccacaaaaaggtacttaccatgaccagactctggaagcctaacgagcaccctaaagagtcaaatgcagatatttgcacccagacaaaggagagaagcagctgactcctgttgttgaa

SEQ ID NO: 4334 - DNA, 1200 bp, mus musculus
tttattttgaactgtgatcttccattctccccacaaatctgcttctatgcctttggctgtctttctatgctcaatatttgtttgtaagttatgaaatttacagtatcaaaggcattatacacagacttataaattatacattgcatagaattttagctttatattttcagtgttcgcttgcttatatttttgctaatgaactttttaatattaagtccccttcatccagtgattggcatgtgtatctgaaatacaattacaattttattacataacaaaaaaaaaactattttttttttgcccataacaaaattacaaccaatttcttgctatgggttgacatctactttatgtcaaatttccaaatacttgatttacttctatcatgttttaaatatttttattgtttattttatttatttacacttcaaatgttatccctgttcctggtttccctccaagaacaccctgggaaccccctatcctatcccttttccccctgcttttatgagggtgttaccccactcacacaccctctcctgcctccccactctggcattcacttacactggggcttcaagccttcacaggctcagtggtctcccctcccattaatgctagataatgccatcctctcctacaaatgtgtccctccatgtgtattctttggttggtggtttagatcctgggagctctggtgggtctggttggttgatgttattctttctatggtgttgcataccccttcagctccttcagtccttcctttacttcctccactggggtctctgtgaccagtttgatggttggttgcaaacatcctcatctatattggtcagtttctggcagagttctcaggggacagctatatcaggctcctgtcagcaagtgcttggcatcaacaacaacccagatgtccctcatcagaggaatagatacagaatatgtggcatatttacaaaatggaatactactcagttattacaaacaatgacttcatgaaattcacaggcaaactgatagatatagaaaatattaccctgagtgaggtaacccagtcacaaaagaacatacctggtatgtactcactaataagtagatattaggcaaaagctcagaatacccaggagaaagtttacatattttgattccttttatattacttaaggaattgatctgagaaggaattaaatgttgttt

SEQ ID NO: 4335 - DNA, 1000 bp, mus musculus
gctgtgttccactcaccagaggtcttagggtcccgtggggagtcccgtgtgggcccttgcgggtgttgggcaagactctgctggcaaggtagcccggggctcgagtctcgagtcgagcggaagggacttgtgccccagatcaggcccgggtagcctgcttccctatgtaccgcagtctcaagttccgcgcgattggattggggcaggcactgtgatccactcaccagaggtcttagggtcccgtggggagtcccgtgtggacccttgcgggtgttgggcaagactctgctggcaaggtagcccggggctcgagtcacgagtcgagcggaagggcgtaagagttactcttacctgcgttcacgcaccaactcttacccgcgttctctcgaccggccaggaaagaagcaacaaaccggaatcttctgcggcaaagctttattgcttacatcttcaggagcaagagtgcaagagagcaagagagagaaagaaaaagaacaagaaagcaagagaaagaaaaagaacaagagcaagaaagagaaaaagaacaagaacaagaaagcaagagagagaaaacaagagagagaaaaagcaagaacaagagagagagaaagaacaagaaagcaagagtgcaagagcaaaagcaagagagagaatggcaaaaccccgtcccttttaaggagaattatcctccgcctaggacgtattactccttgattggctgcagcccatcggctcagttttcatcacgagaaaggcagaacacatggcgggaaaactgcccctgcacgtgtgcagattatgtttaccacttagaacacagctgtcagcgccatcttgtaatggcaaatgtgagggcggctcctcacagcctatttctcccactcttgaccttcctttgttggctatgtttctctgtgtagggatgaaaggcaaggaggatatcacttcttaatctttctgcacattgcacatattgagatctcagtgactagtttcttac

SEQ ID NO: 4336 - DNA, 1000 bp, mus musculus
tatatcgtatatcgtatatcgtatatcgtatatcgtatatcgtatatcgtatatcgtatatcgtatatcgtatatcgtatatcgtataacgtgtaacgtgtaacgtgtaacgtataacgtataacgtataacataatatataacataatataacatgcaacatacaacatacaacatataatacataatatatatatatatataaacttagtgtcaattatgtatttgaatatatctacattttcattttcttcccagtcctgcttcacgagttacccaccctatcacccctactttcattctaagagggtggtcctacaccgacaaaccaatcctaccttactcctttagcatcccccttctctgaggcaacaagcctccacaggaacaataacttccactcgcactgagtacaaacagtgaagtcctctgctacatatgtacctggggtcacagaccagtctatgtatgctctttgtttggtggcttagtctctgggagttctgaggggtctggttagttgatactgttgttctttcaatggggttgtaataccgttcaaccaatctaggccttctcctaaatcattcataggggctcccaggtacagtccaatagctggctgtaagtatctgcatctgtctcagcaagatgctggcagagactctcagaggaaaaccatgcaggctactatctacaaggatatcttgtcatcagcaatagttttcaggtatagtagcctctgaccaggctcttctatctttcatagtctgttaaaaattctggtgtagaatcgagcaccggggtgccttgccagcggaattggcagacacccacaagggcccacacaggatctgccacaggatcctaagtcctctggtgagtggaacacaacttctgccaggaggcaggttcaaacaccagatatctgggcaccatccctgcaagaggggagcttgcatgcagagagtactctgaccactgaaactaaggatagacc

SEQ ID NO: 4337 - DNA, 1200 bp, mus musculus
aatcatcgctcccatcatatgttcttaaatataaagacaagagtcttaaaatttcacatttattttatgtatttgagcctatttatttctcatattggtttctatttaaagatttttcccaagtctgaaaagcagctgtttacttattttcaatgacccaaatattcagtcttctatgtttagaagagttctcctgctcactgacaaaatccaataggtacataatttttgccattttgtttctctttctagcaatgtattttccaatcattgtcatcatataacaatacacaatttggtttctttggatcctatcccttaatatttcagaatatacaccttctatatgcttgacacttgcagagtcttgtttactggaccgggaagctctggctttcagaatgtttggagtaatgtaccaaaagcctttacagcaacttcagaagtaccacagcctgaatcataggctgtactgtaaatggcagcatatggctggagagtcagagcagcaggataatgtggcagtgcccagattccagctgtaggcatcaaaacaaccttttgatgttggtactcatagctcctatttacatcaaaacctaaataggatgactattaaagagtctgttgtctttaaggctctattaagttattgcccaaggtggtaaaggaaaacaatgtctacatatgtttgccagattcatacaactcctttattcaggcactcctggcaggtgtctctttaagtacttattctaaatggaacacaactgggagacatcaaaaagggcactgttgacaactgtcatagcaggttccagcttgaatggcaactgagcagaaggtctctctccagagtccttcagatcatcctaatagaagcatcatttccaccaggaacccagcgtctaccaagaaggagtgctgggaaatactgctcgtggtgaaaactcagctcatccctggaaaatttccatgccactagatttcccacacaacatacctacaaagctcctgaaagactctttactttaatgttaaaattgcaatatttccttttttctttttaaattggttattttatttatttacatttcaactgttaacccttttctaggtttccactctggaaacctcatatccctttcttcatccccctgcttctatgagggtgctcccccacctgcccacttactccca

SEQ ID NO: 4338 - DNA, 1800 bp, mus musculus
atatagctttaaagaaattaacttctctctaatcatgatacccaaagcaaaggaagttcttcctcacacctccaataccaattgcattccgatttagtggtaacactgagatcaaaagctaatctctctatgtgaatttgagcttgtaacttaaaaatcagagtttccaaaacaaaaatccctaaactccagcttaattacaatgccaatctaataatacgcctttacctaaatctaacacctaataaacaatataatgtttgccatcaaagcagaaaatgcacctttaatcaataggctatgtgttgctccaaaataaagatgatttaaattttatgactattgatattaacaaaacatttctaactcatagtagctttcagttcaaattttagaacatgaaaagcagaaaacagctgagtcctcacaactacaatgtaagcaactcaagatttaaaactataggtgctttgaattacaaattagtcttcttaaattgtgttatatcaaatatgtatttttcttcttttattaagtaatttctttatttacatttcaaatgtaactccctttcctggtttctcttctcccctccccctgctcaccaactcacccactcctgcttcctggccctggtattcccctgcactgggtcatagaatcttcaccaagagaaccaagaggaccaagggcctttcctcccattgatgactgactaggccaccctctgcttcatatgcagctggagccatgagttacaacatgtggactctttggttggttctttagtccctgggagctctgggggtactggttagttcatattgttgttcctcctatggagctgcaagcccctttagctccttgggtccttcctctagctccttcactggggaccatgtactgagtccaatggatggctgcaatcatggttacttctttttctttttcttgtatgaccatgacagatttgggggttttaaataggaatggtgttgatcaagccataccgtgatacatatccaaaaacataatagacaaaaggtaaggatgctattctaaggattcacctcctttaccaaataattgactaccaaaaggaattggttaaattattcctactaagctatttgtaccttcaaatttaccatcaactaaacctgtagtgttatcactcaaatgttttatcagaatgcatccaatgtaagatttaaccaaaaaaaaaatctaattttagtatatttctaggatagtatgttgtagatctctgagggatcttataagttcaatgtgtgactgaaaagaaatttagaacatgttattaaaattatagcaagggaagaataagcagctggtaatattctattatagaaatagatgaaagaagcatttttttttttaattttcagggataaagctggaaaaaatgctctaagaaactaagaactaagaggtttgcggaggataaaccggtaatggggataatatttgaaatgtaagtaaataaaataaccaataaataaaagaaactaagaactaacaatactataaaatagtaaaataaattagaatatattgtgcttaaatggacaagggaatgcatcttcagtgtgtgacagagtgagctggggagactcagggtggtgagagctggaaaatttttattgaagagaacaagggttggtgttttttgggaacttagaggtgaggctggaataaaaataattaaaagcagaaaataacaaaaccaggaaaggagaaaaaaaaagagaaaaaagaaatgtggggaagaaaaagaaa

SEQ ID NO: 4339 - DNA, 1200 bp, mus musculus
ttaagtaaaataatcaaagaacactagaaccataaaactgtatgcttaaaatatgttaaaatgagtttagttttatcattacattatttttcccacatattgctaaattaaggaaaacaacacacattcacttgacatcctgatcactgctgcctatcccagttacccctcctacaatcgctaccccaactccctcctcctctaatagggtaaggaacccctggttattccccaaccctggcatatcaagtctctgcagagtctcggcatatctgctaccactgtggccagacaagacagcccagatagaataaaatatcacacagacaggcaaaagcatttgggataactcctacttcagttgttcaggaccaacgtgaaaatcatgctgcctatctgctacatatatgcaggggtcctagctccagcctgtgaaagctttttggtggttcggcctctgagagccacaaaagcctagattagtttacactgttgatctttctttggcattcctatccccttccagtctttcaatccttgccccaactcttccataagagtccccaagctccacccactgtttggctatggctgtctgcatccacaatcagctgctaggttaagcccctcagaggacagccttgctaaactactgtctgcaagaataactgagtaccattagtagtgtcagggattgatgcctgtctatgacatgggtctcaagttgagccagttagtggttggttatttccttagtctctgctccatctttgtccctgcattacttgtagactggataaattaggggttgaaagttttgtgggtgggtttgtgtccctatctgtccactaagatttctgtctggatacagaaggtggcctgttcaggtgtgagtctcagctaaggtcaaccccctttgattcttgggtacctctcctatccctggtctctatcatgtcctttagatgcccatctccaagtcagtttcagatttccattcattatcatggccttctgttcatctctcctgtcccttcaaacacatgatcatgaaccatctggattcctcagcccatcccttcttctacccagattcctccctccctctgcctcctactgattcaaacaccctactttaggatttccatcttatttagcttctttgggtctatggagtgtagcatgggtatagtaatattt

SEQ ID NO: 4340 - DNA, 1400 bp, mus musculus
ctttgatagtcttctagagtacatttttacatttccaattaatagaaatggatcagtgactcaaaattagttcaaagaggcatgaaatgtctatgcaaatagcaatgcaggcagtacaatttgtaaatgctcggacaaataaatttgaatgtgattatcccgcacaaggatcttttccggctaaagcaaaaccaggcattctgggccataaggacaagattactttcaagatagaagcgaaggattgctgaatgtttaagactagtcatggatataaaacaaaccccaggcaaccttgagctacgagatgttcttccatcaaaagacccaacaagtcaataacaaaaacaacaaacatgagtcaaattataatataaacagataatattaaaatgctatgtatttcatatttaccttcaactttacaatatttttgtagagtattttatttatttacataccagatgttatccccattcccagtttctactcaggaaaccatctatccccttccctccccctgcttctaagaggggagcacccacccaccaactcctgcctcccctctctggaattccactacagtggggcattgagccttcataggaccaaggccatttcatctcattaatgcccaacaaggccattcactgctacatatgcaggtggagccctgggtcgcttcatgtgtactcgttagttggtggtttagtcactgtgatctctgggggggtctggttggttgatattgttgttcttcctataggttgcaaactacttcagccccttcagtcctttatctgactcttccattgtggtccccatgtttagtccagtggctggctttgagcatccacttctgtatttgtcaggcactggcagagcctctcaggagacaactatatcaggctcctgtcagcaagcacttcttggcattcacaatagtgtctaggtttggtgtatgcatatggaagggatccccaggtgggcagtctctgaatggcctcttcttcagtctctactccacactttgtatctatatttcatcacttaaatattttgctcttccttctaagaaggaccaaagcattcacactttgatcttccttctttttgagcttcatgtgttctgtgatttgtatcttaagtatttcaaaattttggactaatatttacttatcagtgagtgcataccatgtgtattcttttattactgaattacctcactcagggtgatattttcttgatccatccatttacctgcgaattttgtaaagtcattgtttttaatagctaagtagtactccatgtgtaaggcagaatagcttgactgtgacataataatccagtataattttcaaataggtataagaatagattttacacattttcattggaca

SEQ ID NO: 4341 - DNA, 1000 bp, mus musculus
ggtatggcctttctggtaagtatgtctccagggtgggatttgcgactttaaaaccgccccaaatgttctttctgctttgtgtttgctgaacaagatgtgagctatcagtgtgcatctccagatgtcatatcttcactcatcccatcatgaactctgaccgtcttaagctgtaagcaaactaacactttcttctacatgttgcttttgtcactgtattttataactgaagcagaatggtaaggaacagagtcctttgatttgaatactgtggtcactaaagaacataagatagcatttgagtggataatttagtgacacaggtgcatgggtttaggactgaaagttactgtaaaatctgttgtaacacaactataagtagtgatcaagcaagatgcccctgtggttaggaaaaggctagtatacctttttaaggacaggcacatatgaattttattctcataactctgagaaccgctctgcccctccccagaatgacagctaccaaggaattttttctactcgagcaagtagtcatatgacaaaatcttcactaagtaactaataagaaaaacatctttgagcatattagaatagtgattaatatatagtataattacatttaaatacatttacaagcaagtaagggcatgaactggagaattcctaaagagaaattataccaactgtgggtctcatatacaaagaatgtaattaaaatcatgaaattagctgaggtcaaatcagtgaacaaatataaaaggactaaggcctgaggaaaaatttcttcaggataaaattcaaagacattaaaaagaagtggaaatgttaatagtcaatataatggtggaaatgtcagaagtatatgtagtagaggaatatttaaaaatataatactggggaaaacataaaaagtagcaataactaatacaatgccaaattaattaaaatttaaattttatttgccaaggtttgcaatgtagagaggtaatgtaggagtgga

SEQ ID NO: 4342 - DNA, 1000 bp, mus musculus
attataacactgcagtcatccattaaccagtttttatttctataagagatacacataggtaatttagtgtgatcattaaaagctgataattattatgtgtgaatattctcaaaataagcaaccatcatcttgccgagtgcagctatgcctccttgtaaaaagaataccatagctcggtttgatcactctacatatcctcatcgcttgaggaaagcctgccaagacccttacatgagtgtgcagccttgccgggcactggtggcacacacctttaatctcagcactcggcaggtggaggcaggccgatttctgagttcgaggccagcctggtctacagagtgaattccaggacagcagagctactcagagaaaccctgtctcaaacccacccccccacacacacacacatacacacaaaaagagtatgcagcctttctctcccactgttgtatgcaatgctatattaatttcacatgacctttgggagagtttagagcagtgttcctcaacctgtgggtttcaatccctgctagtttgaataacactttcctcagcgttgcctaagaccattagaaaacacagataattacattataatagtagcaaactataggtgttgaataataacaaaaataaatcctgagaggaataagtacaacacgaggaaattttaaagggtcacagaattaggaagtttgagaagctctggctcaactatataggcctgggaagaccagggttgttagagtgctatcagcccttgtgggtaaagacttttcagcatggcatttataggaagaactcacacccatgtaggtaaattattgttttccctcgatagactttagtgtaatcattaatcattttgtcattgggacataaggaaaaagaaatagacatggtttgtatctaccccattgtagaaattttagcgatacagttataaataatgagaattagatctacaatctaggtggattggttctatggactttcgtgc

SEQ ID NO: 4343 - DNA, 1000 bp, mus musculus
tttgaggagtttggagctgtggactacagaattctagaatatggaaaataatgattaacagtgaactctgaagaatagattgctaatgaaggacagacactaaaaactgtgctcatgaggactcaaaggcacacaaataattggatgggaattggtctagacaccattcaagttatagtctagtgttttccaagcctctgtccctatattagaaacatgaatgaggctgaatcaaatgttattgactaaactctctggcagagaacaattaagactgtcgaacatttagactgcaacatggtcgtctatcagtttctctattggagtgctatgttgagaaattaaagcagatagctatgaattgtgtgcaggtttgggatgacaagagcaggagagcatgtaaaggtgaggaatgccagcagattttataactattgaattgtagcacaattaagattggcaatgataagaaggaatctagaacctagaactaaaatagtaagaaaggtacctggagatcacctccacgcaatggaaattttagctcaaaggaaaaaatacattctttgaatgaagatgaaatatgttctgaatatcactaactgttctctggataaaacctaccacctaggagagtagtttttccatgattaagcacgtaagaatgccagtcacagagcagtgagagtagtaagatggaatatatttacttcagtagattttgctagtgttatgtagatgatgcttggttatcaaaatgcaaaggcaaatgtttttgagtcttagacgttcaacaggcttgcagaagccattgagaagcatgcatggtaagatacaatctgcaagaaagtctttcaaagatatattgtgaagctgtgtggtttaaatttaagctacaatgctgatgcaaggcagtgaaacttctgaatcattaaggcttctacagaagaaagaagttaagtctgattaaccctattcaaagctacagaagatggatata

SEQ ID NO: 4344 - DNA, 1000 bp, mus musculus
atgcatggtatgtactcactaataagtggatattataggaaaacatacagaatgcccagtatacattccacagaactcaagagggctaataaacaaagggcttaagtgaggatgcttcattcccacttgggagggataagaaagcaatcatgggaggcagagggagggaggagactgtgtgggagagaggagagtgaggggaaagggagaacgtgaacaggtattgaggggaaccagagagaatccctgagggccagcagaaagaatggaaacccgcaacctcactgggtgggaggttggggagtctcctcctagaatgtaccagagacctcaagaggtgagaaaatgtgaggactattaagtgagggatcttagatcaaatggccaagtgtggggagagggaacttgtagagtctacctccagtagaaagaaaaggcatcaagtggagggatggggttgccattccacagtcaaaaactctgacccagaattgtttctctctaagagaatgcaggggcaaaaatagagaagagactgagggaaaggaggtccaatgattggtccaaattgggatccagctcaaggggagctgacactattgctgacactatagccactagcatggctgcccgctgagaggcccaataagcagctgaatgacacggaagcagatacttacacccaaccaatagactgaagtcggggacccctgtggttgaattaggcaaaggccagaataactgattaggaggacaacctcataggaagaccagcgatcacaagtaatccgggcctctaaagatctctcagacactggaccaccaaccaggcagcttgtctgaggcctctgacacatatacagcagaggactgcctggtctggcctcagtgagagaagggtagcctaagcctggagatccttgtggccccagagagtgagaaggcctgcagtgaggtggggttggaggagtggagacatcctcttggagatagcagggag

SEQ ID NO: 4345 - DNA, 1000 bp, mus musculus
gaactgagagctacagatagtagatgattacaaggatcagtgtcttctagacacaggaggacagcttacatatgaactctcacagtggtgtaaaagcatgacaaggactcaacaaggccaagccagatcaaacaccaatgtggaatgtgagatgtacaagaagtctgaccttcagcacagaagccatgaacaactgactgaagctcagaagagaggataagcgttttatcattgtaagttggccttgctctagtggaagtcacatacccagtaatatttgggcagggtaccctgttagagaagatgagttggaaagtatgaaactaatcaagatgtgatatgcaaaattatacaaacacactactaaaagatatagataaacaaaccaaaccaaacaaaaaaggggtaaaataatttctgatgcatacaaaatattaatagagatatgaaagtgaattgtacagtatatcagtgtacaaataagggaagtttattgaatacatgagtaagtgccaagtagctaaactctgcatatagccaattacttggttgatatatttaactcatttgcagatccatcccataatcagcctccaaacgctgacaccattgcatacactagcaagattttgctgaaaggaccctgatatagctgtaatttgtgagactatgccgggacctagcaaacacagaagtggatgctcatagacagctattggatggatcacagggcccccaatggaggagctagagaaagtacccaaggagctggggggatctgcaaccctataggtggaacaacaatatgcactaacctgtacccccccaacacctcggagctcgtgtctctagctgcatgtgcagcacaagatggcctagtcagccatcactggaaagagaggcccattggacacgcaaactttatatgccccagtacaggggaacgccagggccaagaagtgggagtgggtgggtaggggagtggtatgggatgatatgg

SEQ ID NO: 4346 - DNA, 1200 bp, mus musculus
tcctagataaatgttctttagaagtgactatattatcctaagaatggcatttcataggcttgcttttttctgccagaattccagaatataaaaatgctaatgaattttccattttggtcttgtatcctgacactgctacaatggtagaatgagagtctttaggactttcataggtctcaagtaggaaataatggccttctaatatttctcctttttcccctttattggatattttctttaatcttttatggatttcccctctggaaaccacctatcctgttccccctcctccttcttctatgagaatgctctcctaccaactcacccaatcctgcctccctgccctggcattcctctacaatggggcatagagccttcacaggaccaaagggcctctcctcccattgatgcctgacaaggcccttctctgctacatatgtggctggagccatgagtcactctatgtgtactctttggttggtggtttagtccctggggactctggggactctggttgatattgttgtttttcctttggggtttcaaaccccttctaacatttctaattctcttatttgattgttctaagaattgaaccactttgagagtggggacaaaggtcattcttgcctcatttttatttttgaaaacaagctctcaatattttcctatttagctgaaggttctctatttttattatttattagtatcaagtgttttaagatagcaaactcgtgttcatagtttctacaggagtatatttttattagatattttctttacttacattttaaatgttatcccctttcctagtttacctccaaaaatcccctatccccccccccccaacccctgctcaccatcccacccactctggcttcctggccctggcagtcccctctagtggggcatagaaccttcacaggaccaagggcctctcctcccattgatgaccgactaggccatcttctgctacatatgcagcaaaagcaatgagtcttaccatatgttttctttaacttttattcaggaagcaatgccatttattgaatgacttttctgatatcttgagatgattatgtgatttccatcttatagtctatttgtattctgtgttacaataattgatttgttatttttgaacaaaacttttactccagttatgaaaccaagttgatactactatagttcttaatgcat

SEQ ID NO: 4347 - DNA, 1000 bp, mus musculus
agctagcgaggccatggaacctactgtcactgctttctacagcagtgtattctagctacgtattctaaatgcttattcttaacccacagagaagcttagtcctcacccctccccatatgagctgcttcctgtagcaaaggagatcattacatgaaaccacaactcataaaatgcagagcacaaccgcctgtgggatgcctattcctagttaataaatttacaacatgccactacatattaggctcaggatacatcatgggagatggggcagacaaatggaaagagccagaagaccaggacacgaggagagacatattcatttctttaaaaacaatgattaaaataagaaaatatttttaaaggtacaggatttggagaacggtaggaatgatgaatcgatctagaggtggctgggaggacaggtgggagggaatgtgattcaaatggttgtacaaaattctgaaagtattgcttggccaattcggcgtgttctctccaccaccattggcccagcacatcttgcaagcaggacagatggcaggtgaggggttttgtggttgggttcatgtccaggcttctcttttcttaatctgaagattatcctatcatgcacaaaagactacaatttacggctgaagcctccacccctgcatcagttcaacctctttttcttcaacgagttattcttggaaatggagcacactattagtttatagagggcacccttctgtctcttccctcagagattaggaaacctcatggaaaggggagagggatgactgtgggagtcagtggggacagaggacaagagatgacagccccctgaataaactaagccggactcctttgggctcaccgatggatatggcaagcactggcactgcatggtttgccagagatccttagcctacgtgtatgggcgttaacttggtgttcttgtgaggcacctaataggaggagcggctatgactctgctgttttgctttttctcgagactctt

SEQ ID NO: 4348 - DNA, 1200 bp, mus musculus
aagcaaaacaaaagtaaaacaaaacaaagcaaaataaaccaaagacaatggccctggaaaaaaaatgaacaatttgttttagtttacagcacagagattcttctcttaatgttagttgtgctcttggtttcagcaataagtgaaggaaataagatcttgcccttttgaagttctgaggggaggtgtgggtgtccacgttagtatggttggataggatctgctatccttgtaacgattcaaggttggaatggtcttctattcactatggcatccatccacctgctcctggccttagttccagatcttgaggaagctgtcccaggatcctgttgccacagccatgccatcatcagtcacccccaagaagctgacttggttgtagagttcagctaagacacctgctctctcagctttgagtgcatcctagacacttcagttgaaataatcatgcccagcaaggaggacggggccactcttggagaaggaaacaaatgttacaccacagataatgttgtcataggagtaggtcatgacctcctggtctgcatggagatcaaacagcttgcatgtaccatccactgagccagtggcaaaggcatggccattgggaaagaaacagatggcattaattttaagcttactgctaaatgtggtatacctaatgagactccactggagaaaactgtttgtttgcttgtaagtggatattaacgagactcttgtttattcccacattgcttggaacccacattgcttagacccttgcagccagtgttcatgctaccacagtctcattgagttcattttttttaattagtattctttccttcatgctgctgaattagctatatgagcctggaatttttgttaatttcttgagatttaatacataaaaaattgtgcatgtacaagtaacaatagtactgttttcttttctgtctctatgtaatgtaatttaatcaccatttactgttttaacttgtttaccataatctaagtaattagttgttgcacaaaagccaacctcaactatagtccatcttaagacaaatgaatctaatttcttaacaccataatttaagtgacagacattatgcactagtgttcagttgtgaaaatagaactctggttctagtttaccaataagtgtgcttcgtgtatgtgtgtgtctgtgtgcatgctcatttgttaagccccagg

SEQ ID NO: 4349 - DNA, 1000 bp, mus musculus
ggggaccctctataatgtatcagagactgggaggtgagagactctcatgactcaaagggaaggaccttagttcagattctcaatagtggggagcaggtattaccagttgaaagacaaggcatggagtggagggatggggtgattgctaactcacagtcaaaaactatgacccagaaatgttcctgccaggacagcgaagcaggagtacatggctggtgagcagggagagggaaatgagataatggattttcagaggaaaaacaggaaagggaatagcacttgaaatgtaaataaagaaaatatctaataagaaaataaaataaaaaatacctgtagggtccaaaaatggagaagagattgagggaaagacagtccagtgatcagctcaccttgagatgcatctcaaggcctgacactattattgatgctatggtgtgcttacagactggagcctagcatgactgtcctctaagaggcacagcaagcagctgactgaaacagatgcaaatacttaacacccaactattggactgaagtccagacccctgtggttgaatcatggaaaggctagaagaagctgagaaggaggatgacccaataaaaagaccagcagtctcaactaaaccagacccctgagatctctcaaacactgagccaccaatgaggcagcatacaggagctggcctaaggcccctgacatatatacagcagagaactgcctggtctgacctcagtgggagaagatgtgcctaaccttgaagagatttgaggatccagggagggaggaggcctggcagggggaggatcctcttggagacagggggaggattaatggagtgaggaactgtggaagggcagactaggagcagggtaatgactggactgtaaaaaagaaaaagttaccttcttaaatagtgggattagagagtataaaattgaaaaatatattataggagcaagtaattgatatttctttcataaacattgtcaaaggctacct

SEQ ID NO: 4350 - DNA, 1600 bp, mus musculus
aacccaatcaaaaaagaactcacatgatatgtactcactgataagtgggtgcccagaaacttagaatacccaagatataggatacaatttataaaacacatgaagctgaagaagaatgaagaccaaagtgtggacactttccccttcttagaattgggaacaaaacactcatggaaggagttacagagacaaagtttggagctgagacgaaaggatgaaccatgtagagactgccatacccggggatccatcccataatcagcctccaaatgctgacaccattgcatatactagcaagattttgctgaaaggaccctgatatagctgtctcttgtgaggctattcttgggcctagcaaacacataagtggatgctcacagtcagctattggatggatcacagggcccccaatggatgagctagagaaactacccaaggagctaaagggaatctgcaaccctataggtggaacaacaatatgaactaaccagtacctcccggagctcgtgtctctagctgcatatgatggcctagtcggccatcagtggaaaaagaggcccattcgtcttgcaaactttatatgcctaagtacaggggaacacaagggccaagatatgggagttgggggggggggaggagagtggggggagggcatgggggacttttaggacagcattggaaatgtaaatgaagaaaatacctaattaaaaataaaggaaaaaaatgggaaagtgtctcacaagcaggcaaaagagtcagagacgatctagtcacacacacacacacacacacacacacacacacacacacacacacacacacacacacacacaactgaagtccagtaaagtccccaagctaaacaaccacaacatacaggcacaggacctagcacagagccatgctggctcactgtgtcactccagtctctgtgaggccctttgagccttgttcttgtggtgtccttaacacttctgtacctaaaattctttcttcttctctaatgtagggtacccttacctcacctattgttagactgtgacctcttatcagttgctgcatcaagcctctctaatgagagttggactaggcatggatcagaatattagaacatcattaggaacttttcagttaattgttgctgttgttgattttgtttgattttgccatttgtgtttggttccagcctaggtctctggttttgtatggctctctcacttcttttcttttttttttccttctcacttcttatatattagggaaagcacacgttctttaataaatgattttgagaaaacaataaagttgtttttcacaaaaaaaattacaatttttcagattttcttcatgtgatttctactgaggcataagttattgcataaatataaaggagactactattatatataattatctacttatttgtgtgttataattcattatgaagacttaccattatttagagaaaaattgtttgagttactttccagatattatggcaaaaattacaaataattgtgttattaagtcattatcaatttgcatttggcaatttgtgtaattacatttctaggtgataaattaagtgttttaaatgatc

SEQ ID NO: 4351 - DNA, 1400 bp, mus musculus
caaaactgtagtagaaacatatgcacatgcagagaaatactaaaggaccaagcctgcttattattcttattcgtttattcttattatttgcttatgaaattttcctcctatgaacacatcagttacactcaaactctgagaactcagtaatttcatttttcctgtgactacctggtaatgatattaacatgcatttaaatgcagcaagatgaaccaggacatcagtatattttttaccaaaaagatggctactgtggactctgtttggggtatgcactatgctgagactatggcagatatgtgaccaggtttcctttggaaaactgagattctatacacagggccttcaatggaggagctagagaaattacccaagaagctgaaggggtctacaaccctataggtggaacaacaatatgaactaagcagtacccccatagctcatgtctctagctgcatatatagcagaagatggcctagtcagccatcactgggaagagaggcccctaggtcttgcaaactttacatgccccagtacaggggaacaccagggccaagaagtgggagtgcatggataggggagcagggcggggaaaggtatagggaactttcaggatagcatttgaaatataaataaagaaaatatctaataaaaacataatttccctattttcttcttgctagccactgataataactaaagtctccttttttctctatgaatttgatttttttaagttttaaaaatttcacttattattttttttgtttgaggctgtgatgtgtgtgtgtgtgtatgtgtgtgtgtgtctgcccacattcatttgtgtgagtgtaggatctgtgagccatgcatagcatgtatatagacaatgtcaggtgccattccccacattccaccttgagacccagaggcagctgggcaaacctgcaagcttttgggaattctcccgtctccacttcccgttttgttgtaggtgtactgagttcatagaaatatgctatccttcccagggttgtgtggattctcgggatttgaactcagtttcttgtgattgatggcaacacgttgacccttttatccatctctctcattcaaatctaaccatttctagtacctcgtagaatattcagatagtactgagaacaaaggaagtgtttgtgaaaaatcctagaaagtacaccaatatcattctattgagtaattatacaaaaagttaacatgataaagtttgcattatacatgttttattataaaatttaaagataatttatagtgaaaaataatggtattttagtattaaaatactgaaagtggcttgaaaatcattccataaatatcttgtcttcactgtatttaattactttcatttctgtgtccaagacatactggctaagtt

SEQ ID NO: 4352 - DNA, 1000 bp, mus musculus
gttccagaagttctgaatgatgtaatacttgtcaagccattctctgatctgtaacttagtttgttcattttccaaatgaaagtaacttcctagaactgttgcaaaaattatgttaggttttagacacaattttccaaaggggacctaatacacccaggtcaacatgacatgcctatgccaaagacacttcattttagagaaaaattctcatatttaaattattgttatactacctaaggcatgtttcacatgtttaagtccctaagtctttaagtaatcaatttagtggtgatagattaaaaaaaaaaaaaggagcaatggaatggagtgtcttaactgttgaatagagagtctctaagccattcagtttagtatttttaatcttcaaagcactgagactgggttaagatgagttagtaaatgacagtaaacaaaggagatgtctaggaacatgttcccatttcaacagggaatgatgctaaagaatggaaaaaaaattaatcaagtcaaaatacaatatgaaaactcatgtaaatatccagttagaacagtaccatttgttgaaggtgttttctttttatccactgtatctctttggactttttgtcaaaactcaagtgtccacatgcatgtgagtttatttctgaatcttcagctctatcccatatatcagcgtgtctgtagactgaacaccatccaaagaggatgcaagggctggacctagggctcttacacatttgcagcagatgtgcagcttggtcttcatgtggttcctctcacaattagagcaggggttctctgtgactctgctgtctgccattggatccccttctcatagctggactgcctggtctggcctcagtgagagaggacatgccaaagccaagtggtttctaagggtgacttccatttctctgaggagaaagagaggaagtagtgggggaagtgtttgtgagggttggacagggaggaggggggtatgctgctatcaggatataaa

SEQ ID NO: 4353 - DNA, 1000 bp, mus musculus
atgagtggtgccagaacagctcagggcattggaaattgcacgccatctcattcagatttcatagatttcccctcctcccaaaaatggtggctctcccttagttgagaagtgctctgctacatttccaagggccacttttgttcttaaactccccaaatctctaaaattacacataaacctgtacatgttgggagagaaaacataatttttttaaatgaaaagagaaatatgtaacaaaatttcaccaaagatatatctcttagaaatgcataaataaaacatttaatcacctaatgcaggatgaagaaaataaaatcaggccctgaaaacaatgaaaccaacaaggttgaaatttaataacattcaacaccttcattctgagtatcaagtagaaactatgcatagacacagtactggggaacaagacccaagggggtcccattatcaaacagagcagttttccaaagaacaaagaatgttctgggtcctcgtggaaacctgggtaaagagtagtggagctcaagggcggactaggtagaaaccacgctgaaatgagcaccaggtgaaaagccaagaaagaagccgggcaatggtggcctttaatcccagcaagcgggaggcagaggcaggcagatttctgagttcgaggccagcctggtttacagggtgagttgcaggacagccagggctacacagagaagccctgtctcaaaaaactaaaagaaaagaaaaagagagagagaaaaaagaaaagccaagagagttaaaggcatcaggaagaaagcagtccagttctggagtgaactgcaagttcaagcccagagagacagcagcccaggccggttcccactcaagagtctctatccaccttgtgagcaaactacaatcatgaagggaaggatccatgccagacaactgggaactaaagggacagccactgctgagtacagacagctgagtaataatgctgctattaggtcagaggagcatagacccatct

SEQ ID NO: 4354 - DNA, 1000 bp, mus musculus
atgcctctctctctagtagttggtgtgtttgaaatgttacatagtctctgaaccgttgtgcagaatggctgcagtgagtatgggcatggcaggtctcatcactgggcgttggtatccagtgcgcagcacatgcatgcactcaagcctggtgagaagcgctgtgctgtgacgtaagcaacacgggctgcagaggagatagacactgtgtgcaaactatgacagtttacaaactctatgtcccagggccactgtacaaactgcctgtccttcactggactgcacgtgcaatcataagggtttgcacatacagtgagcacatcaggcgtgttaggtcctgtatttctttctctatgttacaactcgattgaggaaggagaatttttttaggttaagtgactcaaataagcttagttttttgttttgcttgtctgtttgttgtttgaccccaagtttcatctgtattaaaacataaagagaaacgcatgcccagtcatattatctcctaagtattccctgttgtgaccttctcccactggagtaatttccttagctgcaaccttgtcaacagttttagttcctgctgtcatcataagtggatgacgtatataatgtgggctcatattccttgagccatgaatattaaccatcatctcagcagaactccatgtagccattcttggagacacactggcttatgaccaactaaaattctgccatagaaaatgtttttatgtctaaggccaccccacgcagcctctgccccatgtcacattgcagaagctgagcagggttaggccaggtcagtattggatggaagcctgccattctggtccccaagccccggtctccatggcaatgtctagtctactgtaggcatggcttacatttaatctgttctctgtggccctctgtcctttggctcttgtcctcccaattcatcaacattctgtattaacttcattcttgtacagctaagactctagacctactgtgtcagctg

SEQ ID NO: 4355 - DNA, 1000 bp, mus musculus; identical to SEQ ID NO: 4354

SEQ ID NO: 4356 - DNA, 1000 bp, mus musculus
tcaggaatataccactttagattatttcaaacgacacagagaaactaaaggcttgtttttttccctgctcttcctccacaacaatgcaacccagcctagattggaacctgctatcctgccagctcaggctcttggctgatgggcatattgggcacaccccagagcatggcttctaacttccttttttcagtggctacatttctgaaataattttaatgtttcctacattttgagttcttctaagtgaatccattgtatttaaaaagcaagaggacagaaatttactttggacctgattaggctgtaacaaaaccctcaattgtgatgttttgtgaaatatgcgctagaagataataaggtatataataaacgtgaaattctttctgtaatccataaattttccacctggtgcttaggaaaaggtacaagtggcctcgtgctgtgatcctcaagctaatttacattttgcttttgagatgagatatttgccttgcgtcttcttaagcaaccctgtggacatttgcatgtctgtttcctttgcattcggcatgcttagctgacctgtgtgagtcttaccagcattttcaaccaggagaacctcttggattcccgacagcagaacctcaggtcattcactggcttcattaatcaagatgtttagttgagaagtgctttacatgagaggctcagaagcaagtcttttcctcacaggcacctgagttatatgctatgctagttatttttctcattgttgtgaccaaataacctgacaaagagcaacttaaaagagagagagagggtttactagggcttataattcaagaagggaaagagttccatcgtggcaggaacacatggtggctggagccgaatgtcacatcagatccagcgtcagtatgtaaaaggctgggtgagcagtggagatgggctatcaaatctcctgcaccccgcctcccatcaggcaagagtccatttcctaaggattcaatgacctttccag

SEQ ID NO: 4357 - DNA, 1200 bp, mus musculus
tgtaactaagacctctgagatgctggggtgttttttacaatccctttagtaagtatgaaaatcggtaatgtgagtcctcagtggagttattgtaggaaagtccttctattcattattgcttttctcctcaagaagagcattatttccatctctgctttgtctcgttttcatgttcagtgactttgcctgggcagctccacctcttaccgtggtgccagtgtgtctaagaaagcccccctctcctcgattctttgtaatcaaacactaagggcaggaggagatggtgcctaggtgacagaacaccgcaatttgaagtgggacagtagttattattattgttattattatttagacaggctcttcctattcaactacggaatactctgtcagtccatgccagggcggagcaggactagtctttgagaaactgctctgcccctctgctggaactgatgcacaaaaacagaatagaaacagaacagaaacaagcaacaacaaacaaatgaaaagactcaatgttggttcttttgggggatggcatgaggacaaggtatgagcgctatctagcacagagggctacttctgtgtgcctttgtttttgggtaacagagtgcctccaatagccccttcctttctagtccatgctgcttgctggtaacagactgggtgtgtgttctagcttactgagataggaactgaaatcgttgtcaaaaggggctagggttagggtgagggtggaaaggaagaatcatccaaactgagaaggtctcctctaaccatcaatttgcggtagatgacctttaaagggactgatagcagagtgtctgccagctcagaaaatgtacaagctacaaacatcttttcaatggcagaggacatagcatggaaaacaatgcctgtctcttcaggacctgaggcgctgaactcccaggccagcgtgaacgcagacggctctctcacgcgtgtggtcatgatggggggttaccttcaggccgaagggagaagggttccttcttgttcctgctctggtttcaggcaccgtgggaatggcggtgcccttgacgttaacactgtagagggagctcagccctgctgagttagttgctcctgaagagacccagctcttgcacgtagctggaccggagccttcctcacaccagcatgtgcctcctacggtgcagtgccaggtggtctgacctc

SEQ ID NO: 4358 - DNA, 1000 bp, mus musculus
ctatttctctggtgtttcaattcaaaactcaaggagtacatttcttaggacaagctgtggaagcagctttgcagtgtcaaaatgaccagttagcatgagaaatgctgttggcaccaccaatgtggccagtcacagtggagagcagagagacatacatagtgaccacgtcagtttgcattggaaaagtaccatgaaacaataaaggtagcagtgtcaaaagcctgaaaagagagctgaccactatttaagaacactgaggctacagaaaagatagagtcaacacctggccacacatttgcacttcaaatccatgcactgcctctactgtggagaattgtaccagttgcagtagatagggggtctgagtaaggcttactgtgataggtggcaggagataggtgggaagtatgaacatgaagaggtacagcacaatatctgtccctaaaaccttatgatgaattctctacttatcctgaggagagggaagagatcacaaaaaaactgtactgcaacaggactttttctgaggagaggcaacacacctgtctccacaccccaggtagggagcacacaacagaccaaagtacagatatcagctaagtccaattttgtaaacccatgagttttattggaattacaggaatttgggtgaggggttacttgtaggagcagaaatgatgccaagacaggttatcattgaagcccagcccagtatgggtgacagctcacaaaggtagaagcctgtaacatacgctcctgcctgcaggcagctcagcaagttggagaccctcccttccaggtggctcagttggtctatacctattcaagacagcttcagatggcctctgcttcttccaggcagctggtctgatttcaagattcttctttgaagtttggttctcctgagagtgactctccagagtctttactgtttactcttagaaaggcttagtgaatctgatcagtttcagggacttccagaagctattttgagtagttt

SEQ ID NO: 4359 - DNA, 1000 bp, mus musculus
atctatcattcaaccagacttaataattactctgtgcctaccacagagctaggtactaaataaatagtgagaaggggcatgggttgccttgaagtgtaaagaactgagaaaaagtttaggaaggctatgataacaaaggctattgctacgttcttctttaaaagttgagatttgaaggactggaaaaaatggctcagtagttaatgatgcttcttattcagagaaccagagttcaatacccagcacttatatcaaataggtagcaaatgcctgagactccagttcaggagattcaacatcctcttgtgacctctgtaggcatgtgcacacatcatacacacacacacacacacacacacacacacacacacatacacttacattctctctcttctctctccttaatatacatacaaactcacaaatgacctcataaaattaaaattaatattaaaaattatttagaattttgccccagtagttacctcagtgggcaaaggcacttgcttccaaggctaaatttgatccctgttttccacatggtggaaagaaagatgctataagttgttttctgacctccacactcatgccttggcatacattcacaacccaccacacacaattaaataaatgaatactattaaataaatttaaaatagatattttaatttaaatgtaatgaatagcctaaaactaaagtaagagaatgcatggcctgatagttgaagtgttggaagaatgattggctccagatgaagcagtgatttttctcaggttcagttgagaacatatctggttttatgttgaggtttttgatccacttacacccttctgtgcagggtgatagatagggacttatttgcgttcttctacatgcagacatccagtttgactagcaacatttgatgaagatgctgttttctaatgtgtatttctggcttctttatcaaaaatcaggtgttcatatgtgttagaatctatgtctgggtctccaattcca

SEQ ID NO: 4360 - DNA, 1400 bp, mus musculus
atgattcctgtctacaaactctttatagcaattatctgagcagagaagcacttcttccactgtgtctctgtaatcataactttcacacttaaagacaaaagcataaaaaaaaaccaaataaaaagaactgtccaaaattatatggcaaaatacaaatagcagatatttcaatgatataactttaatttatctagacattttaaggatttataactataaatacattatattataataaaatattgaaagggattttaacttccttccttatagtccagactttatccacctcccagtttgccccctgattgcactgcatcccatacctcctcccttgccctcctacccaatctctaagatgatgtcccaacccatccacccccacttttccaggcctccccactccctggggcctcaagtctcaagggttaggtgcatcttctctcactgaggccagaccaaggcagtcctctgctgtatatatgtcagggcctcataccagctggtctatgttgcctggtagttcagtgtctgagagatcttgagggtccaggtcagttgagactgctggtcttcccatggggcactcctcctccttagcttcttctagcttttccccaattcaaccacaggggtctctagcttccaccgattggttgggtgcttgtatctgcatctgacctttcagctgcttgttgggcctctcagaggcagccatgctaggctcctgtctgcaagcacaccacagaatcagtaccagtgtcagggtcctgggtctccccttgagctggatcccaatttgtgcttgtcactggacctcctttctctcatgctgtgctccagttttgtcccttgcagtaccttcagacaggaacaattctgggtcagagcttttgactatgggatggcaaccccatccctccacttgatgttctgtccctccacttgaggtagactcttgaagttcccactcccactttatccaaggtccttccctttgagttctgagagtctcttacctcccaggtttctggtacactctggagagtcccccacctcttacctccccaggttgcttgtttccattctttctcctggccctcggggcttcagacctgttcccacacacacactctgccaatacctgattatgttccccctgtcccctctcccacccaggtccctcccttcttctgccccatcctcactgtgattgctttcttctctatcccaagtgggactgaggcaaccctacttgggcccttcagcttgttaaccttcttgagttctatggattgtatcctgggtattctgtacttttggggctaatatccatttattagtgaatacaaaccatgcatgtcattttggatctgagttacctcactcaggatgatatt

SEQ ID NO: 4361 - DNA, 1000 bp, mus musculus
taaatgtagagcgtgcctactaagtggctgtcctgaagttcacacccatgtgtctctgtagaaagtgctctgtaaggaactggcctttgttaagctagaaaactcaattgctcatacaccagttgaccaacgtccaggttttcacaattgaaaagctgccctaaggaaaatgctgggggaggggaagtataaacattacccgcagctaagcgtggtggtggtggtggtggtggtggtggtggtggctccgtacttgtaacccctgaactgggagactaaagcagagggaatcactgcaaattccaggcccagtgagactatctcaaaacagcaagcaccgctcaggcctgcctctccagggtacatgctctcatttcacttgcctggttttttatggttcccatggttttcctttgagccttctgctatttttttctcagttatgataaactgatgtcttaaattgaactccacaaatagatacaaccactaatgtctagaaaaatcactagtttggggaaacttagcaggtccctagcctcaatatttttatactaagttgtgtttgagtggaaaagaaaacggcatctaaaactgaagagtcgagagaggagatatcaactaataatcagggagtgacagttcatatctttgttaccaaggatgactaagccaataaatcccttcgctaacaccagctgcccataatctaaatatatcagcaaccatcccccagcagtgtgcactaaactgctgagaagcattaattttatcaaagcttgtggagctcaagttcatgcaggtttatacccgagcgggttccaagaccactgcaagcctcttcaaggtgaccgaaagcctccaacatctattatggagggcctggggtcctctgagtctcttcaatgtctcttcaacactacccagcagcagggagctgagcagagctcttgcaaggaaagtctacaattgtctcatagtgcgaagccatgccttacac

SEQ ID NO: 4362 - DNA, 1400 bp, mus musculus
cccttcagctccttgggtcctctctctagcttctccattgggggacctgtgttccatcttatagatgactgtgagcatccacttctgtatttgccaggtacttgcatagcctcctacgagacagctataacagggtttcttcagcaaaatctttctggcatatgcaatagtgcctgggtttggtggctgattatgggatggatccccgggtgcggtagtctctggatagtccattctttcttcttagctccaaactttgtctctgtaactcctttcatgagtattttgttccctattctaaggatgaatgaagtatccacccattggtcttccctcttcttgatattcttgtgttttgaaaattgtatcttgggtgttctatgtttctgagctaatatccacctctcagtgagtgcatatctaatgacttcttttgtgattgggttacctcactaagggtgatatcctccaaatatatccatttgtccaagaatttcataaatccattgtttttaatagcttagtagtactccattgtgtaaatgtaccacattttctgtatccattcttctgttgaggaacatctgggttctttccagcttctggctattataaataaggctgctatgaacatagtggagcatgtgttcttattaccagttggaacttcttctgggtatatgcccaggagaggtattgctggatcttctggtagtattattcgaggctttttcacactttctcctttttttaaattagatattttctttatatacatttcaaatgctatcccgaaagttccctataccctacccccaccctgctcccctactcacccactcccacttcttggccctgacattcccctgtactgaggcatataaagtttgtaataccaaggattctctcttcccaatgatggccaattagaccatcttctgctatatatgcagctagagacacgagctctgagggtactggttagttcatattgttgttccacctatagggttgcagaacacttcactggcggttatcatgtagaagaatgcgaattgatccattcttatctccttgtacaaagctcaagtctaagtggatcaaagaactccacttaaaaccagagacactgaaattaataaaggagaaagtgaggaaaaggaagatatgggcacagggggaaaattcctgaatagaacagcaatggcttgtgctataagatcaagaattgacaaatgggacctcataaaattgcaaagagcattgtaaagcaaagagcactgtcaataagacaaaaaggccaccaacaggttgggaaaggatttttaccaatcctaaatctgataggggactaatatctaatatatacaaagagctcaagaagctgaactccagaaatt

SEQ ID NO: 4363 - DNA, 1000 bp, mus musculus
cgttgaccacactagttaacccaccctaacctcatttcaaagtccatatcctcccatttgcaagcaatacattacaaagatgaagagccgcaaagttgggaagggcatccttgtgcgccctcctagccttagcacaaaggttagctaccgtaagccatcagtaaatgatttaactccttaaactacacctgcaattttcatgtttgtgttctgtgtatgccttgtttcccagaacttagcacggttccacgcacccattaactcacaggatccattcaagcgcctgagaggaagtcagggttactaagcaactgaggacacagccttgccctcatcagagcttgttgtcaagtgctgacctggatggagcaggtgctcaaatatttattaaagaagtcaacaaagccagacagtttacatacacttctgaggaatactaatgccttcattcttaaactctctccagcacaacctctctcacttctgcttttaaaaacttcccagtttcttcaggaccctacctgaattcgcttatttagagaaaatgtagggcatgttgttacagaacctgtaactgagaaactggtcctagaagtgactctctgaatccatggttactgattggacggacactgatattcaaacttggcttttatttcaggttttatgtatatttattactggctttctgactcagggtcaacccttggactacatgtgtgccttgaactgtgtactcgtggaagccaaagggcaacttgcaggaattgtttctcgtcttgttctatgcctgtccttacgtagagcaggctgtcaggcttgacagcaagtgtttttactcgctgagctatctccatggctctgtttctctttgtatgatgtgcgtgcgttttcgtgtgtgatcacagtgtgtgtataccttggagcacttgtggaagctggctggggaaggccagcacttgtttgacagcatcttgccatctgactatgttgcttgagg

SEQ ID NO: 4364 - DNA, 1000 bp, mus musculus
aatatttttggtgaaaacaatcaaggggttttacatagagaccgtaagccaattttaagaaatgctcctacggtcttatcattaaaaatccaggaagatggctcagcggttaagaacactgactactcttccagaggtcctgagttcaattcccagcaaccacatggtggctcacaaccatctgtaatgggatctaatccactcttctggtgtgtctgaagacagctacagtgtactcacaaacattagatagatagatagatagatagatagatagatagatagatagatctttaaaaaaaatccagtgtatggagctggagaagtggctcagtggtaaaaacatttgctgctcttggaaatgcaataaaaaattcaagacacaaatgaaaacaaaacagcttttaatgcacagttcataccagcatagaaaataatagccaacatacaatgtttttcaaactgtccaaacctgagaaattcctgtcctctatgtcttgtaggctgagacttgcaactgccaaacacccccttgctttggcttaggacacaaagtttcatccagtgaacaatttggggtttaagacgatttgatcctaggatcagtgacacaacaaactacctatatagctgtcaaagtcccgactcaagcaggttccagcagctagctgggagagggagtggcccagtgcccctgcttgcctgtaacgccagcgaatcctaagataatctgtactgaaattggaccataacaatctgtttcttacactgctgtggcagaggacccatactgggtttccagcacctacatgaaagctcacaactacccttaaactccagtatctgatagcatcctctggtcttcatagtcaccagacatacatgtggtacacacacatacatgtaggtgagacactcatgcacataaaaatgactaagtcatttttagtacatagtgtattcagtacatagtgcattgataaaaatttaattattttca

SEQ ID NO: 4365 - DNA, 1000 bp, mus musculus
gggcccttatacatgattggtgagaaggtaaactagtctagccacacatggaaaacaatctggatgttcctcaaaaacctaaaagaaggtctgaaaatgaccagccatccagtcctggggggtttccatgagcgttccaaatcaacctcacagagacatctgcacattaatgtgtaccacagcactgttcacaacagctgagctacggggtcatcctatgtgtccattaacagagggatggaaaagaaaatgtcatacactagtacagtggagtttctttagccacaaagaagccaaaactatattagttgcaagaaaatgtatataactaggacaatagatcatataaagtgacttaaaccagtctccgaaaatatgttttctcagttgtagattctagatttttagatagatacataagatcaagtatgtatttgacacaaaagtagaagtgaaactttctagagaaagcgggattaataggaggaagagaaggaagaaaggcagtgtttgaacatgtgtgggcaatacgctcaatgtacagtacatacaagtgtgaaaatattctcatataacatagcaccctgtgtacagcgagtgacacaataaaacattcctgaaactaataaagtgaaaccgaagctaaatgaattcatccttttgatcttcctctcctaaagtgatcagcccaaatcccttagcactaaccaaattctctcaagcataatttaaaacaaacaaacacgaattctccaaccctgcatgcctttaacagaatagttggtcagtcctcagtgtgtgctgacccttgttctagccattgcggatggtagagctcttgagtctgttgtgaagaagttaggtgatgtcattgttcaagtaggaaatgtagcgtcaacgctcatgtagatccccagctgatgttaccaatggaaagactatggaggctttaggattcgaggcctatgttgaaaactggagttgctcacaggagatataa

SEQ ID NO: 4366 - DNA, 1200 bp, mus musculus
taaataaataaataaataaataaataaatacctttttattgattctttgtaacttcccatcatgcaccccaactccactcatctccatctccctagtatctgcccttgcaaccttccctccagaagaaaaaagaatcttgttttggaagctatagtatgttgcagtgtgtcccaaagtataacgttttatccacacatctttacttgcaaatgtccgtggcaatgaatcattggtctggccagagacctctggcttctgctcaccaccaaattatcaaaactgtatccttatctggactcctttcagatatactattgttgccctgtgtcatgaggatccttctgtcttggatctacagagccaagccttcacatgttccatcagttcatagatgggatagatgttgggatggaccaactcaaagccctggatctgggactggttggtagctgatctggtcagcccaccagcttttccacacccaacccattagggtgagctctccagcacttccctggctggctcacctaaagtcacaaacaacaaggggtagagtcagcttcccagttcttaggcactcagggctggctcactccagaggcagctccattgtgctgcccaggcaaggtatagggctctctctccagcctgcttgccacaggctgcaagggatgggtggggggagcaaatctgtaccccagtctcagtggaacaggaccagcaatcctgagtttctgttcttagtgctggctcacctgcaacattcccctctttcctgcaaacagggccagctctactatacttactgagcatggtgttgtgttgcagctgctgaggggtggggccagctctgctcagacagcaggcccaaaccagggatatctgcttatcctttggtgttaacgaaccttgcagctacagggccatggacccagacatggttctcagcacagccttagatggtgttgctggctactcacatccggattttccttactaccctcaagtctctagttccatctctcaccgttttgcacacaccagttatcttcttctctctctttcctctctcaccagttacttgctcatctaagtgactctctgggcagctgagccttcagggtccaatcaggatttctatggcccactcctgcagtatggaactgggccgggaccatctgcccatctgggtccaatca

SEQ ID NO: 4367 - DNA, 1200 bp, mus musculus
ttctggtggtgaaaggaattctcttagaccactggtgtgctcaggtttcataaagcgtatacagtgttcattccctttgcttgtaaaagggactcagagggagctagatgacattcaccttggcgaaagctgttgatggattcagacaaaacctctaaaggatccttttctgaattactcctatcctggaaaacacaggatttacgaaagactgaacccttcgatataattatcagggaatataattacaagagacaaaatctacagacttgctaatgcagttcccttcgttttctggatgatacagtgagtagcctcaaggtcacacagccttatttgtgtcctttccaccaaactacagtccctcattgcaacaaatgacaagaaggacaatgaccttcagtcattgctcctggacctactagaacagagctgccccctccctgaccttggagtgcagaatgccctagtaagcaagcaactctatggagggtgggagcaatctttccctgagatttggagcatatagcaacagcacacggggagcctggactgacccctccaagaatccaccggctgccttttcccaggtggggacatatagttcatctatcatgctcctgcttcggaagaatgagtcaccatcacctaaggccattgaaaagtcctgagagagcaaacactggaagaaactctttggttggtatcggtagccactgtggacaaggctgcatatagattcctagaaggctggaggtaggttgtgcttctgaacctgaggaagttcttttatcccagcaggctttgaacatagcaagtccccgaagacacgcggctagaagcatttgccagtgggttattatgtctgtttgatgtgcacaagcaagaaagttaaaaaaaaaataataattcacaggttgcagtgcagaaggcagaagctctgcagccctggggttcattgtaaggagcctcctgaagggaccccgaagacagggagaggtgctgaaggatcaactggcaagagtcagatagcacagctatgggactccactaactggccaggtcttccatcatcagctggacatctcaaacaacagaaacaaatgtatttatttgttgtatttgtaattcctataattaataatgatctctgtgtaggggttactgggtgatgttttgatatgtgttgtgtaacaatta

SEQ ID NO: 4368 - DNA, 1000 bp, mus musculus
ccgggagccatgttgctgcgcctgcatctggactgtgtctctatagatctcctcagtcttgccccgcacaaagttcaccaggctcttccgaatcggtggtgggcctgtgtcccgaggttctgggcaataggctaatccatcttggtgaccgtgagcttttggctcagccttcttcacggaagtcttgtgtctccttttcccatgggagctgccctcacttcctgttctggcccgactggagtccctggaggagcgtcttcttttcctgggtgcttccaccatctgagccgattcttcggtctgctttctggaattgcaggctgatcggctggacttccgctcccttttcctttgtttggatcgtgatgtcctgtcagaggtgctctgtggcccggtagggaggtccagcggttgagaggaagggcctggatggggggtttcagcatccatgttcaggttgaagtgaaaggctttctctcttccaggctggggttctggctcagtcagcagtggttgcttgtgaacagaacgtcaaagagtcctatagccgttcacttcacagggctggttgtctaaggcgatcttcagtatatgctgaaatcacaatcaagtctgacgtgaggccagcggaagaagatacttgctagcaagccagcaaagactgaggcttccctttttggtgttcctcatataggcctctagctgaaggtgtggcctggattatgggtggggcttccctaattaaattcagtctggatgaaacctgtgtgctctcatctcagagatccagactagaagtgggccttcccacttcaaatgatttaatgaagtgaaaatcactcacaggtgtgcccagatgcatttgggttttagtgacttcctgatatagtcaccttgatgccagcctgctgcagatgcctttgttgttgttttggtttttactgtttgtttgtttgttttttaaaggatattttctttattaacattgtgggctttctgt

SEQ ID NO: 4369 - DNA, 1600 bp, mus musculus
cggacacctgtcctctggtccggatggtggccggctatctgcggcccgccaagggtgctgcctcagcggctctgtgcttctgcctgtcccagaagctgtctggttctctggcacaccctctcacctgttcagactaatttcccccattaatttcttagctacaactaaccaacatcaattgttccactaatgcaaaagtttcatttcagtgatgctggtctcttgttaatctcatgtcgcacccgctctcgaccagcaagaacgacgcgaccaccagtccttctaacagcagtttattcagtcctgattcttcttgttcatatctcccccgaaccctgtgcctctcactccttttatactctctctcatccacgcaccgcaggccatgccccctcgccagtcaggaggcttcagctaatcagggcagcaggggcaaatctccaccaaattggattcacctgtatcctggtacacctgcgcagcactcaagatgtttgtgtcttatatgaggaagtcaggtgcaagtcatatgacttagctgcagtccctggcgcctttgggactgccgccacacccgctccccaccatctcagctgactccagccccagctgactagaatgacagaatcttaattgaaaatagcagacagccctgttagaaactttaaactttcgtctgaaatttcagtcaggcccctgtcatctgcattgctctcaacattcttatcgtccaagctacttaagaacatcccactgaactcttaacatttaatggctcttctaagccaaagttcgaaggcccctccacaatcctccacaaaacatgtccaggtctgtcacatcaatacccaactatgctgttatcaacttgtcttagggtttctattgttgggataaaataccatgaccaaaaagcaagtagggtaggaaacagtttattcagcatacactttcacattgctgtccatcatcataggaagtcagaataggaacagggcaggaacctggaggcagggaactgatacagaggccatggaggagtgctgcttattggcctgcttcccctggcttgctcagcctgctttcctatagaacccatgctggactgggccttcccctactcacaactaattgagaaaatgcagctggacggatctcatggaggcatttcttcaacccaggcttctactttgatgactcaaacatgtcaagtttatacaaaaacagccagtacagttctattgtccaaagctggtctgcttaacgtagcttgctgagagaaaagggtgtaggaactggattaactttaagaaataatatggctatcaaactacagtcattagttgtgttcagagataagataaactgagtcaaaactttgtttctagtttgactttatctctattcctccaataaagagggggggggggaaaccaagcagagggaacatagtgaatttctacagtgtattaggtatttgagcaatgtagagtaaaaataattaagtacatagtgagactctttttaaaatggcttattactctaaatttaatgatctttttaaaataagtagtggaagtgtattactagtaccagttga

SEQ ID NO: 4370 - DNA, 1000 bp, mus musculus
aatttgttttttctttattacttttatttccattttcagatcttgaatagttttatgcatgtctttcacttgtttggttgtattttcctgtatttctttaagggattcattaatttcctctttaaagacctctatcatcttcataagatttgcttatgaaggtcatcttattttgattcttccatgttaggatatccaggactttttctgttgtaggatagctgggctctggtggtgccatattgcgctgggtcttgttgattgtgtttttttttttgttttttttttacgtattttcctcaattacatttccaatgctatcccaaaagtccccccaccctccccccaccctcccctacccaccaattcccattttttggccctggcattcccctgtactggggcatataaagtttgcctgtccaatgggcctctctttccagtgatggccgactaggccatcttttgatacatatgcagctagagtcaagagctccggggtactggttagttataataatgttgtacctacagggttgcagatctctttagctccttggatacttatgctatcctttagctatctggttatccctggtgttggttagatgtaccgatgtggccaggactcctctttgaggcatgcagagccttgggtctgacagtggaactcaggaaacagcacactgctcacctctgctggctgtgccccaggtagacctagcaagtttgggattgtttgggaggggcgtctaaccttgaggtttctagagcccagcaggtctcctcagtagggaatttgatggaactggcaatgaagaatcatgtgtagcacaaccctctgtaggacattttccataatttacaaactgagagacaagacattcttcaacaggccaatgacatgaactgcaatactatttaagaccataaggaaaatagctatgaaattatgagttacaacagggcaggaagaagcttgaagacacattactaaggt

SEQ ID NO: 4371 - DNA, 1400 bp, mus musculus
tattattgtgtgagtggggatcaatgtatgatttcagctttagtcatgcttcttttaggaatgtgggtgcccttgcatttgaggcatagattttcagaattgagatttcatctttgtagattttttttctttgatgagtatgaagagattcctcatctctttttattacttactgttgaaagaatgttttattagacattagaatggttactccagcttgttttctgggtccagattgggaaaactttttcttgctctttaactctgtggtagcatctatctttgttgctgaagtgtgtttcttgtatgctgcaaaatgacgaattacttcacttgtttgattgtatttttctatatttctttaaggagttttttttttcccttttaagggtgtctacctctttgattatgttttcctttgtttctttaaggaatgtatttatatcctctttaaaggcctctatcatcttcatgatataaaatttaaggtcacagtctcattctttaggtgtgttggatatccaaggcttgctgtagtaggcaagctgggttcttatggtatcatattgcacttgcttatgttttttatgttcttgtgtttgcctttctccatcaggttgtctctggttggtgttggcaggcctgcttaatcctgagagaaaaaggtctctgggactggttgtctgagatagttgcaggcctctcacaaggcaggcagagcttgggatgtagagtatagatacttgatatcaggtataggtatgggccagaaggaagatggcacttcaatagggcaaggtagagcccacagctgcttagcatgctgggctccaggtgggcagggagggcctggatgtcttacctgtgtgtcctgggttagaacaggcatttggggacaaagacagaactgtgtggtgtggagaggtgtgctgaaattctattgcaggtgtaggaagtgtgaactataagctcttgtttaaataataggcaagtggtacctgttcagtgtccatatatctacactaaatagagaggtaaggtaaggctaagattcagatggcttaacgtacagcactgtcttccttttattactatcatatctttctcagtagttgcggtaatgcacaagggatacagctaaagcacaagcttatttatctggaaggcaatgaacggagaaattttgattttgtaatgataataaaatgacatggctatccatcattttctggaaggacaatggaaaggcaacaaccatccttatcttgatatagtgctttgaaccagtggatttaggctttgggagctcaggcctatgttatctccctatgttagtaggtagagctgagttatttagaaagcagaggccacctggtaccaccaagagtgaatgggttgta

SEQ ID NO: 4372 - DNA, 1600 bp, mus musculus
ggcggcagaaagaggtaagaaccagaggacatggaggacaccaggagacaaagcccactaagtaaaccaagcaaagctcatatgaactcaaagaaacctaagcagcaagtgcagggcctgcttgggtctgcactgggttctctgtgtacacatgattgatttcactttagtacttttatggtacttgtgaatgtgtgatcaggtgctcctctagttctgtttctgctcttgggatttttcctttgttggtttgccctgtccagcattgatgtgttttttgtttgtttgtttgtttgtttgttttgttttttttgccttagtatattttattttgttatgctttgttgttttctcttatatgtttcttccattctcatgagtgtcagaaaggggtcactataggagaagtactggagagtaactgggaggaatatagggaggagaactataataaatatatattctacgagaaaagtatcttttttcaataaagggaataagcaagtaaataaatgggaagacaaaaaggtcaactatgattgaggctatagagcactcacaaaaagggacttagtgtggctgcactccagaaggcccaacaaacagctgaaagagtcagatgcagatatttacacccaatcaatagacagaagcagctggccctgttgttgaattagggaaggctgaaagaagctgaggaagagggcgactcctgtaggaggaacagcagtctcaattaatctggacccccaagatctctcaaaccctggaccaccagacagatcgcatagaccagctgatattaggccctcaacacacacacaatagaggacttccaggtctgtgttcattcagagatggagcacctatccctcaaggactggaggcaccagggagtttagaggtcagatagcatggacatccacatggagataggagggtggggagaagatatgggatgtggaacagtagaagagtggacagggggaggagggaataaaatgtggagtgtaaaattaattaattaattaattaaaaaagacaaaagagccaaaaaatgacccaaatctaaagttaaaccccgtttattatcaaattctcaggtagatgttaaggaactagtccaaaatcattaatttttgctttaaaaattgagttattagaaagttaactctttccaatgctttctaaccattgcaaattggctttcagaagttgtagaccgtggtatcttttattgacctattgctatctaggtatgtattgatgtatctatgtatttatgcatctatatatctatgtatctgtgtatctatcttaaaaccactgatttgatgagtatttctcaagatcattcctaatacattttatattaaatattaataacaataggaataagaataattattctagttatctatacatgattcaatgtgtcttttgttatgtttattacttagattaaatgtcaagggactcttgacattcatagagaaaatagaagtttggttcttatcatccatttcacaaacacctattactctagaggacacaccatcctcttcttgcctctggagattactaacatcagtgaaacaca

SEQ ID NO: 4373 - DNA, 1000 bp, mus musculus
tcaaatgatggtttgctggggcacacaggtgaaaggatgttttactaaagcagaccacaggtgaaaggatgttttgctatagtagatgcaagaaaagatgcatgatgtttggaaagaatagatagaactccatggagagtggtagcttgagcgttgtttcactttgctcagacttgctatccttcgctgactacacacatgtattggttccccttacattgtattgctgactttgcttgtggtgactgcatagaaaaaaactcactggagaacttcttgtgagtttctagcagctgcttgctgcttctgcagatttgggtaagttggcgagcctggcattgtcttctggattgaaatacccttgctgatttgtgtatggtgtctgctgagtgtactggactgcacctgctgattcatgtttctgtttgctgagtggactggattgagaacaataaagtttgcaatctgaaaggactgtatctaagcaagtccacttctcccatattctaggaacctttcgaacttttctttttttttttttttgatagatataatttttattctgtttgttcaaagggtgaccatcacacaggaattcataacaagctcattcatgggctctgtccagatgtatgaaatcagaaggtttactctcagcgatgtaaaatatataccatgcaagaaacaaacccagttattttttctttttttttccatttttattaggtatttagctcatttacacttccaatgctataccaaaagtcccccatacccatccccccacttccctacccacccactccccctttttggccctggcgttcccctgtactggggcatataaagtttgcaagtccaatgggcctctctttcaagtgatgcctattaggccatcttttgatacatatgcagctatagacgagacctccggggtactggttagttcataatgttgttccacctatagggttgcagttccctttagttccttgggtgc

SEQ ID NO: 4374 - DNA, 1000 bp, mus musculus
cctgtgattggacagggaaagaggaggtggtgctaagagttgcagagacagaagcgtctgaggagggggagggaagctaagatggaggatgagggtcaggaagaagaacctgaagcagcatggctttaaatagccacaggtagctatggtatcataaaggttagaataattgggataatttgtctaatcttgtgggcagcttttatcattatcaattgcttctgaaactattgtattggcatcttgtgtaatgagaatttatttatatataaatctaacttgttaattataaaccttaagagttttgtttctactgggttgctgggtgttgtggcagcactgggtgagctgtcattgcctgggcctcgcgtggcagcgaagggaactcaggagctcctgcccagctggagagctggagggcagagagctgactatgctagggcagaaagtaactggataggtgcaggaacgtggaggttctacttggtaactggaatataggaccgctgactacaggggtttatgtcagagaaggagctagcagctccagggacaagcgaaacagagctgggaagcctgctggtctttttaaaaaatatttcccacaacataccataaatcaactcctttttttttaaattaggtattttcttcatttacatttccaatgctatcccaaatgtcccccataccctccaccacccactcccctacccacctagtcccacttcttggccctggcattcccctgtactgaggcatataaagtttacaaggccactgtcttctgatacatatgcagctagagacacgagctctggggagtactggttagttcaaattgttattccacctatagggttgcagatccctttagctccttgggtactttctctagctcctccattgggggcactgaatcaactcttagcaatttctacagtttgtcttattatagagtacacaacaagccctatatttatacaggaccttggcagtc

SEQ ID NO: 4375 - DNA, 1600 bp, mus musculus
agctaaaatgaaaatgaaaaggccagatagcccagaaatttgcaaaattaataataaccattctcaaaatcaagcaaagacccaaaaatccacaaaaaattaataagattgacaaaagcttagccaagtacctaaaaaaatcagagagagtaaatccaattttacaaaattggagaaaaaaatacagacgtaaaacagacaaacagagaatgccaaaaatcatgagaacatgctttaaaagcatacagtccaccaatttcgaaaatcaaaatatgaatgatttttcttttatgtaaaatctaccaaagataaaaattagtacttaagtaaatctctggtggaataaaaacaaaaacaacaacaacaacagcctatgtgcagataattttaccaccgaattctaccaaattttcaaagaacattcctcaaattattccacataaaaaaagttgaaaaatgttcacatcattttatagggcctgatttattgtgatacatatatcaggtttattttttaattggatattttatttatttacatttcaaatgctgtcctctttccattttcccttctgaaacctctatcccattccccctccccctgcttctatgagagtgcttcccacccactcacccactgctgcctccctgccctgggaggcattcccctaccctggggcttccagccttcacaggaccaagggcctctcctcccattgatgcaataggaggctggagccatgggtcactccatgtgtactctttggttggtaggttagtccctgggagctctggagtgtctgattggttgatattgttgttgttcctatggggctgtaatcccctcagctccttcagtcctttctctaactactccactggagacccagtgctcagtcccatggttggtggctagcatctgcctctgtttgtatggctctggcagagcctgtcaggagacagctatatcaggcccctgtcagcaagcacttcttggctccctcatagaagccatagtagggggagggagaagggatagttttggggaggggggtcaaaaccgggaaaggggataacatttgaaatgtaaaaaagtaaataaataaaaataaataaaacagatacactgaaactaatagaagagaaagtggggaagagcgttgaacacatgggcaatgggaataactgcctgaatagaagaccaatggtttatgttctaagatcaacaatagacaattggaacctcataaaattgcaaaccatccataaggcaaaagacactgtcaataggacaaaatgtatatgagttaaagacaaaacaaagaaagaactacattccagtgtgtgttatgaaaatacatacaaagttacaatcaattacttgcaaacaaattccatggaaatgtcaaaaatgggcttcctgtcagagaggcagagatgcttcaacataagtaaattgatcactataactcaatatgtaaacagaagaaagagcaaaaaaaatgaaattacccatgagcatcacattagattcagaaaagacaattagtaaaatctaatgcctcttcatgataaaaggtctagagagataagggcatcc

SEQ ID NO: 4376 - DNA, 1600 bp, mus musculus
tgcccaggaacagatggattcaaaatagaattctgccagacaccccaataagtattaataccagcatttctcagtttattacacagcatagaaaaagaaggatgatttcatagttctttttgagtctacgtttaccctgatatccaagccacataaagactcaacaaagatcattaattacaaagttatttccactttcatgtctttattttttccatttctgtccactgtttgtgttttcatagattcagtcaatggatttatttatacttttaacatattcattttattgaacatatttataataaatatgtttaagtctttgtgttttgacttagctatattgcttttcttggaggctacttagtaggattgctgggatctagtagtcacacattgtcctggcaagtactagttgtctttttatgattgtaggtagtagtcttggcttcaaatgactaaaaatccaggtgttgatgtcttgtttttgttgggtgggtattctaatccttggattctgttgccctttctgtgtcttaggaatgtgtgctggctgtgggtttcttggtacagaatgcttctaaatccctgacagttgtggatactggtgcttctgagtagaatatgttactgtgtattagtagatgggtaaaagaaatagggatgggatagaccaggaataaagtgtggcagaaatggctaagatggcccacactatggagtaaagctgggtctgccattaagttctatggagtacctaggaaatgaaattcaggccctggcagatggtcagttaaggggttgggatgggactggaacattggaaatggggagagagacctcaggcctgacttttaggtctgtgtggcagtggatttctagggagagtgtctttcctatttgctgactccctggcagttgttacctgtggtaccccgtgttggggctttaaaagaggctcaattacttgtctgttatgtgttaaatctgtttattgggcaaatatttaatctttaaatgaatctattttgtgccccctccttggtatttttcagccaaatgtaggtgttgtaggcgtataaccatatcacatctggaaatgcttactaaattatcatcttcaccagcatagtgaccagagcttcctcttttactgttttattataagcacatacttctctatctcctctcatcttatagcttttcatattcatatgcaagaaaccagcattaacataatatccctagatattagattgttttattttgtttatgtgattttgaggagtgagccctgggcatttcaagtgatatacatatgttctactgagaacagactcacttttaattgtctatttatgcctgttatataagcctctagatcaacaaattctgcttatagtaaagatatcaagaaatattagttgaatgagtaaatagtcacttatactttccctaaattatcatctgccacacagtgtttaactattccctttgtgagaacagtgcctctgtaaaattaattccattagaaatatgagtctgataaagatttctgactctatgttttcatataaacagaactcacttcaaaataaat

SEQ ID NO: 4377 - DNA, 1200 bp, mus musculus
tttaaaccctgagccatctgtcaagtacaaacctcacttgattgataatgtatagttccacctattttcccacaagtatagtaatgatattttttagtaacttagtaaaatttcaattttctatttgctacatcatcatgatgcatatttctgttgattgacattgctggaaataattttactgattcatgatctaaccgaacacttttagttcagaaagggtttattttatttaccattcaatgttaagtccatcatattggatgctgggacaacaagcacttgaagtacctgcttgcattgaagtcacaactaggaaacagtaaaagatccataaataaatcttgtctaattcctgttcttcagttacaggaccactgttcagcacgcagcaggagattggtgtgacccgtccagcaggtccagttattcgagggtcttgaggggaccttctcctaagaaccaaatggggggatagagagagatgaggaacaagtgcaagaatgacacggaaacattctgagtcgcatcaaggtcccactgtattgagaaaggctcaaggcttaaatgcacaagcaaagggggaagtacttttcagcaggaggggtggggcagtggaaatttttcttttggcagttacacggggaagcagaaacttggtggtatcagggtgtggtcaggacatctggcgctgacttagggctggaacattctgtggttgttctcgaacggtgcatcagtggcccgcttttgacccccttttcttctcgggggagaggcccaattcagagatcaggacaattgtgttgtcttaatagctcccaacattggtgcaatgcacagtggatgtgtgggatcttgccacttatcatttctcaaagttataccaccagtatcaggtctcccaagagattttctgattttatgtcctatcaatttgacaatgaatgcaaatcatcactgatatctaggaaagtactgagtactgaaagatgactgttatgctggaaatcatacgatcaaaaagagcttacagctagtgttcacaaagaaaacccattttgattataaaattgttgaatttacagtaataaataaaaagtaaaattgacagcactaaatgctactacaaatgagaatcacatgacctttcaaaagctgatgaagagggtgttgcaagctgcaaaaatgtgagaaaac

SEQ ID NO: 4378 - DNA, 1000 bp, mus musculus
gaatccacactttggtcttccaaaaactcacgtgatatgcactcactgataagtagatattagcccaggaacttagaatacccaagatacaatttgcaaaacacatgaaactaaagttagctttaaggtagatttttggaattttcagggcttactgtaataggataacgggtttcttgtggggacaaacttctctagctgttgttgactgtgttcttaacatgttgtttatgcatctcagtttgttatgactgattataagtcttggcatcactgagttttgttttatattgttttgttttgtcattgttgtttttgtatgggtgttttgttccttggcttctgttttctctctgtatttttagtcattgtggcctagactagccacatgacacatcgcagctagcatgacaagtggcccaacagagagtctctgcccaagttgagaggtaggacaaagtgaaaaagagagaagacagaactggggctagtgttggacacagagacagtgaaaagaatagcacttaggctgcctttctggagctttggtggccagtgtggtctcagttccattaggaagtctctgtctgagttcatctacctactctggctggtgtgggctgatatgttcttcttggagaggtttgcacctgaacaaatcatttcaaccagagttgaggacaggggcacagcagtagaggctggctgtgggagtgaaaaggctgtcagtgagttggatctttgggacatgaattgagattgtaggagatttccaagggaaaaacttattaaaaattcatttttacattaagcagaagtgaaatagctaaatcctcaattaaaatactttttaaaggtcacagatatgaccaattaaatgctattcccaagattttctcaaacaagagaattttacaaagataactaaaaggaagaacttcacacacacacacacacacacacacacacacacacacacacacacacacacacacacacc

SEQ ID NO: 4379 - DNA, 1000 bp, mus musculus
ggtgtttaaattgttccttattaacagtaatgcttgtctatttattaaaaagagggcttttctttattttttaagaattatttatttattttatgtatgtgagtacactgccactgtcttcacacacaccagaagagggcatcagattctgttacaaatggctaaactcaaaacatctggaagtacagtcaatgctcttagccactgagccatctctccagcccaagagggtttttcttaagaaaagaaaataacttgtaataacatcattcagaaggcttagaaaggaggattagtacagttagaggctatgaggatagctaggtctgcatagtgactttcaagtcagcagagcactaatgttcatattaccagaatgtaatattcaatctgccaaaggagaaaccatcaactgtttccccagctgtgatgtgttgaattacaataatgaacagccctgcaagacatttcagtttggcaaatgtggcacacacgttgtcttggtaaccaacagctgtctaatagaactttctaaacaggagggaaagaagtaatacaatgatatcaggcttctcaggcctagaacaaagtatgtgaaaaatattatgtctaatgaaaaaatacaggtatcatttacttttgttatttttcaaagtagtgaaattacattaaaatattacaacatttaaatactaaggaaattgtacttaaatctgattattatgaaaataagaggtaagtttatccacataaataatatcaattaaaatatgacctattgccggatgtggtggcacatgcctttaatcccagcactcgggtggcagacacaggtggatttctgagttcaaggccagcaaggtctccaaagtgagttccaggacagccagggctatagagagaaccctgtctcgaaaaaccaaagagaaaaaagaaagaaagaaagaaagaaagaaagaaagaaagaaagaaagaaagaaaagaaagaaagaaagaaaga

SEQ ID NO: 4380 - DNA, 1000 bp, mus musculus
acccaagtatttatgtgtaaacacaaatgatcatggataaacaaaatgcctgtggaatgcaatttatgtgatatatcaatatagttagccataaataatacttattatgtatgtatgtatttatgtatgtatgttcatcccagtctctgctgtgcctcctggattccccctgccacatatacacagagttcctccttccattcccatgccctatctctgaaaggcttcaccccttccccctcagcatcatgtccctgcagggttaagtacattctcttccactgaagcgagacaaggaaacatattttcgaacagatttctctctcagtcaggcaactcttttaaggacagcccacagtctacctgttgggagagccacatggagactaggctacacatctgctgcatgtttgggatgctaggtccagcctgtgtatgatctttggttggtgtggctcactctctgagagctcccaagggtccaccttagttgactttgttggtcttcctgtagggttcctatcattcccccaactcttcaataggtgtcctggatgtctgaccaatgattggctatgtgtatctgcatctgtttcagtgagctgctgggtagagcttctcagaagactgttatactatggtcctgtatgtcagcataactgagtatcattaatagtgtcagagagtagttcttacccatgagctgggtcttgaattggacagatgattggttggccatttctcctctgttccatctttgttgcttcatttcttatagacaggacaaatgctgggttaaaagttttgtgggtggtttggtatccttatccctccatgggaggtcctgcctagctatttgggaggtggcttcttcaggttccatatccccactgctatgcatctcagctaaagggatccccaacattcactcttgagagctttctccattccaagtctctaggaattcctagagattcccgcaacccaagcctgaaactat

SEQ ID NO: 4381 - DNA, 1400 bp, mus musculus
aaacaaaaaatccaacatagctaaaagagcccatgatgatgacgatgatgatgatgatgatgacgacgacgatgacgatgacgatgatgatgatgacgacgatgatgatgatgatgataactactgaatatcactatcctcaacctaaaattgtgctaccgaggaatagtatttaaaaatatggtactggcacaaaatcagattgagcaatcgattaaatattaaaatttaaataaaatgtattccattgtgtaaatgaaccatatttttctgtatccattcttttgtcgtggaacatctaggttgtttccagcttctggctatcacaaagaaggctgctatcaacatagtggaacacgtgctcctgtggcatgatggggcaccttttgtgtatattcccaagagtgttatagctgaacatcaaatgagagatggggttgccatctcacagtcacacctctgactcatagctgtttctgtctgaaaaaaaaaatacagggatggaaatggagaggaccctgaggaaaagaaggtctagtgacaggcccaagtgggatccagctcaaggggaggtcccaaggcctgacactattactgaggctatggagcgctcacaaagagggacctaacatgactgccctctgaaagacccaacaagcagctcaaagtgtcagatgaagttatttgcagccaaccaatgatcagaagccgctgaaccttgttgttgaattagggaatgctagaagaagctgaggagaagggcaattctgtaggaggactagcaatcttaattaatctggacccccgagatctctcaaacactggaccaccaaacagacagcatacaccagctgatatgagccccccaacacatttccagtagaggacttccaggtctgtttttgttcagagatgatgcacctaaccctcaagagactggaggccccagggagtttagagatcaggtggggtgggaggtgagggcatccacgtggagaagggatgaggtggggtggagttgtgggatgtggagcagtcagagggtggatggggagggacgaggtatggtataaaaaatgaaatacaaataaaaataaaataaataaataaagcattccacacattaatggacatctgatttttgataaaggatccagagtacatgcgggaagacatgcagcatcttcaacaatgtgtattggacaaactggatgactgaatatagaatacttcacacttatgacattttaaaaaactgaactccagatgggtcaaagacttcaacatgaaactagatacattgatatgtatgttttaaaataattcatttttaatcttaccttacttatctatagagaaaaaaatggacataacttttttccaagtaacaaaatgattga

SEQ ID NO: 4382 - DNA, 1000 bp, mus musculus
tgcaagcaagatctccttttacagggaagttgcacagatatctggcatttggacccagatatagctgtctcttatgagactattccagggcctagcaaacacagaggtggatgcacacagtcagctattggatggatcacagggcccccaatggaggagctagagaaagtagccaaggagctaaaggggtttgcaatgctataggtggaacaacaatatgaactcaccaattcccccccacccccgcccgcccccggagctcctgtctctagctgcatatgaatcagaagatggcctagtcggccatcagtggaaagagaggcccattggttgtgcaaactttatatgcctcagtacaggggaacgccagggccaagaagtgggagtgggtgggtgggggagagggtggcgggcatgagggggacttatgggatagcattggaaatgtaaatgaaataaatactcaataaaaaaaaaagcaagacactttttttaaagggactgtgttcagatccagccacccatagggttgtacacaactacttgtatctccaattataaaacatcattatggtctggattccatgggcaacttgtgcacatggtgctcatgaacacatgcaaacacatgcacatacacatatataataataaataaatataatcaatacataaataaatataaaaggaaagcatcaatgtcatactttaaaaaaggttacatatcttctgctgccattttaaatctagacctatacaatgttccaccacaactatgtgccagcaccccctttgccaatgggtctaaacctatgcagtacattaatgggtacagctacaaagaggaatttccatgatcaatgctagcaagcatcagctagataatggtaaacatgttaattggaggctcatgctggatacaagcaagggaaatattgaataattgtcttgtttaggaaaaattgcagattgcagaattaaaaacagacccagcccctgg

SEQ ID NO: 4383 - DNA, 1000 bp, mus musculus
tccaaactaagagtaggattccagcaaggtaaagatgtgccacaaagtcatttaaagaaccatctatgaatcatttgtcctccccagcaatgggcaaagagaagatgacagccttttcctcttgctagcttgatgcctgacttggtaggcaaagctatcttatgcctagggctcacaaaaatcaaatcaaatcaaggcagcacagcatgggaagagaaagacagagagagatcaacatgtcacccaaaatcctgctctccagtgcatagcacaggcaaggaccatagacatctgcttcccagcatgccacacagatgaaaattttaagagagttaaagatctttagaaagtatgcaacttatccttcagtactgacttttgatgccaaatgaaaataattaagtgaatagatagatactggattgacaaaaaattgagtattaaatacatgaatgttttgggagccggccagtggctcacatgaactgggtttcacctgggaggcaaactggggctgaaagaaaaggaaactaggtggagaagagagagatgaagccaagacagtgttctgatcaaggctcaaatgtttaatggcggacatgctttataaaggagcagggaggcccattcctgccaattcatccttggagcccagctgcaggtgaccaagtgctaagacatagtctctggaatagctgggcagcctcccagcagggagcatcgacagtggctgaacaatagagtgatctagggaggcaggctccaccctaggtaatctccttagtggcagcaaagtctaggtctggttcagcctgcttcaggttagaggggaggttacatgtatgtagtcaagtggtggactgtttaagacattcgataagcaaacgttaatactgtaaacattaggtattcaatgaaaatggtatacgattagaccaatctaatccaacaactgtttattcactattttcacaaaactgatgctactactctgaaatta

SEQ ID NO: 4384 - DNA, 1000 bp, mus musculus
agggagggaggaaggaaggaaggaaggaaggaaggaaggaaggaaggaaggaaggaagaaagggaaggagggagggagaaaaatagagagagagaaaagagaaagagagagagaagagagagagagagagagagagagagagagagagagagagagagagagagaagagagagaggaaaagaatttcagagctggggaatttgtttcaatcagtaaagtaccggacatgtagcttgaagacctgagttcagattcccagtgccagttttaaaagtcaagtgtagcactgtgcatctgtaggcttgtagagcttgctctttaacacacggaaccagcccctcatccccaacctatcatttctggcatgcaaaatagacaaaaaataatgtaaatcttcagaaaagtgtaccagaatacagcaattttggttatttacttagaatgatgaatacagtaaggcagaatggtactggtgaattcttgagatagaatgatgttctcaatctggaacatgtcgatatagctcaattataaatgaaataaatgctgtgctaatggctgtggtataggatgaggtttgaagccatgttcatgtctttgggctgttcctatgcagaaaggttgagtgcataactgatctgagggtcctgtgctgccacctgaaaccatggtcatgtgcaagccttgcagcagtgttatgtattgatgtctgtggcccatgataccactgaaggtcatgttgatcaccatggccttttctgcagcctgttgcttttgcagggatccatattgttgtaagtggtctgcctgccacctgagttgatattcataattcattccaccttttagggtattgtgtgggttagtcatccttggtcaacagggggtcatattgtggtttgtatcatcaccagaatccacgaggatgcccaggactgtgctgcttcttgctgactgtaaagatcaaggaagctaccttggcagtgatactgattactcc

SEQ ID NO: 4385 - DNA, 1200 bp, mus musculus
aaaatatatatacatgtatatatttatatatacatgtatatatttgaacatcctgagtgaggttacccaatcacaaaagaaaacacatgatatgcactcactgatatgtggatattagcccagaagctcagagtaatcaagatacaattcacagaccacatgaagctcaagaaaaaggaagaccaaagtttgggtccttcggtccttcttcgaagggtgaaaaaatacccacaggaggagacacagagacaaagtgtggagcagagaaaaggctatacagaaactgccccacatgcagatccatcccataaacagtcaccaaacccagacactattgcagatgccaacaagtgcttgctgacaggagcctgatatagctgtctccaaagaggttctgccagtttctgacatatgcagaggggttggcttgcagccaaccagtggactgagcacaggtccccaatggaggagttagaaaaaggaccgaaggagctgaaggggtttgcaaccccataggaagaataacaatataaaccaaccagagctccagggaactaaaccaccaaccaaggagtgcacatggagggacccatggctccagctgcatatgtagcagaggaagacattgtagggcatcaatggaagaaaagccccttggtcccagtgcaggggaatgcaagggcagggaggcaggagtgggtgggttggtgggggaacaccctcctagaagcaggagggggtgggatagggggtttctggggggatcgggaaaggggataacatttgaaatgtaaataaaaatacaaggaaattgttttattttataagcatataaattaaagtacattagagaagacatttttcatacttatctttagaatatatatatatatatatatatatatatatatatatataatatgtatgtatatatatatatgtatatataaaatgatataaacttaatttttgtgtaaagttctatgtaactgctctacattttaggaaagactatacatcctgaagtatacattccatcattcttatagttttctaagggtacatattaatactagaggaatatttaccactctagcagccatatagaacactttgaaattaagattctattttatttcacatctgtaactagacaaggaatgatcattaacctacgtggtttcatgctggcaacttagt

SEQ ID NO: 4386 - DNA, 1600 bp, mus musculus
tcagccatgaaatcattaaattcctgaacttaataaaaactccagaagagggaggtatttactctcaagtgaaaaaaaatgggcatatgtgaatgaataggattgaaaattgtattctgtatgtaatgagtaacaaatgattaacataaaaatatgcagttaaaattctaacttctgtggcacatgattggttcttttgttacttggagttttagtttaaagaaaattacattcaccattaaaacaatttccctaaataatagcttgacaatataacatttaaattttggtgcatttcaaataaagattaatattcatacttaaatgtatttgcatacatacttaataatcaattgtatagtaatgctcgccttgtttaaattacttaaaacttatgcacatgctataatatcagtttttttaaaattgatcatcaaaatattcatcaatgtttatggatatgtaacttttcatgcatataaattctaagcaatttataatcaataataatgagtgcagtggttaaatttccagttttcttttttgaaaagaaaacggaatgaaatgcaatagaaaagtagtatatactagctcagtcctttctgcagagacagaactctaactggtctgctccagtgaagacaccttattttgagacatcctagaggatccagtatactcagagcagttggcttcctatcatgagccatcagcactcagagcaatcaggcaactgacaccacagcctgaagcatcccaagagatctgctgcagacagggcttctctactcccctctgaaaaactcccagtaggaaggacccacaggtggtctgctacagacagggcttcaggactactgggagcctgaagtaacccagggacaaaagaggcagaatccagacagtcacccagagcaacaaacaccagggataaccacatagtgagagacaagcacaaaaccataagcaacagaagccaatatacgtgggcatcatcagaacttagttcttccaccagagcaagctctgaatctatcagcacacctgaaaatagggaagatgacctaaaattctatctcacgaagataatagagtcctttaagaaggatataaataactcactgaaagaaatagaggaaaatacaggtaaacaggtaaaagcccttaaaaaggaaaacaataaatcccttaaagaaatataggaaaacataatcaaaaaggtgaaggaattgaagaaagcaatccaagacctaaaagtggaaattgaaacaataaagaaaaaacaaatggatgcaaacctggaaatggaaaacctagggcagaagtcaggaattacagatgtaagaatcaccaacagaagtcaagatagaagagaaaatctcaggggtagaagatactgtagaagatattgacacacctgtcaaagaaaattcaaaacatgaaaaaaaaaaaaaactcctaacccaaagaatccaggaaatttaggacacaatgaaaagaccaaatctaagaataatctaaatagaggagaaggaagattcccagatcaaaggacctgaaaatgtctacaacaaaatcatagaagaaaacttccccaacc

SEQ ID NO: 4387 - DNA, 1400 bp, mus musculus
cattatgaaaagacaaaaatctctgaataataggaatagaggaagaagaagaaacccatatcaaatacagagaacacaatttctataactaatggaagatttatttttaattaaatattattacttacttaatcactttatatcctgctcactgccccctcttctggtcactccctcccacaatccttcccctaccctctgtacgctatcctttaggagagtgctgtcccacctcccacatggttatccttctaccctggtacatcaagtctctgctgtggagctaggcgcatcctctcccactgaggtcaaacaaggcaatccatacagaagaacatattccacagacaggtagtaacttttgcaatagctcctaatccagttgtccgggacccacatgaagaccaagctgtgcatctgcaacttatgtgtgggaggcctaggtccagcccaggcatgctatttggttggttgctcagtctcagagatccccaagagtccaggttagtagattctgttgatcttcctgtcaagttcccatacccttcagggacctcaaggtcccttacccttccatgagagttcccaagctccatccactgtttggaagtggatatctccatccatctgagtcacttgttaggtgtcctttcagaaagcagccttgctagactcttttgtgcaagagggactggtgcttgtcaatggtatgggtctcaaattgggcaagtaataagttgcccattccatcagtctctgctccatcctcatccctgtatttcttgtagacaggaaaaatattggattgaaacttttttggggtgggttggtgtccctatccttccactgtggttcctgcctggctacaggagctgagctcttcaggttccatatcgccactgctgagtcacagctaatgtcaccctcattgattcttaggcatatccctaatcccaagtctctgtcacatcctggagatgccaccctaacacttccacataccagtcagttgcagatttccatttattcgcatgtccagctggttttctcccctgtccctcaccacacatgatcatgaagcagtcctaattcccctcctcatcgctcccacccagtttcctccctccatcgccctgttgtaagtattgtatttccccttctatgtgagagtcaagcatcctcactagtgccttcatccttgtttagcctttttgggtctgtggagtgtacttgggattgatttaaatttggtaagtagtatcagtctagataatcgtccatgtcatcaagattctccaattctagtgtatgccccagtacaggggaatgccagggccataaaaggggagtgggtgggtaggggagagggggtgggtggctatgggggacttttggtatag

SEQ ID NO: 4388 - DNA, 1000 bp, mus musculus
acatggatgctgtgaagaactctttatagacaaacacataaaatactacccctggaatctattaatatcaatcgcgtataatcagactataaccacaataagttcccattagtgaaaactgagagacttctatgtatgtttaaaacataatttcagaatagaaaaattaaaattcacttgcatggccaaactggccatctaagacagtttgaagcgaatgagcagcctgctctgggcccctaactcaaaacaattttcctttgctccttgtgaaggctgcaggccttaaattcttaaaacgtaaaacacatcctatgaatatacagacctcctttaggggaggaagttgtctggtttcctggtagaagccagtcatacttactatagagttgatcagcagttcatcaggtgagtcctcaagtaaagtgtcatgagacactgcctctatttcggttctttccagatttctagttcgcttagggtattcatttttctctctgctcaatcactccgacatacttagaaaaagtgattctttaaaaaaaaaagataaaaataacacactctttatagctaggatgagccactccctccagggtcccttactggagacaactcacactgccacaaagactcttccaaagggcagaagcatttgggcaaacggctaccggtaagagtcatctgtccctgatcgccaccaagcctaacactgtcagggttatttccagcccttcctttccgagaagacgagtgcacactcctacgctccagttgcgcacatggtccaagactcctctgtctccacgaatgtgacatctaagggggttctggctatgcctccagagcccagggacgccttcgccctcggctgccacctaccggccactgggctcctgcttcgccccgggccatcatgtctgctgcagcttggctcgcaccagcggcgcgacaataaacaagtgccgcggaccgggccctgcacccgctacccagcaga

SEQ ID NO: 4389 - DNA, 1000 bp, mus musculus
gctattgtggggacattaaatatttgctgtgtcacatgtattgtggcctctgctaacatcatgactatgctttgctgttcctaccagcgcttatccacagagagtgcggtaggtgactttgtctttgtgccttcaacttgactgtactttcagagactcacatagctataactccactacaaaagacaaggtaatgggaccttcttagtgatttcattaattatttcaacttaccgagcattgtgtatgtaaaagaagactaaattatgcaatttaaatatctcacaatatattgaagaaaatatttcaaaaataatatctcaaaataaaaatatttaatactataataatcttctcaaccaaggctatcaaaagagaaacataaattattaatattttgcagattagcttgtatgcatcattgtatcaatatttccctgacacaatctgtttactatttaccagggtgactttcaatcgctttctttttatttatactgactatacttatgacaataaaaattatgcatttgtaatgatgtctaatttgatagggaaaatctagaattacttcatcttgattatattattaacaacaaataaccagccagatgttagcctacacttatagattacatatttaagtttttatttataatcacttgataactgattaagatttatttattttcttttttctgttttcttttattgaatattttctttatttacatttcaaatgctattccttttccaggtttcccctctgaatagctcttatcacatctctcacccctatgtctatgagtatgttccccagccacccacccacacctgcctccctgccttcacatttccttacattggacatcaagccaagggcctctcctcccattgatgcccaacaagagcatcctcagctacaaatgcagctggagccataggtccctccatgtgtactctttgcttggtggtttagtccctgggagctctggcaggt

SEQ ID NO: 4390 - DNA, 1800 bp, mus musculus
taagaaatgaagcacactcagtactgcctataggtcactttgtacttagcaactttacttgcataaccaatacttcacaaatttccttagcttcttttcatgcatgttattttatacttcacagtaaaatactttcatgttttatcaatattatttatttatgctaagggtaattttattagtaatattagatgatttctgtattgcagaaaaataattctgaaatgttttaaatgcttaccgttggttttaacaccatattaatcacatataagtaacatattgattttgacatcactcaactcagattatttgtttcaatgtctgaagtaaacataaatataacgggatcaaacagaacaagaaaaaaaatttggaaggttaaaaaaacttgtgtgtgtgaaatttacagaatattggtgaaagaaatcaaacaagacttacattaaaaagaaaagatacaatttaaaagaattagtgttcttatacctaccatgttatctaaacattatacaaatctaataaataacctgtgagcccaagtgcatgctatagagagggagaaataattttgaattcatttggatccacaaagaattctaaacaactaaagcaatcattaaaagatataactgatttgaacgcattgaacagaaatttttttaaaaataagggtagcatttctttgtcatggaaactgaaaacagaatgaaaaattatagagctcaggaatgtatggctggctgatgacttagcaacttccaagtacaaacaatgtgagggtgccttgacctgtagggataatcagttgggacctagggcaaaggagagagagtgggagggacaagaaacaccttgagggctggagagatggcttagcggttaatagcacctactgctcttctgaaggtcctgagttcaaatcccagaaaccatatggtggctcacaactacccataacaagatctgacgccctcttctggagtgtctgaaaacagctacagtgtacttacatataataaataagtctttaagaaagaaagaaagaaagaaagaaagaaagaaagaaagaaagaaagaaagaaagaaagaaagaaagaaaaaaagaaagaaagaaagaaagaaaggccttgaaatatgagaataaaatgagagcaagtcaattagactgatcaagatctggaaaaatttattcaagagtgataatataagcataagcaagaggaggctccaaggaagggggaaagagcctgggggctctctgaaggtcaggtgtcaatcttcagatccttgaaccaacagtgacagtgtcctctctacccacaatcattcttactgttatgaccacaaatgttctctcagggttatgtaagctagaaaatttccataagtcctggctgaagccatagctcccagcatgtaggaaggaagtttttcagtgctgtgaaatacatgcacacacatacacacacacacgtgtgtgtgtgtgtgtgtgtgtgtctatttgagagacacacacagagtatggatgtatatgagacacacatacggagcagagagagagagagagagagagagagagagagagagagagagaaagagagagagagagaaatgaaacatgatgaagtgagactggaatttaccacatacagaaatcaattcaaaacataaatgaccagcgtacactatctcaaactatataagtgataaaaaatgtcaactgtacatgcccagttatcacagtgattgcttatggttgactctagattcaaaaaagtgaaagcaaaagtataaaaa

SEQ ID NO: 4391 - DNA, 1200 bp, mus musculus
gtgatttaataaatcttatttataaaacacatgatgatatcatgtagactctgtgggagttttcagaactaacagaaatatttggtttatatgtagatgaaccaaacagataacttcctaaaataaataacattgaccatcagaatgcttgagtagctttataaatttacttttattaattaattattttatgtgcatgggcatttggtcagtgtatatgtcttcccacacatatgtgcctagagcctgaggaatctagaagtgagcatgagattccccagagcttgagttccagagagctgggccactacttgtgttcctggactccaatgtgggtctttggaaggaggtgttagtgatgttcatggctgaagcatagctctggatgacacctgagtacttttggaaaaaaggaagcagtgacagaacctgaatccttaggtagaagactgaactgagagacaagtgggacttccctgtgggactctggaagactgaatggcaaaagcaccaggaaggccatgcacacaaagcaactcacgcatctctcacggtgggggaaacttcccagaaccttgaccatttcagtcattttgtgtactttagtaagggtgctgatatatcctacacagttatcacctttgggagttttcttagcagacgtgtttaaacatggatagacaaagtcaaaagcagtgatgttatagcaatgtcagaggtgcgcacaggaactcagaagacccagcacgttacctccctttcttcagcagttacaagcagacagagacatgtcttagaagtaccctgctctagctgttgatatctggggcacaggcaaggaacattttacagcgataaaattaataacatctttccgggcagtggtgacacatatctttaatgccagtacttgggaggcaaaggcagtaggatttctgagattgaggctagcctagtctacagagtgagctacaggacagccaggatttccaaaaagatgtgcccagacctctccactctctggggcctcaagtttctcaagggttaggtgcttcttctctcactgagaccagaccagactgacatctgatgtatatgtatcaaagccctcctatgagctggtatatactacctggttggtggctcagtgtctgagagatctcaggggtccaggttacttgagactgctggtcttcctat

SEQ ID NO: 4392 - DNA, 1600 bp, mus musculus
accagaagttcttttatccttgagaagagttttcctatcctaggttttttgttattccagatgtatctgccaattgccctttctaatttgttgaagaattgagttggaattttgatggggattgcattgaatctgtagattgcttttggcaagatagccatttttacaatgttgatcctgccaatccatgagcatgggagatctttccatcttctgagatcttctttaatttctttcttcagagacttgaagttcttatcataaagatctttcacttccttagagtcacgccaaagtattttatattatttgtgactattgagaagggtgttgtttccctaatttctttctcagcctgtttatcctttgtgtacagaaaggccattgacttgtttgagttaattttatatccggctacttcattgaagctgtttatcaggcttaggagttctctggtggaatttttagggtcaatactttgtgaactactgatattctgtaaattggaatccaactagtaagtctttccattatgttctggattttaattaattgtaccagggagatgttcaggaaagctaaatttcaaggcctctttcttatagctctctaggaattttaatctagcaacatggctggcaaagggatcactgtcaaaaactttctagatctttgtgatccgtctagaatataaacacacactggattacagcatgatctggctggaagacagacacagccttagtacacaccttcatgcccaaacaatgtaagtaagatagacgtaaacagtcaggtgtgaaagtggcatctcatgggagggcagttcagtgagcggagttcaattgaattcagttaagtcaggtgagggagctgagtggactgagtcaggtagttcagttcacacagttctgtcagtcagtgcagaaggcagtgcagtgtggatttgaactcagttccattcacttcgggcagcactgaagccacagatttaaaaatgaaccagaagattagaacaaattgccagagctattttgaggccacatgggataattcagtgagaaactgagagaagccagattgaatccgtcagcatggagaggagtttgagccagaaaagtttagttgaatcagaaaggcagagttcagaaagaactagaaagagtgagtcattcaacagtaatcctttgagattataattgcttcaggtgaataaaagatactttttacgcagctcatccaagatatactttaaatttcttttgatgatgtgaaaaccttgatgaacagaactattttcaatttaaaaaccaataaatttaataaaactgaaaaactagcatttctcaacatcttaaaactcttgcacattaaaataacctgaaaaaatgttcaacatccttaatcatcagggaaatgcaaatcaaaacaaccctgagattccacttcactccagtcagaatggctaagatcaaaaattcaggtgacagcagatgctggcgaggatgtggagaaaggggaacactcctccattgttggtgggattgcaagcttgtacaaccactctggaaatcagtctggcggttcctcagaaaattgg

SEQ ID NO: 4393 - DNA, 1200 bp, mus musculus
ttatctagattcattaaaatctcaagtagccacaatatcaaaagtagctggtaagggttcttttccatcaaaatcctcctgtaaggtactttacttggtacttatgtcataccttactgtggcaccatagaaggaaatagcattgttccctgaaacactgctttgatccatattgttggtgtgttatgtagcttcttaaaataaaagtttggaaggacacctgggctggtaactgcaacctcccaaagtcagcatcctaaaaaacaaagaacaagttttatttactggtctctaaaattggaactgagttatgtttctgctcttaggagcagacatggcatcctggaattcttagaggatgtgatggcttaaatattcttggcccatgggaactgacactattaggagatgtggtcttgatagaataggtgtggccttgttggaggaagtgcctcaccatgtagggtgtgcattgaggtatacacttaagctctgcccagtgtggaagagaccctcctctagctgcctccagaagagtctccttctggatgccttaggatcaagatgtagaagttctgacttctctagcagtatgtctgacagcatgctgccatgcttctggccatatgataatggaatgatcctctgaaagtgtaagccagcccaaattaatagttgtactttatatgagctgccttggttgtgatgtttcttcacagcactggaaactctaagacagatggccattgataatgattgtttaaagctgttccccggaaccctgaagtgtatgactgtgtagcaaaaggctttctgatcgaaagcactgggtttatgacattctgaattgaactccatccaaacaggcttgtttggcatctggacagaagaaaggactacacggatgttccttgtctagaggtttggagcactatgatcgctgcatggaagtagatcatggctccttgaatattgtcagtttctgctgccaaaagagcgcattactatatatgctgaaatactacccatttttatttatttcacaggacacacacaaagaatgcaaattgacattggagactttgtgcactctagcatggttgttcttggtgaggtgatcaagccagaggaagtgattaaattcatacatggtgagctagtactactttatagacattgtcttttttttttcaactcatg

SEQ ID NO: 4394 - DNA, 1400 bp, mus musculus
catcctctgctacatattcggctggagccatgagtccctccatgtgtactctttgatttgtagtttagtccctgggagctctggggatactggttagttgatactgttgttcttcctatggggttggaaactccctcagatccttcaatcctttctctactgagcttgtgagatggatcactgagtaaaagtgcttgctgtctctgtaatgatttgagttcaatcctcaaaaccacatggttgaagaagagagctgactcctgaaagttgtcctctcacctctacataaaggctgcagcacaggcatatactgtaaaaccaacaacaacaacctcatgcgttcaaataaatgcaatgtaatgtttttacatcaagaaaatacttgaaataacattaaagttatgttgtattggaaattgttaagcccatcctatcccataaaacatcgtatacactgccgggcatggtgtcgcacacctttaatcctggcacttgggaggcagagacaggcggatttctgagttcgaggccagcctggtctacaaagtgagttccaggacagccagggctatacagagacaccctgtctcagaaaacaagcaaacaaacaaacaaaacaaaaacaaacaaacaaaaaagcatcgcatactattagcattaagtacaatatgacactctgtcactgctagcagctattgaaaaccatgggttaacttgtcacaacttactaaaactttgaccagccaaagtacataatttacaacatacttacataaaaacaaacaagaaaactaaacaaagtgaggctttctgcttccatggagacttccaagggaaactgggcaggactgacatctgaaggatgggggatcaagggagcagcatcgatcttcattctcatgagtgtgagttcctaagctgcctcagcttgtgtgtgcaactactaatctctagtttatctttttgccggcacagatagatccaatcacctctagctgctgatttcctctttcagcttcttcagcaactggtcctcatgatcatccaacatcacacttgagaacatcagcttatccccaaagcacagcaggcatgcaggcgatgagaaacagggaggttccagactgctattgctttccccacttcacactcatcattcccctccagatgtcttttcttccagcttcagacctaatcctacaagcaaaagcagatttcagcatcatgttccacaaatgcccaaattgcctgtgaacagctattatgataaacttcatattgtatagtcttccttgtatttctgtttccttaacacatgaatgtttacaacgacaaaaaaaaaaagcgcttagttttcttggtaggattcccaaaactctgcactaattcttttagatttt

SEQ ID NO: 4395 - DNA, 1400 bp, mus musculus
acagagaaaggagcttcagttgaggaaatgcctccatgagatccaactgtaaggcattttctcaattagtgatcaagggggcaaggccccttgtgggtgggaccatctctgggctggttgtcttgggttctataagagagcaggctgggcaagccagtaaagaacatccctccatggcctctgcatcagctcctgctttctgacctgcttgagttccagtcctgcatcctttggtgatcaacagcagtatggaaatgtaagccgaataaaccctttcttccccaacttgcttcttggtcatgatgtttgtgcaggaatagaaaccctgactaagacactccccatctcaggtcatcccaaatttaaatcagcaaccacatcaccagcattggaaaatacaatttaatgtttagcaatataaaattattttatttgctctgggcagatactcatgtctaaatgaaattcatgtcagatgggtgttttgtgatcagcatcatgtgtcttggggtttgtactgttcatttcagccccatgggagtcttctgaaaaacaaggccctcactcgttctccttgggcatcttttaaattctgaggtaagagattataaaagtgtagactaggatgagatcactttgacccttaggtatgggttgaggccataaagagcagcttgtggggcatacagtagttggtctctcatagaaattcaggactggaagaatgatcagtgctcagcaaactagccccctgactgatggccattttcacaagtagggtggggctgaggagatttgaaactgattcatctctcatgtctcctccagagaagagcgatctctgtaaaatcagagcactagatggagacaggaacagatgggcatgctccattatgtccccatttcagccttttactttgatgagtgaggtgaccaagttagctctcacaaaaccattcagctgactactgggggttcaggcgctcactcccagtgtcagggttctaactaagttatcagccctggacaatactgcttattctccttcacaattatttaaaaacccttcaagaatcgatgatgtacaagtttactcttcgattttccccagataactattgctattgtatcagaaagctaaagggttttaacataattaccgatgagtagtattaactttttgcaaaacatttgcaaaatcactacaaagcttatgtccatcataagcctgactagcaaaataagagagggttaatacagatcattttcttttgcaccacacctccaggaatggacccaatatcactataaacaaacagttttgaggatgcttaatatttttttaaaaaagctattttaaatttaaaaaaaaaaaacatagtgcatttattcagatcaac

SEQ ID NO: 4396 - DNA, 1400 bp, mus musculus
ttgtatcatagatcattctggaaattgcttctataggcagcaacctaataaatatgttaaatgttgtcagccatatagagcctcttacagctacatcactttgccttgccagtgaagagatatcagcaaacaatctgtaagacaatggctcggactggttgatgctgcgcttcacgctgaagtttgaatttaacatacttcaactcacaaaaaatattcctctgcattctttctcctagctcaattattgagaaatgcaaattcacattctttatttacagtccatacataaccatgaaggcaaacatgggctctcagcctatatatagttcatccttgtgtaagatgtttcagagcagtggagacattaaactccatcaactgagtaaacctaaaaatggttgcataattgaatgattttaaaagtagagtttagcaactagttataaagcagggagactctgcaggagagacatggagggcaagggtttgggccttggagccttaggggatcatgagtaagggagtgtgtaccacatgagtatttttggaagttcatattccctacttcatgcctatgtgtatacctatgagacaactctctgtacaagtaattcctgttgaactttgggccaggacaactaagacaaagccctatcattcatattggtattacataattaatattcagagggactccgggcttgcttagacagtgtcaactcaggttttattaccatctgtcttaacttcctcaagtgaatccagctgagcgtttgcgatgctctcaggagaggcatatacaattaaagtgagtgtcagctagccagttgctcctggagtgaggtgttgggtcctctgacagcaaccatttttccattttccccttagtaacattctcttcactagttgacataatttttgtgctttattgttgacttgtaaagtccagacttgctctaatgttgtcagctatttgatactggtattgaagctgtaggaccctcagtttcttcattttgaaataagaatatggtcctaacttgcagggatatcattttaagtgaaagaactccaagtccttattaaacatataataaagtatttgcatgtagaaaactaaaggatgattgacttttactactattattggtgttatagaaagaaatttgtttttctgacaaagttttagttactttttataagatgagataaaaattaggaagaggagaaagttaacttagtttagaaaaaaaaatagtctcaaaattctaggaatagtagagataacttgatacaagagaaaatttattatgaccttatgacattttgaaagaaagaaataaactgtttaacatttcaaaagattaatttatgaaaggttaatttcttttactgtg

SEQ ID NO: 4397 - DNA, 1000 bp, mus musculus
tgtcataatattcagggtttgctgtagtggcatccctgggctctggtaatatcattttgctctggctcttgttgactgtgttcttatgttggcctttagcttctgggtttcggtggtgtgatagatttaggtcctgattatttctgagtttatctttgttggatgggtggtttttagttgtttttcccgttgcgttctgtctcctctctggtttttggcctgagtagctggggttctggtgactagcaagtcttcaggtctagtagtgtgtttgcccttgagttttgagccctgtgtggcctctgtggttttgggtgcccaccttgcctttgtgttccctagactagcatggcttgcagtcactggcatcagaaaggccaccaggaaatcaggcacttgtgggactgctttctgggtatgctttaggggtacttaggaggcaagagtttggggaggggaacagtcttatgtggctgtccctggtgctggcatgccttgaggaatgcaggcagagttgtagtccatataatacagtacacagggtatagtttatagctgttcggtgtgctttaaggagaattgttgtaaaagttgaattattttttaatatttattacaaacatatgaaacttcattctaccaggtactcactcctttaaaccaagcagttgtgagaaagaagcaagtgttgctcagagtgtgaggccagtcttgtggatagggtgaattccgggacagccaggacaacacagaaactctgtttcaaaataaataaaagcaaaaccaatcaaccaacttaccaaccgagcaaacaaaaaacaaattgaaatttcattctacctcacatttaatatgtttttaaggtaattttttttctcatagacgatcagacctaatgtatgaagtcacatagtagacagaactggactctgggaccttagaagaagacgtcttctcaggaactgtgagcagtagaatccaaatcgactgtgccttggaa

SEQ ID NO: 4398 - DNA, 1000 bp, mus musculus
atgctccaggcctctactatgcttggtaaatagttggtaaactattgatttttaaaaatttttttatctataattttctgaatttaaacattcatgagtaaatggatatgtgtttaaggaatttttaaaaggaagtaaaaattagcataatgaaaaactcaagagatacagtataattatttaagctaatttaaaatttttttctaaatggtatcagtggatctaggtgttgcaaaaggtaaagtaattttcaataggtagaagctgtatttattaattctccctctctcctttgattaaagagtttctgttctgtgtcaagaagtgctgtgagccaggtggtggtggtggtgcttgccttaatcctagcacttgggaggcagaggtaggcgaatttctgagttcgatgccagcctggtctacaaagtgagttccaggacagccagggctacacagagaaaccctgtcttgaaaaaacaaaacaggcgaagggcaggctgcacgggtgagggtgtggaatacagaggccagccgtttctgggacaggcgagagccagagagcttctgaggcagcgccatcttcggctccagacaaccggccaccttcctggtgagagcacaggggtccgcccggcccgagaggtttctgcctcagactccagtgggagccaccttggttccaggactcctcggagggcaggctacatgggtgagggtgtgaaatacataggccagcagtttctgggataggggagagccacagagcttctaaggctgcgccatcttctgctccagacaaccggccaccttcctggccaaagcaacacagcttctgggaaagatcctgttttgggccttcatcttcagccagaaggaggtccaaacaccggataattgtgcaccttccctgaaagaggagagcttgcctgcagagactgctctgaccactgaaactcagaggagagagcttgtctctcacctctactgctagagggtaaca

SEQ ID NO: 4399 - DNA, 1000 bp, mus musculus
gctgacccagcagctaagagctgagatcgtactcataaattgtaggcagagagggaaagagaccagttctggtatagacttttgaaaacccacggtccatccccgttgacatccccattctctatgaaggccatacctcaggaatctttccatacaattccaccaactgggaaccaaggtttcaaatgtatgaacctgtgatgtcattctcattcagaccatacaagcaaatacgtttgagtgtctgttgacatacaacatttagggatttaataccagttgggtctttgtcaaggttactattgctatgacaaacaccatgatcaaagcaacttggaaaggaaaaggtttattcagcttacacttccacattgctgttcatcaccaaaggaagtcagaacaggaactcatatggggcaggaaacaggagctgatgcagaggccatgcagggatgttccttactggcttgcttcccctggcttgctcagcttgctttcttattgaacccaggaccaccagcccagggatggcaccacccacacctccaccattggtcacttattgagaaaatgccttacagctatatctcatggagacatttcctcaaaggaagctcctttctctgtgataactccagcttgtgtcaagttgacacacaaaaccagccagtgcaagttgtagttagagtgactggaaatgattattaaggtacataacttgtgggcttctgaggaggcatagtgaataggaacatttgctatgcaagttcgagggcctaacttcagatccacagcatccacatgaaaaactcggtacaaggcacatctgttacaccgttactgagacgagggtgtggaggcgcagacaggggaatcactagattcaggggcatgctggcctatctgaaaaacagccagcttcatgttcaataagagacttgtctcaagggaatatgcaaagaaatgatacaatgcattgtctactatcttcatttagcct

SEQ ID NO: 4400 - DNA, 1000 bp, mus musculus
agtgtatggctatggctatgaaatggcaggggtaggtttcagtatctggttcatatatacaccagagaaaatggaaatgtacctggttggggcagatgcctaggaccactcccatgtccagggatcacgcataactggccctgcctctcactggatgcatgttctggagagctggttccactgctcacagcttgcagtacttgggtgagtaatccctgttcctttcccaggcagcacagtggaactggctctgatattgagggtgagggtgcatcttctcgaagggtatgcatgtgggagagctaaacccaccactcatctgctgtgagatggcacagggacaaaggagatgtgctccctgaccccttgccacagtcagcagtcagggaagctgtgcattgggtcatgagctccggactgctatctctgcttttcactagctgcagcatctgcaagaggcagctctggggtcatgagagtttggtgagctggtcctgtcccttgttggctgaagcacttgaaaagagcaagacctgtaccttgcctgggcagcacagtagagctgtagggaacacaggtgtgccgtctctgaaggctcaagcatgagagagtcatgaagtggcatggttgtgggagttatgacgtccccttcaccaccgatggtagtatggagagctggccccaaggacatgagaaggggagaactaaccctgccctctcacgggttacagcactgatggaaacacctcacttgggcaaaagagtggagtgattccaatagtgaagaaggcactggtgagccatccccaaggaagtaagagcaggagagctagtccagtccctcatccctgcaaccctgagagtagacactgctccttgcctgggtagcacagtgaggctgactctgaaggcattgtgtgtaggtgagctggccctgtgggcaggagagctgaccttgttcctgctgatggtgacactgggtggcctagccagaactgtg

SEQ ID NO: 4401 - DNA, 1400 bp, mus musculus
gtacaccctgcatccttaacatgattaatccataaaggtccatagaaccaatattaaatcacaagcattaaaataaaataaaaataaatcacaagcgttgactataatacagaggaaacaatagataattttagatatatggctatgactgcttagatatgatatcatctgtactgactgatttgtcaaataattgataaaatgagggtaattaaattaaatgtggtagcctataaggataatcaagagaataagatcagccatatattgagaaacatatttgctaaacacatctgataaaggattattttaaaagaaatagacaagccttctggtcagaacctgtgccctgaatggaccttgggtctcagcacccagttctacaacaccaagaggaaggttgagtcccaagtgctctatcacacccagaatcacaggtgatgaggccacaacattggcaccaacaccatgagtagctgggaccaccaggatccagggattcagcaacccccacccggccagtggcatgggttacttccagtttgaacctgcacccagagcagacctggggcagtggctatgtacacactcttagaacacccagagggatgctgactcctaggtgctctgaaacacccaggatcacaggatcacagaagaagttcaactcccaggacattggacacacccaggtgcactggagctctgacagactcaaaatcacacatgaggccatcttttccaacacccagaataactgggactgccacaggaaccagagaaacacaaacccccacccagctagaggcacaggttccttccagcttgctactgtacccagaacaaacagaggactctggttcctcgcccatacctgcaaaactcagagaaagcttgacttccaggagctctgatacaacagaatatctggagcttggtcacaccaggatttcaggatcctagaggaagcttgtctcccaaaagctctgaaacaccaaggatctaaggatcagtggattccagaatcacaggatcactgagacagctgtattccaaggagtttgacacaaccaggatcacaggagtgacaggcacaggtcacaggcaacaagtgcaaatagcactagaaataaccagaaggtgagaggcaatcacaagaatataatgaacagataccaaggctactaggcatcatcagaacccagttctcccactacagcaagtgctgaataccccagaacactggaaacgcatgattcagatttaaaatcacatctcataatgatgatagaatattttaagaaggatataaataactcccttaaagaaatacaggagaatagagttaaacaggtagatgcccttaaagaggaaacacaaaaattccttaaggaattaca

SEQ ID NO: 4402 - DNA, 1200 bp, mus musculus
gtacattgcaattggttcagtggaaaagagaatactgacaaaagatatattggtggttttggatgatagccattacagtaatctagacacaaacgttaaaaacgaagccatcaggagaaaaaccataatcctgatataagctcgaagtcatggaggttttgtctttatcaataaatacactctaagaatttctgagcaaaatcagccatgatctatttgggattttaaagaattgttgaaaccgttataaagagtcaagccatgctcacatgatgctaacgctcatacttgaacccatggctaggtctatttttattttagaccagaatgttaagaggaagggctggcagatgctctcatattagcaaggagcacctgagacgtgcactgggcattgacgcaagcttaatggctggcatcagagctggtaacaggtggtagagtacacagtcgactcacaaaggcagagctgtttgcacttcctgtgtaatctcgggcttttatgagtagatataattcccatgattataaggattttttgttgttgtttttctaaacaggctttctaaagcatcaaaatatttatttattcataatgattcacaaagtacaggtttttaatctatggtatcagaaattatgatagctgcatttacatactctttgatacgatatggattccttcacgggcaacattttcttttgttccccgactcttagagtcaatctgacattttcaaagaatgggcccattcttgtggttcaatcttataatgtcagctaacattaaatgctgggctaagagggtgacaatttaaaacgtccctgggctacaatgagctgaaaacctggaaggttaccttcgcaagattcatcctcaacatttcaagtggaggatggatgtactggagttattaacgttattgcctgcctaccatgtaaaaagccctgggtataatccccaggacctctcacaaaaaggactgtattaagagcctctgtcacatcgcttctctaccttttggctaaagtcaactgaagaacttctgtcactacctagatatgtctctgttgtgtgtttcctgatttagaagcatcccatctaccaaaatactattgatagtgatgatcattgttataaacacttgctggttttcttgcagcaagtaatattttggactggtcattgaaatgatcata

SEQ ID NO: 4403 - DNA, 1200 bp, mus musculus
ttaaatctacttctaacatacactgagcatgtggtgttttagcacaattctccagcactcagattatcactccataaacaaatatgtttatctcctgtttattgaggtgatgtcttggttagggtttctgttgatctcatgaaacaccataatcaaaagccacatggagagggtgagtttattttgcttaaactttcataccaccgttcaagatcacaggcaatcaggctaggaagctgaacgcaggagctgatgatgcagaggctacagaggagtgctgcttactatcttgctccccacagcttgccagcctgctttcttagagaacacaggaacaccctccctgttgacaggtgtcttcatccacaatgggctgggtgggttttctcacttcaggctcccagcttgtgttgagctgacataaaaaccgccagtatagatgaagagaaaagattagcatgtgcaccatcagtacagaatgcttcatcaatgcaagaattcatagacattgatccttccatccttctatagatattctgaagctatgagtgcttcttattggtacagggaacacagatgcatccagtatttcatgaagggagaagcttgagtattttggaaagtgagggttattgaaagagctaagatgcagtctagctactcaggttgtaacaatttctctgactttttttaaaattctaactgaagctatctagagcagcaattataggaaatggattactattaggcaaggctattattgttaatgtctgctgagactggagctcttctctaccttaaagacaagaagataagcagcaatgggccttcatgtatggcactcacgttcacatgtacagggtgatgaaatactttttaaataattataagagatggatggatggataatgtgcttgatgtaaaagtgtgaggacctgggtttggatcctaagcacccacataaaatctggtttcagcagcacacctctaactatagcagagacagtggatcacagaagctcactcactgggcagtaaccccaggacagagacaagtggatccaagttgttcagtaaagagccaatctagctaaatcagtgagctctgggttcagtaaaaacaaaacaaaacaaaacaaaacaaaacaaaaccccctattttcaaaaagaagaagaagaaggagaaaagggaggaggaga

SEQ ID NO: 4404 - DNA, 1000 bp, mus musculus
ctgactgttacgttcagccagggcgcccagtggtgtgctcagaggatccctgggtcctgaggggatgtgaccttgactgacaaaggtggccacatgatgtgaggagtctatgggtgctgaggtgaggacaggaccctagttcaacgccatcacagcagtcctaagaaggacacaggagggtaggactccgagatatgaacacagatgcaggagctggagtgatggaaggccaagagtcaggaaatgtgcatggctcgtggaaactggaggaggccgcaaatcaggctctcccctagagcatccagagggaaaggacttgctggcacaatgccagcagtttcattatagaagctctttcaacatatagaaatcatgtttaactcttgtgttgaattgctctccagaaaggtaaaaatcctaacggtaaagcactatccaatatcttcaagtcaccatttgtggcaacctgccgtgccaatagtcgtaaacacgcactgatcactcaccatgtatggtggtctgcctaggagcggctcctgtaggctcctgtatttgaatgcttggtcattagggcatgttgttgcttgactggattaggaggtgtggtcttgttagaggaagtgtgtcacgtgttcaagcctggtccagcatctctgttcctgctgtggatctatgcagacgtggatacagcaccatatctgcctgtgtgacaccatgcttcgtgccatggtgacaagggactaagcctctgaacctgtaagtgttccagttaagtggtgtactttatgggagttgcagtggtcacggtgtcccttctcagcaacagaacacagtcggctaagacaccccagttgaacttttccccttggccggggctgtacgaggactgtgcttttaataactgactcactcagaattcaatgaaaaaacgagatattgttttcattatacaaatgagtgaaagtaagttcaaagaggtgaaatgagtgtaatttatgta

SEQ ID NO: 4405 - DNA, 1000 bp, mus musculus
tcccctccgagccatcttctctgccacaaaaacagtcttaggtaccactcattcataccatacttgaccttgcgagtaacagctcggtgacttgatcgtaagaagatatctgtgccatggcacgtgtgaggccctgagtcccactgctagcacatcacattgggggtgggtggagtgtgtgtggactgtttggttggtagcctacagagagcagaaaagattggaggcagaagtgccacactcaggctgggcaccaagtgagagtggtcccctatgggcctgtagccgatggccgagagactggagaaagaggggaataatcaaatgaaccggcctcatgaggtgtggcatctaaatcgacgtatcctccagagtgatctgtcacagcacagacaagatggatgacactcttctaggtacaatgactcctggctaggcaaatgacagtccaaggcagagagcgctgagcagaacccagctgagtcattagggcaaccaggacagctgtgctcatgggtgacaaggaagccattttatgggtgggtcagcctagactctctaaaacaaaattcagccaacccggtgtgagaacagaacaggagctgtggagaggtcctctcctctggaggtcctccgctctggctcattttctgtcgaaacaggccaccagcacagtgacagtcaatgatgtgaaaccaaaggccatgagaatggggacacacaggttcttctcctcctctgcccataatctcctaaaactgcctgtcttctacttagtaggcctcccctatctattggacactcgtgtagagatttccaaagaggtctgcaggctatgaccaaactgctcatgttagaggagacaaggaccagtcatccttgctgaaggggctgcagcgcttcccaatgggtctgggggtcacctgctcagacttctggggacatcttatgccatagtagagagaaacatgaccaacctcgttcttcaagatagatagct

SEQ ID NO: 4406 - DNA, 1000 bp, mus musculus; identical to SEQ ID NO: 4405

SEQ ID NO: 4407 - DNA, 1000 bp, mus musculus
ggcagcttatgcttgactgcgagaggacagatttttttttttttttttttttttttttttttttggtttttcgagacagggtttctctgtgtagccctggctgtcctggaactcactttgtagaccaggctggcctcgaactcagaaatccacctgcctctgcctccgaagtgctggggttaaaggcgtgtgccaccactgcccggctacttaacatcttagggttttactgctgtgaacagacaccatgaccaaggcaactcttgtaaggacaacattcaattggggctggcttacaagttcagaggtccagtccattatcatcaaggtgggaacatggcagcatccaggcagccatgactctggaggagctgagagttctacatcttgttccaaaggcaaacaggagaagactggctctcatgtggttaggaggagggtctcattgcttacccccacagtgacacattactccaaaaaggccagccacacttcctaattgtgccactctctggagcaagcattttcaaaccaccacacacagtaacttcttcttgttggagaccttaactacagaagctgagtctctgaatacaatctctgtgttcttccctctttgagctttgcctgtgtgggtagcattacttactgcacttcaagcttcacttataaaagtgtacttccccacaggtccaagagtaaggtctatttacctggcttctgcaagagctctcttctgggtttcttggcgagaaggcagctgtcctgctattatgctcacaggcctccctgcatgctcagggatggatgatgtgaagagtggaagactgcagaatttctccttaccccgcccgcatgtgatgtgactacggtctcttctgtaagcactcatttagctttacctttgtaggccctgtttccagtcatgctgataggtagagcttgaattcatcaaagcacacttcacgtgccacaacataaactttataggtaacagcaa

SEQ ID NO: 4408 - DNA, 1000 bp, mus musculus
cctagataagtggctgaggcaggaggatctccagctatcctggccacacagtggcaaagatagtctgccgcaaacaaggtagaaaagtttagactgaaacctgtcctctagaccctacatttctgcataggtatgcatgtgtattcataaacacaagcacacacgtgtgtatgcttatgcacacacacttacacatcacacatctctctctctctctctctcacacacacacacaattcaaggagattggtggttgccagggtgagatggaaggaagaaaagggggtcttgttttttaatgtacttttgtactttaagttctggaaatgggcggcagtgaagcctacaagcatttgaatatgtacaaacatggttaaaatagaatatttgaagctaagaagatggtaaaatgattaaagtgttgagaatcatgcgtttggaccccctgcaccttgtaaataaatgtcaggagaacgtcgagtttcaccactatttccagtctgagaatgcagagacagggaaccacaaagcaagctggctagggagaccagttacgcaggcgagcttagggtttgatggagagaccctgcctccctggagaaaccctgcctccccgaatgatgtggtagcgtgattgactgaggatgactgctgccatcaacctctataggctcatgagcacatatgtgtgggaatatgtaccacgtccaatgtgcaccccacatgtggaaacaggcatacacatatgtacactatactcgcacatgaaaatgaataaaaggtaaatttatgttttgtatattttgctacattcagaaataatttgacaaagtcttcaatgattacattttccttttcttatcaagatagagccatcattcctagatattaaccataaaactcaccggagccctgaaatgcagtctttactcttgttatctcagatatctgaatctgtgagttttagtgatttccctccccccccaacccccaaatacat

SEQ ID NO: 4409 - DNA, 1000 bp, mus musculus
ccctgagacccttatcacaaagacaagcaatctctcgatgcttagatcttcagagttagtctttttggaacattcgatgctcttaggagtctttagagaggagccccgaatttgccttcaagggatacggggaattatgtatttcaaacaattgggaccagacaatggaggataccctgatagtaaaatctttctcgtgaagtaataagagaatgctttaatccacctgtcatttatgtggtgcttataatattgccagcatgaaaacacatataggtctggttctcattgcatggagttgaaagtctccaagttgcatgaagaagtaaacagcttgctattataacatgtcacataggctctgacagaggaattgagagcatggcaggatatgaaaagggtggagggaaagctcaggaaatgggactcaaaaatacagattttggttcaccattaggagtaagccttagtaatggcacacaagaatgactgtaatgaataatgtatttacaaaatacacaaggactttcatttatgtcgttaatgagagaaacgttttctagaagaaatgatggttaaaccaaacttcttatttaagtaggagacaagaaaaggaaatagagcaatgagcatgtttgtaggtcttggagccctagaaaaacgttaaaaagccctgactgaccagaacttagagtgttacaaaaactgaaagagatgagcccagggttgggcagagaacagacttctgttttcttgcaagccctgatgtaggagcttacacttggtcctggtgccaagaaactactaaagatgctcgggagattcagatacaatctaagttattagccacttctggctgcagggtggacgatgtgtgaggcagaggtgatgcagggagatgtggtaggggtggctaaggtatcctaccaagagcccagggtgtctttttttttttccaggaagtgcttgagttgagttagaatggccaatctggaggttg

SEQ ID NO: 4410 - DNA, 1000 bp, mus musculus
ggtattcctggatcatttacctgatggataggcaaaatgacagataagaaagaatttgcttcaaaataaggtggatctggagaactatgtccctacaagtcacctctgacctcaataggcatgtgatgtggcacacatcacactaaaaaaacaaacaaacaaacaaacaaacaaaacccacaatatgtatgtgtgtgtgtgtgtgtgtgtgtgtgtgtgtgtgtgcgcacatcacagaagaatgaagaaaaaaaaaaaaaaaaagaaaagaaacctgaggtggcttttgagttttgtgtacttggtaagtctgtctcgaggacataatgaagtggacttcccttatccctgggcatgaagggttgcataccaggattcagtagctgacaacaggccattcacaaagactttgactggcttatgcactagtccccacagaattttgttactgttctcattacacacacacacacacacacacacacacacacacacacagacacacatatacacacacactgaaaaaagagaccatgaatttgaaggagatgtacagaggtaggtacatggatgggttttaaaggagttaagaggaaaatagaaatgtagttatagttgaggggcggtgcagccaccatgaatgcccttactggtcatgtcaatcgtgagtcagtgcttagatgttctccgacctctttgctcctggcctattggatgctgtcggggagacacctttttcctacgggcactcctagcagcaggtcctgagtttggtaatggaaagagtacagtagattctgcgtaggttgagagatgactccctcctgcaacagcaattgcttctccaaatgactgaaccttgccgaacttctgtttcattaggacgctcctttttgctgggctggtttctgcccttctgacctttggtctttcggtccctgccaattctcgatccttcttcatcaataacaaatatttagtgactctccgttctgtgcag

SEQ ID NO: 4411 - DNA, 1000 bp, mus musculus
aaagagggaatctaggtgggtagagaaataatggaaccaagacaagctagtctgctcaaggttcaaatttttaatggtggacacactttataaaggagaggggaggcccattcccgccaagctggaggtgaccacgtgtaggatcatatgtagactccagaacagactctcagcaggtggcagcagcggcagtggctgaacaatagagtgatccagggaggcaggctccaccctaggtgatctccttagtggtaagcaaagtcaaggtctggctcagcctgcttcaggcttgtcgggggaggttataccggaggaagacagacttgaaaaaatgtcatatgcccaacgtcactccaccataactgcggccaagagactactgaagacaggcaatgtcaagaaaggattcgcttagagttgagacaaagggggtttttaggaatgagcagttcacctacttcccattgtcaaattcttcatctagatttgtttgagaagcagtgattgagacaaaagcccgatgcctctgggcagctgccctcacatggtgttgctgtacatgctgagtatgggctgagagccgatgcagccaaccattaccgtgtagtgtgtcaaacacaaacaaatgggggcgggggggaggtgtgtcagaaaactgagactgttctgtgacatttccaggcttctagtgctaggaggagcagagctggggttaaatccataggtgtgcacttggagctattgtgagtgcctgaaactgactctcactccactcagagtgatgtcacagtgatccggtgttatgcttttcccaggacacacttctcatcatgatctgcacatctcctctgcatgtgtgcacggccctgggtgttcaggctcatgtgtttaaatgcttcctaaagtcatcctgagcagttgttccccaggcacctctactctcctatcagtgagctagggaggaccagggtctaatgggaaagatggctggccagtgaag

SEQ ID NO: 4412 - DNA, 1000 bp, mus musculus
acgatgaagtttctatacacgagggactgtggtgtttataacgtgtgaggcattagtctaaggatttgatgactaggttatttaaactttgtaaagcaggcattaccatgattcctatgcaaacggaccccaagacatggaaactgattgtgcttcctaatgagcgaagctgggcacactcaggcagagtggcttgactgctcatgttttcatggtccctccacctcctgtgactcaattgctttcatttatttctattgctccctttactcccagtcacctatgcaccatcctcttactgtccctgccaagtctttgccttcccaccaccttgtgacaacctcctgccttcaccaatggtgacactgatcaactggtcattgtctttagagctatccacagtgcctcttgtcttggggcagggcacccagaggaagcccagctttggtcaggaactcatgaaatgacacacggctcagatgggagacagcatagttgcagttgggaggggcttggcaaagagatcacacttcgtgtacctctctgtgagcatcttctcagtgctctgtgctgggtcggttttcatctgtgacacactgacttctaagtatgtttattgtatgtataatagtaggcttacatcattactaccactggccactggaagaccctagagtgaattaaaaattcactagagtctccccctccctcccctgcacttggtggatgagagtttttgggtgcaggaatcaatgtgaaaagacaatcttcctagtgggccatgagtcactcagagattgccagttatggtgctggcctgattgctcgttccacggagtgctactgttccattccacaaagtacttcctgaagatttcctggagacctgggagcctgcacaagtgcagtggggttacaaaaagccaccatagggggctccctgcctcctatggtcagtatcaatagcattatcaacagagacttaaaaatcaatgacaca

SEQ ID NO: 4413 - DNA, 1000 bp, mus musculus
tatggaaggaaaagagagagctgacctggcaagaatgcatgcaaagcatgctctttactgtgggcatgacttgctggatcaagatcctgatgccttgacctccatccaatgatgaaccaacggccaatatcaaattaaatggagacatacttgaagcgatcccactgaaattagggacaagacaaggatatccactccccccatatctattcaatatagtactcaaagtgctagctagaacagaaagacaacaaaaagagatcaaggggatacaaattggcaaagaagaattaaaggtatcacaatttgcagataatatgagagtatacataagacaccccaataattctaccaaagaacttctccagctgataaataacttcagcaaagtaaccagatataaattaattcaagtaaatcagtagccttcctttatgcaaatgacaaacaggctgagaaagaaattagggaaatgcctttcactgctgcgtcctcagccatgagtagactcaggctacagaagaggcttgcctctagtgtcctctgctgtgggaaaaagaaggtctagttggatcccaatgagaccaatgaaatcaccaatgccaactcccgtcagcagatcaggaagctgatcaaagatgggctgatcatctgaaagcctgtgactgtccattcccgggctcattgccagaaaaaaacatcctggcccaatggaagggcaggcatatgggcataggggagaggaagggtactgccaatgctcggatgcccgagaaggtgacctggatgagaaggatgaggatcctgcgccggcttctcatgagatacagggaatctaagaagattgaccgccatatgtatcacagtctgtacctgaaggtcaaagggaaggtattcaaagcaagcggatcctcatggagcacatccacaaactgaaggcagacaaggcccacaagaagctcctggctgaccaggctgaggcttgcaggtctaagaccaa

SEQ ID NO: 4414 - DNA, 1200 bp, mus musculus
ccccatttgttgactctctgcgcccctgtccacatggtacaaatgaccctgcctcaggaataagccagcccagctaacggaggcagccttggtgctgcttgcaagcctgagccttggctttattttcacgtatcctaaagaacaaagcatttcttagacttgttgctgggtgttgggaatgctccaccatttatgtagcggtggtaagataccttcaccaggccaggcgtgatcatgcatctctgtgagctcaggcttaggaggagaggcaggcagaattctatgaggtttacattagtactcaggagaagtatttttcactcttataagttcttctgtcatttcatgtatatttatttatttatttattgtgtgtgagtgttggtgggggtgggggggcacatactacagcagccatatggaggtcagagaacatttgggagtaattctctccttataccctgtggatcccaggaactgaactcactgcccacaccccacctcaaaacagggtctcactgtatagcccaggctggcctcaaactcacagagatagcctacctctgtctccagagtgctgagattaaagataggtaccacaatgcccagcgtcttgtacatgtacttatttataattttttatgagacagagtttcatgtacctaggctggcctcaggctcactatgtggttgagtatgttgcattcttttaaatcctttccatttgttttctctctgtgtatgtgttcaggtgcacgtcttacctgtttttatttaagtgtactccatgcatgcatgcctagtgtccacagagtcagaagacagcattagatcctttgacactggagttacagatggttgttagccaccatgtaggtgctgggagctgagctcctatcttgtgcaagggctcttaactgctgagccatctctccagcctgtcttgaactcaactcttctcttctcttctcttctcttctcttctcttctcttctcttctcttttcttctcttctcttctcttctcttctctctttctccctctctccctctctccctctctccctctctccctctctccctctctccctctctccctctctccctctctccctctctccctctctccctctctctttgagacagggtttctctgtatagccctggctgtcctggaactcactttgtagaccaggctggc

SEQ ID NO: 4415 - DNA, 1200 bp, mus musculus
gggcagagtattctctgctggcaagctctcttcttgcagggaaggtacccagatatctggtgttcgaactggactcctggcagaagttgtgttccactcactagaggtcttaggatcccttgtggaatcctgtgtgggcccttgtgggtgtcaggcgactccgttggcaaggtaccccggggcttgtgtggaatggaagggacttgtgccctaggtcaggcccgggtagtctgcttccctatgtactgcagtctcaggttcctcacgattggattggggcaggtgctgtgttctactcaccagaggtcttaggatcccataggcaatcctgtgtgggcccttgcgggtgtcgggtgactctgctggcaaggtaccccggggctcgagtggagcagaaggggcttgtgccccaggtcaggcccaggtattctgcttccctattactgcagtctcgggtttctcgcgattggattggggcaggcgctgtgttccactcaccagaggccttaggatcccgtggggaatcctgtgtgggcccttgcgggtgtcgtgcgactccgttggcaaggtacccaggggctcgagtcattcccaattttctaaggaaccattatcctgattccatagtgctgtacaagtttgcaccccaccagtaatggaagagtgttctccttgcttcataccctcactagcatgagctgtcctgtcacttgtgttattgatcttagccattctgacaggtgtaagatggaatctcaaagtagttttgatttgcatttccttgatggataagggtattaaacatttcacagtcatttgattttctctattgagaattctgtttagatctgtaccccatttttaactggattgtttagtttgctgatatcttagtttcttgagttctttatatattttggatattagccctctgttggatgtaaagctggctgccattttctcctgttgacctgtcctttgcctcacatcagcttttcagtttcatgaggtcatttgccaattgttgatcttagcacctgtgatatcagttttctgtttaggaggttgtctcctgtgccagtgagttcaaggtgagtttccactttctcttcttacaggttcagttgatctggttttatgttgaagtctttgattcactgaatgttgctcagggtgatagatatggatctttttgcattc

SEQ ID NO: 4416 - DNA, 1000 bp, mus musculus
agatcctaagaagttaaacaagaaggcgggcccaagtgaagatgcttaaatctcacttagaagggggaacaaaataatcatgggaggtagagggaggggtctgggtaggctaggggagatggagggaaaatggggtcaggaccaggtagagggggaggcaggagagaggcccagaggtctaggggaatgaatggaaatatgcaactgcttgctgggggtagggtgtgaagtgtaagagaacctataggaagtcccagagacttggaatgggggaagcttccaggacttgatatggccaaccttagccaaaatgcccaacagtgggataaggaacctgaagagaccacctacagtagccagacaggacctctaatgaaaggatggggacaccaacctacttacctacaaaacttttgtcccaaaattgttcctgtctaaaagaaatgcagggataaaaatggatcagagactgaaggaatgtcttccttgcaatctgcccaacttgggatccatcccatgggtgggctccaatccctgacactatttctgatgttatgttgtgcatgcagacagaaatctagcatggttatcctctgagaggatcttctagcagctgactgagacaggtgcagatactcacaggcaagcattggactgaggtccaggactcctatggaagaattaggggaaggattgaaggaactgaaggggatgacacctgtaggaagaccgacagtgtcaacaaacctagacccctgggagatcccagagactgagacaccagccaaacagcattcatggactggtccgaggcctcgggcacatatgtagcagagggctaccctatctggtttcagtgggagaggatgtgtctaataatgtagagaccttatgctccagggtagggaatgtgcaagtgggcagtggtggtgggagacactctctcagaggtgaaggaggtagggaatgggggaagaaccctgggaagggggactgaggg

SEQ ID NO: 4417 - DNA, 1000 bp, mus musculus
tcataccctatctatggtcttaaaatttctacatgttcaatgcatgtagtttgcaatgtgtggggagcgggtgtggcggcagtcctaaaggcgccagagactgcagctaagtcatatgacttgcacctgacttcctcatataagccacaaacatcttgagtgctgcgcaggtgtaccaggatacaggtgaatccaatttggtggagatttgcccctgctgccctgattagctgaagctgcgtgcctggtgaggtggcgtggcctgctgtgcgtggatgggaactgagagtataaaagagtgagaggcccagggttcgggggagatataaacaggggagatataaacaggggagatatatggagaaagaagaaacaggactgaataaacgtgtgcagaaggatcctgtagcagcgtcgttcttcctggctagttgagcgcgcgtaacagttggtgccgaaacccgggacctgggacccaggacaagggaaaagaaacatcttcaggcaagagcgaagaccccctgctacagggaggattcagaactgcataacggggaagaaggggttaataaaggttcccgtgaaacagactgttgagaaggatccggcgtggattcagaactcttcagctggggaacggtactgatgaagagaaagaagaaagatgaagactgaataaactgctgttagaagtactggtggtcgcgtcgttcttgctggtcgagagcgggcgcgacaattggtggcctgtaaggggaaccgactcctccaccagttcagaactttcagcagtcagtggttgccggcagggtaagttcacggtgagtgaaacttgcgaccccaggagtttgggaaggacctcggataaagtagaggtgagcataaagttgccaagaagtaggcacaaagtaacccaggagtttaggaaggacctggataaaatagaggcaagcataaagttgccaggaagcaggcacaaggtaacgaaaggttcccagtt

SEQ ID NO: 4418 - DNA, 1000 bp, mus musculus
tggcttccggtttcagagggttagtctgttagcgtcagagcaggaagcagggcagcaagtaggtaggtatggtacagaagcatctgagagttttacatctcaatctgaaggcagtaggagactgtgtgcttcattggcatagcgtaagcatagaagacctcaaagcccactctggtggtggcacacttcctccaacaaagccacgcctactcccacaaggctgtacctctcaatagtgccaccccttatgggccaactattcagacacatgatttggacgggggcatacttatgtaaaccaccgcattctactccctagcctcataggcttgtagccataatataatatactgaaaaattcacttaatccaacttcaaatgtcctcatagattatcacagttttaacaatgtttaaaagtccacagttcaaagtcttttcggagattaagtgcaataccctatgaaatcaaaataaaaaaagcagatcatatacttccaacataccatgccacaggatattcactgtctttccaaaatgtaggaaagggggcattgtgaggaaacactggaccaaagcaaggccaaaaaaccagcttggcaaactccaaactttacatctccatgtctgttgtcaaaatgctcttcagatctccctccaactcttttaacttttattgacacttctttccctttggcttgttccacaccctgtttgcagctttcctcagcagctgccccatggttctagcctctctcaccttctgggatctccaaggcaatgcaggcttctgcttcaaggcttcacaaaatggcctttcacagtttcacacaatagcctctcttgacctcagtgccaggacacccttgccacatatctgggcttggtgaattttcttagttgagtaggaagattctataaccctccctttgtttttttgtttgcttgttttgttttgtttttaaccttgactctaaagccagaaccatagggctaaattt

SEQ ID NO: 4419 - DNA, 1000 bp, mus musculus
cctcccaccctggcatatcaagtctctcaagggctaggtgtatcctgtcccactgaacccaaatgagacagcccagttagaggaacaggatccacaggcaggaaaaatatgtagggagagacacaatccacttattgagggacctgcatgaaggccaagctccatatgtgcttcatatgtactgggttctaagtctgacccatgtgtactctatggttggtggttcagactctaagagcctccatagtaccacattagttgactctgttgttcttactatggggttcccatgccctctgatgtgaatggtttggtgacctcatccttacactggggagtcatgcctggctacagaaagtggtgcatatcctagtgctaggagtctcagctaatgtcacccacttagactcctgggagcctccctgattccagaactctggcatgccctagagatgccccaccaccaaccatcactagctacagatttccattcatttttctgatacactggccctcttgtctgtccacatacctgacactgaatccctatgaaatcccctccacttaccctctctcacccagttctctccctccctctgactcctatgactgttttattcccatttctttttctttgtttttaggtatttatttcatttgcatatccaatgctatcccaaaagtctcccacacgctcccccacccactcctccacccaccgactcccccacccacccactcccacttcttggccctggcgttcccctgtactggggcagataaagtttccatgaccaatgggcctctttccactgatggccgactaggccatcttctgatacgtatgcagcttaagacaggagctctggggagtactggttagttcatattgttgttccacctatagggttgcagatccctttagctccttggtttactaaaatttataaataattctatgatattacaaaaatgacagcttattgttttacaatcaaat

SEQ ID NO: 4420 - DNA, 1200 bp, mus musculus
ttctttttaatttccactatgagtatccttcagtcattgatatctaacaccatgaatactattcaggaagaaatattcataaaatagaagtaacaataagaaaacaatttcatgtgtaggtctcttcaaaatttcagtttatgggttagccagaagtttttcagaaagatgaaaaatgaaatctaaacaaccaataagtcatcctttaactttatgttaatattaacgtaaatttgctaatccaagatcttataaagttttaaagacttgactctgtagcatgagtgtgtcatcctgtataaatgaagacaacaatttggtataattggagggaggagggaggaagggacgtggaagggaaaagggtcagagaggggaagaggggatcatgatctggtgttgggtcggagtaaaggactgaagccctgagggccagcagaaagaagggatataagcaacctcaggagaacctccagtatgtaccagagacttgggagcagagagactctcaggactaaaagggaaggaccttagatgaaatgccctacagtgggaagacagaacttctatagcccacctccagcataaagacagggcatcaagtgagggatggggttgccatcccaccgacaaaactcttacccacaattgttcctgcctgaaagaactgcagggatggaaatggagaggagcccgaggaaaagatgttccagtgacaggcccaaagtgggatctagctcaagggaaggcttggaggtctgacactattactgaggctatggagtgctcacaaaaaggaacctatcataactgccctcaaaaagacccaacaagcagctttaaaatgtcagatgtagatatttgcacccaaaccatggacaaagctgctgacccatgtggttgaattagggaaaagctggaagaagctgaggaggaaaccctgtaggagggccagccatctcaattaacctgaactcccaagatctctcagacactggatcgattaccaactaggctacatgcaccagctgatatgaggcccccaacacatatatagcagaagactgccaggtctggacacagtcagaaaagatgcacctaaccctcaagagactgtagtcccggaagagtttagaggtctgatggagtaagattctcaggggtggggacatcctcatggagacaggggattgggaagag

SEQ ID NO: 4421 - DNA, 1000 bp, mus musculus
ctgttccagaggctgtcaggttctctggcgcaccctctcacctgttcagactaatttcctaagttcggcgggtcccggaccaagatggcgactcacaaacatcattcttttgattatgctataaaacaagcaatttaaaacattcaatatgtattttcagcagtttccttctttttaatcttgcattgccaccaaagaatgctaatggttaccaaattgctcttggctgaattgcttaatccttaagaaaaaggagaagaaaaaaaaaaaaaaaacagaaaaggaatagtgggggaaagacatgttgcaggatgtgattgtagcacatgatagctgtgaacgctgaccctgagcatatggtgactgatctgagaacttaagctaagaagtcacagaagcatccctctgctttgggttatggacattacagtataatgagcgatttctctcatggcgcctaatagacaacttattaagagggcagtgtgagttacagatcatatcctaacttatccttgagttctttagacttttcctctggatgtcccagtttatttcaatcagagttggtcatctcagcaaccaagcattttgtctcaagaagtaggcttttcactatgctctgtaaacaagtgtcagatatcttgccccatgcactgtgaagggtgcaagtccgtagagcatggctttgtttcctgtcactggcaatgattagccttccccacctacaccaagctgctcatgataaagaaaatgcatgtgtgataacacattccttagtgacagtagttcattccagttgattttagcagtggtgccccagcaccttccctggccaccaagactaagatgaattcataataggagaaaaggtggtgtgatgtatggtggatggctttttttcttctcctttatagaaaacatatggcagtgtctatatagaagcagaaaacaatagcatactgctatcaagttagcaatagctaatggaaccatacat

SEQ ID NO: 4422 - DNA, 1200 bp, mus musculus
taatcagaacaacaaatgcactaaataaagatagaatattaaaagcagtaagggagaaaggtcaagtaacatataaaggaaggcctatcagaattacaccagacttttcaccagagactatgaaagccagaagagcctagacagacattatacagacactaagagatcacaaatgccagcccaggctactatacccaaccaaactctcaattaccatagatggagaaaccaaagtattccatgaaaaaaccaaattcacacattatctttccaagaatccatcccttcaaaggataataacagaaaaaaaaaaaaaaaaccatacaaggacagaaatcacgccctagaaaaagcaagaaagtaatccctaaatgaaccaaaaagaagactgccacaataaaagaatgccaactctaacaacaaaaataaaaggaagcaacaattacttttccttaatatctcttaatatcaatggactcaattccccaataaaaagacatagactactcgagccccaggctaccttgccagcggagtagtccgacacccacaagggcccacacaggattgcccacgggatcctaagacctctggtgagtggaacacagtgctggccccaatccaatcgtgcggaacctgagactgcggtacatagggaagcagactacccgggcctgacctggggcacaagccccttccgctccactcaagccgcgggctaccttgccagcggagtcgcccaacacccccaagggcccacacaggattccacaagggatcctaagacctctagtgagtggaacacaacttctgccaggagtccggttcgaacaccagatatctgggcaccttccctgcaagaagagagctttcctgcagagaatactctgcccacttaaactaaggagagtgctaccctcccaggtctgcttatagaggctaacagagtcacctgaagaacaagctcttaacagagacaactataacagctagcttcagagattaccagatggcgaaaggcaaacataagaatcctactaacagaaatcaagaccactcaccatcatcagaacgcagcactcccaccccacctagtcctgggcaccccaacacaaccgaaaatctagacccagatttaaaaacatatctcatgatgatgatagaggacatcaagaaggactttcataaatcacttaaaga

SEQ ID NO: 4423 - DNA, 1000 bp, mus musculus
tgttgcttgtttgcattttgagatgaggtggtgtttgtttgcttgttttggccaagctctttgtttttagacactttctttgtgtgtaactcaagcaggccttgaacccactatgtggcttagactggcttctgaatggcgggtgatcaggcagacctcccaaatactgggaggcactgacactttcttaggtctctaacactgtgctactgtcatcctttgtaaactgcttcccacatccctgcactttgactggctagcttctcagggctaccggagaagtaaaacatgcagtacttagtaaaattaaacctccactgtcacgagtacttttatcgcaacagcctagttttattaagaaaataatttcttcctatttctactgccctttctttcttccttccatgtgtccttccttcagccattccttccctgactcttagctttcccctctttcagcaggggacctgtaagcccaggcatttatttctctttcctgtgccagtgctaccttagcctaatgaggagtgccgtgcagtgaccacccatgctcagctctgctgtaatacagaaaataattcttgaaaatcagtttatggtcgagactgttggtccctgtagttgtaaataagatgttaatgttcttgtgagacttgaaagcctttgggtaaatgctcacctgattttttactctcgtttttattgtttaaaaggaataaaaaacagtatatacagataatgctccagtgcacacaggaactcatccagaatattgagtttaggtaaaaagaaggttgagaaattaaagacaagctaaactgtaggatagaagattaaaaacggaatcttgaaagtattctcgaagctgctaaatgcagtcagcaatatattaataacagcaccatgctcccttatcttatttgtaccattaaattcacatatattaataacagcaccatgctcccttatcttatttgtaccattaaattcacattagttt

SEQ ID NO: 4424 - DNA, 1000 bp, mus musculus
gcatctaagaatggcccattcatctatagtagcacacaatatttgcatttgtgcgacagtataagggacaattatgctatcaggcatttttccaaagtgagtaatcgaagtttttatacctttgtgtgccatgtttgctaccatggtgggataatcttacacgcgttctcgcgaccggccaggaaagacgcaacaaaccggaatcttctgcggcaaaagctttattgcttacatcttcaggagcaagagagcaagagagcaagagcaagaagaagaacaagagcaagaaagcaagagcaagagaaagaacaagaacaagaaagcaagaaaaagaatggcaaaaccccatcccttttaaggagaattatcctccgcctaggacgtattactccctgattggctgcagcccatcggcccagttgtcatcacgagaaaggcagaacacatggtgggaaaactgcccctgcacgtgtgcagattatgtttaccacttagaacacagctgtcagcgccatcttgtaatggcaaatgtgagggcggcttcctacatatcccccttttcttttaataagagcaataggccacccatattaatgagagtggagatagaggtcaaatccccagtgtgcaggtaaaggagccatgtacaggattagctcttagactcacaggcttttacccagagcaaccctgacctgctcccgtgtcgtttttcctggggagaaggacacttggacactcaaccttctggaaagatgacatgcctccctagaataggctcatatatgccgcagagcccttctactgcagtgcttagccgtgcaactctcttgggctgctgaagcacactcactctatcccgtgcaatgagactagcctcgtggggtgcaagagctgagtggccagcgacctattgcttaagcatagatatatcaggggaagcaccatgttctagagctgcaagtgcctgggcaataaccaccttgtctctcctagtttg

SEQ ID NO: 4425 - DNA, 1000 bp, mus musculus
tgcactgttgtcttcagacactccagaagagagcatcagatttttgttatggatggttgtgagctaccatgtggttgcagggatttgaactcaggacctttggaagagcagtcggtgctcttaaccgctgagccatctcaccagcccgttgttgttgttttttaacttgttattttatgagtgttttgcctacgtgtatgtatgtgcaccacctttgtagctggtgcccacagaagccacaaaagagtgtcagatgccctggaactggagttactcagggttatgtcgtaggtgctgggactctgaaatcgggtcctccacaaaggcaacaactgctcttaacagcgcagatctaaatgttggttcttaaggcattctcatgccaagctccacggagagctcggaaactcaaaagtcttgcacgaggggaagccagggatggatggagagagaaaggactaccgagctgaggagagagcaggagggcaggacagactcggtggaggtaacccactctggcaggcttgcagcgctctcccagaaccccggcgcaaagctggctacgccgaggaggcggggcgggcggggatccgtcaggtgcccgcccacggagcggcatggagcatgcgcagtggggcggccccgcccacgcgtcgcctggacacggctctggggtggcgggcgcggcctcctccagggctcagcggcttcgcagcctctgcggtcctcggtgggaggtggcggccttgggaccttccccaggggctcggtccccgtgccccccgcctcccagggtctccgggctagctgtggggacttccgttttcctcgcggccgcccgccgtcccgcccaggtccttctttgggtcgcaggcgtcccctccccgccgtggcccctcacacctccacaggggacctccgggcaggactctgcggccacagccacgaggaaacctctgaggagaccccagcggacggcagagcagtgagggatggacgc

SEQ ID NO: 4426 - DNA, 1000 bp, mus musculus
aaaaattacaaggatgatagtacatttgtacaaagagacaaaacatgtccctaaggaattatacacacttgcatttcaaagtgcagtggactgtacagtactggacgttaaaagctgagaggtaaatgcgtgtaggatttgtctttctctgtgcctccctccctcccacctccctcccaccaccctcccacctccctttacaacatggctttcatgtgctgataggcttttctcttttgtttatgtacacagttgataatgagcagtacactcaaggaactactttacttcaaatcccactcagtgaaatcgcagtcttgtacctgaagtagtaaaacacattttgctagactagtgaacaatgtctgaatagaagcacagtgcatactagctcagtgcgttttctttgatgttactaaagaggacactgcagtaaaaatgttttcactgtaaagttttgtataaaatgatttttaaaaactcaacattaagaatgtgagatatttcatcataaaaaggaattcataaaagtgcacatgttaaaagtggaatagattaagggttacacaccaggctgtggcacatgcctttaatcccagcccttgggaggcaagaggcaggtggatttctgagtttgaggccagccttgtctacagagtgagtttgaggacagccagggctacacagagaaaccctgtctcaaacaaaacaaaacaaaacaaaacaaaacaacaacaaaattaagggttgcaagaagagtgaaatttgatttctttttggatagtacttccaaatcagtggcttttgttgctagagacttggaagcccaggcaggtttggcaccatttctgggtctcagccctgtgagccatcctcctgccctcctttctcctgccaagggatcatgctctcacctccatttccttccatattagccactgtaacaataacaaagttccattctcaaatgatttctgggtggagatcaggtgaggtcttg

SEQ ID NO: 4427 - DNA, 1000 bp, mus musculus
aggagaaaggagagagaaatcacagtcagaagattttgtatgaaaaaaatctgtgttcaataaaaataatatgaaaaagataatcaaagatgttcatgagaatatagtgaaattgaaacaggaggtaagaacataagcatgcccagtacaacatccacaataaataataaccccagtggaaaaacgcaaatattcttctactgataaacaaattgcagcatttcatacccatgaatttgaagatttccagcaagtaaataataatgaacagaaggctcatgaatgagactcaaaactttatcctaagtgggaaaagccaaacatatgtgccccttttctgacatggtacacatacaagtcttgaatatatttattcaatacatagtaagcaccgggtataacaagtaaattgggagacaggaagcattcaggcagcatggcctcagtatcacaaataagaatgtatgctaaaaccaagcaaattgtgctataaactttcaaatgaagggttacaacctgaacttatacttcagtattattgctaagacaaaactctgtatctttaataatagacttaaagatattgtatatttttacaacaacaataataataacaacaataataatattttactaagaaaactatgttacattatgtttcttctccttaatgaaggaagaattagggtgggagagatggctgaaatattaagagtgtgctactcttacagaggtcctgggttggagtcccagtacacagaggcaggtcacagccatctgtaactccaatctcagggcgtttgacaccttcttctgcctctgtgagcattgcatggatgtagttcacaggcattcaggcaaatagtaataaattcaaacaacaatcaataaaaattacaaggataaaagaggaaaaggaggaagaggaaaaggaagcagaagaagaagagaaagaaggaggaggaaaaggacacagaagcgaaagagaaagaaggaagag

SEQ ID NO: 4428 - DNA, 1600 bp, mus musculus
cttccaaaaaagaaagaaagaaaaagaaaagaaagaaaataggtagaagaggctgtgtggctgagtgcctggcttacacagatttgaaaacagcatgatgaaacacttccataagcttccaagaggaaaggagagaccagcaggggataaggatgggtatgaaaagttaagaatcactggtcaccttggaacttctaaacctctcccttaatgtttacataaccttggattgtttttataagagtatagcttcattagttttaagaaaaaccccaaatctcagaattgtggcttacttagacctggtggtgcttcacgtctattgtttaaatgtgtgccactttaacatacacagtgaagccaaggagttaatgccaacataacgagcactggggagaaaaccaagaagctgggtttagctatctcaaaagtatgaggcacagccttaagtggcagcttatgttagacacttccaaacactgatgagtggaaattgcagagaagcaggtcttagcccatggcaggagagactctcccagctgggcaagataccgtgagccagtgagcatgcctcacacactggaaacgcgctggccaatcctgtatggatcaccagagattagggtgagaatatgaagtttgcctcttgactctcgtgttctgttctggtgtcatgttatgtacaccctggagctatggggtgtccataagggacaggcaagagatgggtaagaatgtcttcctaagaggaatcttcaaaggctggtgtgttggatagctttgtgtcaacttgacacaaacgaaagtcatccgagaggagggaacctcaattaagaaagtccctccataagattaaactgtaattaagtatgtatggcatattaggaatattagttattgatgggggacggtccagcccactgtggctgatgctgtccctgggatggtgattctgggttctataaggaagcagacagagtaagccaagttgaccaatccagtaagcagcaccctccatggcctctgcatcagctcttgccatcagattcctgccctgtttgagcttctgtccttcctcaatgatggactgcaacatggatatggaagccaactagatccttcctttcccatgttgccgtggtcatggtgattcgtcataacagtagaaactcaaactaagacaactgggtcattacctctcgctcagcccaaccacttttgcacacgtgtcctatcaagtcatctttcctcaattgcctatgtccacagtccactgtagcattttagacttacccatcacttgggttgagtgttcacttcccagagggtgaagcagtggttttattccattttgactttctatagacctctctcaatttaataagcaatgcttgtatcatcctgccattcaaggctgatttatatagcctttttctaatttcccttattaatgctacagcttcatttagattaagctttctagaccatgatcctcacataccaaatgtttcacacatgaaagcctgagtcaccttgataacgtcagtgtggttctttgaatctttttcagtttcttgaatcagagccccaagccttctgc

SEQ ID NO: 4429 - DNA, 1200 bp, mus musculus
attgaccacctctattccacgagtccacccttctttcaaatatttattgaatgccaggcactcccgtggtgctgtggagatggcagtgtacaaaatagacaaggtctctgcctgcatggtgcttacataagcccagcggggctgatggaataggataaataaatacaaataatattgtggatggtgatgagtgctaagaatgagtaagtggaggatgtgagagagaatcacaagggaacttgctttagatagaaggaactgcagggtgtaaagtgatggcagagatacagcctctgccctcaaattgctaggagcccagggggtggctgggatgtgtattctgagagccattactcactagtgtgctgcttctcagacttctgccaaatccccactcttgcgagagagatgttaataggtattttatgaaaacaatcaaaagttctgttattaaatgtatctggaaagcaatgtagaatctcttggagatttacagcacagggcagcacagtgcactctaggtgctgggaagccttacggtaataaaaaaaatatataaatttgcttaatgctatgtttcaaaaatatttttgaccttgatttctgactcagtccagtaagtgctttagcatataatgaattttaatgctatcatggagataaaggtacataagtgtcacgagacatagcagcctaagatgaaacaatgtattttgtgaacgggaataatagttacaggaaattcagcgatttttaggctttgatcatagctatcactgcccagtggtgtgcctgacaaatatagaagtggatgctcacagccatccattggactgagtacagggtccccaatggaggagctagagaaaggacctaaggagctgaaggggttgcagccccataggaggaacaacaatatgaactgaccagtacccccagagctcccagggactaaaccaccaaccaaggagtacacatggagggacccatggctccagccacatatgtagcagaggatggcctagtcagtcatcagtgggaagagacacccttggtcctgtgaaggttcaatgctccagtgtaggggaatgccagggccaggaagcaggagtgggtgggttggtgtaaagggagaggggggaggggacatgggtttttctgaggagaaaccaggaaaaggaataaactttgaaatgtaaa

SEQ ID NO: 4430 - DNA, 1200 bp, mus musculus
ctatcttacctcattagtcacttatttatctacagcgaggctccagaaatggaaataattcattcattattactgaatataaattattcaatatgattggaagtgataatgtttggaagtacaaaggtagttcctgtgttttgaagcaggcagtgatttctgaacagatctggccaatagggtgatatttaatgaatccttgttggatcaataaactccagaatctcccaaatctatcatgtaattttaagattctagttacactgtgcactcactgctactatcctttacagaagcagcagttgcatcaggagctgtagaagtagccacagccattgcaaccacagctgtggtggtggtggcggcagcaggggcagcagcagcagcagcagcagcagcagcagcagcagcagcagcagcagcagatagcaacagtagcagcaaaatttcaggattagagatcatttaaatcacatggactgttcctgtcctccccagcctgctgcagaataacttcagagaaagcactgtgcatatttctttgtcttttgatcataacctcagtgatatttgcccgagtctctctgttaatagtgacatgtatcaacttcacttcacctgtgaggaacctgtctgggaattgatggatctagaggagaggctagccaattaggtaatggcctccagcaagagcggactccatagaagactcgcctttgaacttgtggagttgaactaaagggcacagctgttacataaatcagagtgaaaagagcaaggttacacctgtaggttgatgcaacggctatattttccctgcccagatagcagagcactataatgatagctaatacaatgcttagattaattaagaaatcttgactgcaattatttagataactcaagagagtagggaattattattcacaattaaagtgttaattttagaaatagagatgttgtcttaaagctctctatcaggaaacaactcatgggaaatctcttactaaaagatgtaaaagtttaatggcaaaaggagttatcaagcaggaccaggtgttataaattgaaagccagagataagatattaagtttgttaagtagacacagagaacatgtcataaacatgtctgtagacctacgtctgtgagaaattgctaactccaatttcaatctaagcatggctaagaacttagtatc

SEQ ID NO: 4431 - DNA, 1200 bp, mus musculus
aaattgaataaaaagataaaagaaagaaatcaagacatggaagatttttgtgtgtgtgttttgtttgtgggtttggcggcaaggtaataaatgaatgtttccagttaattggctaagatcgaaagtagggcaatcatacaagtaagcagtgctagaattaaaagaatagtcccaggactggtctcatcgacatttagaggtgatgagaggctagatatatagattagtgcagcaagttgtctagagtgcaggaggcctgaagcacagcgtgcaacagtgaacaacagaaggattatatggggagctagagaaaggacctgaggagctaaaggggtttgcagccccataggaggaacaacaatatgaaccaaccagtagcccccagagctcccagggactaaaccaccaaacaaagggcacacatggagggacctatggctccagctgcatatgtagcagaggatgatcttgtgggaggggaggatcttggttctgtgaaggctttatgtcctagtgtaggagaatgccaggacagggaggaaggcaggagtgggtgaatgggtgggggaacaaccttataaaagcaagggaaagaggatgggatacggggttttcagaagggaaaccaggaaaggaggtaacatttggaatgtaaataaagaaaatatctaataaaaaaagaagaaatttatttatgatataaataataaattttacgtataaactaatttgattgcttagattaaacaggctaattccttcaaatatgcaaactacaaaaagaatagttaatccaagcattcccacatatcaaaaagaaattgaatcaatataaagaaagagctagccaagatgaattcaatgaataatttcaaaatttagggaagacgtaatctgtgtgtgtgtgtgtgtgtgtgtgttcttttgtgcctatgtgtgcatgtgcatgtgtgtgtttctgaaaactgaagcagaggaattatcatctaattcactcagtgaagctaatattacattctccccaaactaagcaagcacattataaaaaaagaaatctataatttactctctttcatgaatactggtataaatattcttaagaaaatctttgaaattactttttaaaatgtacataaacatttcatttccataggtaagtggaatttatcaagggccctagaatccagggtgtgacaagta

SEQ ID NO: 4432 - DNA, 1000 bp, mus musculus
aaattaaaattcttatcagtcttccacccatacacctcacttccaaaccaacactgaaaacctttctgactcaaaattggtgttcaacactttggctcttccaaatcccttataaataaacttactagcattcctttgacagaaaattaattatgctttagaattatttttcttgtaactccctcttcagctagaagacccagtgcagatctcagctttggcagttctcaaactggggctgatctcatgatttcccttttcagccattagacctagaccctgcccctcatgaaagtgattgcctatcttcttagctctgacaatcttctttccttttttactgtgcggttgctctagacttttatgactttgcacagcacatctgattcattcttgtgaatcatttccttctttcttatggagactcttgtttttgattcacagagaaactgaaaacctcgggtgagaaccctatgatgctctcaccctataaaaaaaccttgttgctatctagtccatgtttaatgctgctgtgtttagtgttaatcaaagtccaatagtgtctgtgttcaggaatctttcgattcaaaaaaatgttctctcttttctctcttcttctctcttctctcttctctcctctctcctctcctctgtcctctcttctcttgttaatatgacctttgatttcaatctgacccaaaaaacacatagtagcaaagactagccttaaacacaggatccttcagtaagctcaggctcccagttacaggtggtataaaccttcagcgctagagtcagttacattttggattcatgagccatagtagtttggaggataaaagtgtaaggattttgaagtttcctgagtcaatggggccttctagttttgcttaattacttaaaagataagagtaccgtgccttttgtcttagtcctcaggtagcttggaccatagcttcaagaatttattctggtgcattggcactccttctacaaacca

SEQ ID NO: 4433 - DNA, 1000 bp, mus musculus
tcagtggtcagagcactctctgctggcaagctctcctcttacagggaaggtgcgcagatatcttgtgtttggactgcctcctggccgaagaagaaggcccagaacaggacctttcccagaagctgtgttgttttggcaggtcccagaatctgtcagcttctgtggagcacactctcacctgtgcagactaagtacctaagttcggcggagtcccagaaccaaggtggcaccctctgctcctgaggctgaggccttcagagccaggtggacacctgtcctctggtcgggacggtggccggctcaagttctctaattctaagtgcttcagaaggtgatgtgaactgtgaaaagtcatcacaaagaaagcctgttaagaagattagacctgtggtttagtccctgggagatctgaggagactaaaccaccaaccatgggctggcccaaggcttccactcatgtgtagcagaagactgccttattgggcatctgtgggaggggaggaatttggtcctgtgaaggcttgatgctccagagaagggcaatgctagaggggtgaggcaggagtaggtgggtgggagagcaccctcttagaggcaaagggaaagggggggtgttgggggttgtgaagaggagaccatttgaaatgtaaacaaacaaaatgattaatgaataaggaaaataagagaagattaggccatgaaggagcagggtgagctctacatacagtgggactattaagcaaaggaagaaagtcatttaaagacaggtagagattgagaacctggccatgctaagagatggcccaggaaagagtaaaagttcaagtataattagagagtaatatgacatacttatggcaaaagaattccaacaatttctgctcaacaccagaatctatggaaaggcaatgaatggaacttccagataaaatcaaggaagaggctgacactctgatgacactgtcctcatggacatataggactgaaaagcactttagcc

SEQ ID NO: 4434 - DNA, 1000 bp, mus musculus
tgggtccagcttttcaggtgtgttggggtgcccacgactgggtgaggtgggagtgctgcgttctgatgatggtgagtggtttgtttttctgttagtaagattctttcttttgcctttcgccatctggtaatctctggagttagttgttatagttatctctggttagagattgttcctgttgtgattctgttagcctctatcagcagacatgggatactagctctctcctctgagtttaagtggtcagagcactctctgcaggcaagctctcctcttacaggtaaggtgcacagatatattgtgttcatacctgcctcctggccgaagatgaaggcctgaaaccggacctgtcccagaagctgtgtagcttcagcctgtcacagaagctgttagcttctatagtccacactctcacctgtgcagactagtcttggagggatcttggaactaaggtggatcctccaggtgctctggcaaagtcctcctgggcagggcagacacctctcctctggcaaggaagatgctggatgtctggagcctgaaacgagttctgtctcagaagctgtcttctagggaccttgggggtgtccactgactctgtgcccaggtgaccaagtgctggcgcagactggaagggttttgtgagcctggtcaagcagggttttctgcttccctaatgctgtctcaggtcccatgagattggactggagcagaagttgtgttccacttactggtggtcctaagattgcatggagagtactctaggggaccttggtggtatccgctgactctgtgcccaaggtgaccaggtgctggcgctgacaggaaggctatctacattttttcttcccaactttgaatttttgttttattttgttttgtccaaagagttcactcaacattgacagtttgtgtatgagtttagggccatctactggaatatataacaaaatgcatatattgcatgtgtggtaccaaacatacacacaaaaatgaatga

SEQ ID NO: 4435 - DNA, 1800 bp, mus musculus
attcattccagtattaacatagcagatacttatttcaaaaacatctatgccaactattgtaagatttgttattttatttaaaaaaaagtaaattgaaactaatgaatttttccatgtaatatttgaaaatttaatcaaataagaccttatcaaggtctctatatatttctctaagccagtaatagacaagatgacatatgccatattagagcagaaaaacatattttttgaaatgagatctaaattgtttattccgaactactctgataatatctcagaaaatactaatagaaaatttctattaaaaattatacgtgttcttgacattctcacctttgaaaggactttcactcaaaacaaatgtaagaacatactgtgattcttttttttaatattttaaaatgaaaactaatttatgtttaaattttcaagagaaaatagcagtgaaaagagaacgcctcataagctaggtcaactaatataaaatatgacaatgaagatatttggtcttttttacatacattttaatacagtacctattagggaagatcaactcacaccaaaaaatccagttctgctttgctggcatattttgtgttgactaatcaaagtaactaggatcttttttctcacagggaaatctcccccttatattttcatataaaggggacatttacatctacctgaattagtgaaaagtgggtgaagtctgagtgttattcacctaatatttgccattatacttaggaaagatttcccaaataagagagaggatgtgagtctggtgcaaggcccaggtggaagctctcataggtacctattatctgagagaaactatctgaataacaagcaaagcattgatattgcacagctcacctgccaatattacatgccctgttaaccatcccaacacttctgcagcccacatcccattctttcatttatatttaaggctcaagcacagtgcagcttttcttaatttctcataattgtgatgtggtttatttatgctttctgcattaatatgtttatatgtttcccgttttcaatatactcacagttcatagattttagaaggaaaatgttaaatttaaaactttactctagaaaaacattttatattttattttatatacctatttatatatttagaattttatctctatataagtatctttcattacatttaatctaatgtgtaggagctggtgagtaagtcaatcatctttgaactgaaatctgtttccatagaaaatatagatgctctttacaatgtaatatattgttaattccatgaactcattaactctgttcttatttagatatatcaattaaaactgattgaaaaatattttgttttatctttataattaacttcactgatcaaaaaggaattatatgaaagagtaattccattgttgtgaagttaccccctcaaaatagaacaggttaaaggagtttattctatctcagggaaatggttttgtagtgatgaaaactgtaaggaatccaacattttctctggaacataacaacatggtatcatttcatttattgaaactctatgtgactacatgatagagactagcaaagaatgctacatatttagctccagctgtaagaacgacttccttctccagtttctctttactaaatgatcattagtgtctcacacaatgattatctttcacaaatatatatttttatgatagattcttctttcatgaaaagcatcccaacaacattctgacctctattcattttgcccatccctactctcttcttcccttgttccgctct

SEQ ID NO: 4436 - DNA, 1200 bp, mus musculus
ccattgctttaatcttgtatggtttaaaaaatttgaattccagagtttcccattatagaaacaactataaaatcacttgtacatatgaatctgttcttctggccagtctcagtcaacatatttggaaactaggcttacagaacaccaacatattttgtttaatttttttaaagtaaagtacataaatgcttctgcagggtcaacctgtcattgctggctgtatatattaggatcaaaacaaaaaagttaactctcttataagtggagggatggggttgccatcccacagttaaaaactctgacccataattgttcctgtctaaaacaactgcaaggacaaaaatggtgcatagcctgagagaaaagaggtccagagaccagcctaaattgcgatactgctcaaggggagtctccaaagcctgattctattactgatgctatgatgtgctttcagataggagcttagcatggctgctctctgagaggctcaacaagcagctgaaagagtcagatgcaaatacgtacacccaagaaatggacagaagacagggtccccagtggttgaattagggaaaggctggaagctgaggagaagggagactccttaggaaaagtagcagtctcatctaccttggatcctagagatctctcagatactgagccaccaaccaggcagcatacaccagctgatatgaggtcccttaacacatatacaacagaaaactgcctggtctggtctcagtgagagaagatgtacttaacttatgttgacatgaggccccagtacatggagaagtctgttggggtgtggaagtgaggacatcttcttggagacagggtagaaggaagggaatgaagaactgttttagggcagaccaggaagaggataaagactggactgtaaaaaaatactaaagataattttaaaaataaaataaagataaaaatggaggttaagactctatatcttgctgaggtgaaactacctcatcaatgtccattgctgctctccaaacaatgagaaggtagtggaaccagcctagatgtcaactgatttagtaacaaataatgagtcaatatgtaaaatttagtacatttacatgatggtatgtcactcaactgctaaggagataaaccatgaaatttgcagataagtagaaggaactgggaaaaaatcctcttgagttagttaaacaaaat

SEQ ID NO: 4437 - DNA, 1000 bp, mus musculus
aaattccttcttgatgtcctctaccatcatcatgagatatgcttttaaatctgggtatagcttttcgggtgtgttggggtgcccaggactgggtgaggtgggagtgctcggttctgatgatggtgagtggtcttggtttctgttagtaagattcatatgtttgcctttcaccatcttgtaatctctggaggtaattgttaaagttgtatctggttagagcttgttcctcttgtgattctgttaacccgtatcagcagacctgggagactagctctctcttgagtttcagtggtcacagcactctgcaggcaagctctgctcttgcagggaaggtgcacagatatctggagtttggacctgcctcctggcagaagatgaaggcccctaacagggcctgtcccagaagctgttagcttctgtagtccatactctcacctgagcagactagtctcagatggatccaggaaccaagatggctccctctggtgctccggcaaagtcctcccgggtggggcagacacctgtcctatggctgggaaggttcctggatgtcttgcactcaaactggggtctgcctctgaagctgtgtggcttctgcttgtcccagaagctttgtaacatctgtagtccaaactttcacctgcacagactagtcttggagatatccgggatcaagatggctcccccaggtgctctggcaaagcacccctgggcgggtcattcacctctcctctggcagggaaggtgcccggatgtctggagcctgaaacagggtctgcctcagaaactgtcctatagggaccttgggggtatctgccgactcagcgcctaaggtgacctggtcctggcgccgactggaagggaattgtgaccctggtctggctgggttttcttcttccctaatgctgactcaggtccctcgtgattggaatgggacagaagttgtgttctactcacctgtggtcctaagatcgattggagagtcctctaggaaccttgg

SEQ ID NO: 4438 - DNA, 1600 bp, mus musculus
tcatactgtaccttatgagctagctgtaagtgtaaaacctaaaataaatgaaggacaccatgaaattaaggaatcaaaataaaaagataagcatgtttgtgaacactcagagactgaggaagcatgcacaggctccacatgagtgcaactggaactgaaataaatgacatccaagagactagaaaaaaattgcctattatacatctgacagagagtatttagattatgcaaagtattcaaaatatgaacatcaattaagtaaataactcaattaaaactttgagtatagtgttaaagaattctcaaatgctgaaacaaaaaggtttgagaaacatcttaaaatgttaaacatctgtaggcatcagggaattataaattaaagttgtttagggatttcatttgattacagtcataatagctgaaatgaattttaaaaaaagatacctgatatgcaaaaattataggaaaagggtaaaacttactcattgctggtgaaagcacatattggtaaaacctctgtgatgatctttgtagaagtcttttaaaaacctgaccataacagagactgccccaccttgggatccatctcatccacagacagtaaaccctgacaccattgctgatgccaagaactgcttgcagacagaaggccagtaggactgccctctgagagtctatgccagtaggtgactaagacggatggagacacaagcaatcattggactgagcccaggaggaccccaatggaagagatatgaaagactgaaggagaacaataataccaactaacaagatcctcagagctcccagggactaaacaaccatccagaaagtatatatgggttgatccatggctcctactacttatgtatcagaggactgccgtctctggcatcaatgggaagggagttgctaggtcctgtggaggcttgttgccccagagaagagggatgctagaggggtgaggtgggagtgggtgggtgggtggtgtaaaggggaggggtaatagaatgtagagtttgtgaaaagaagaccgggaagggggacaacatttgaaatgtaaacaaatagaataaacaacaacaacaaagaacaaaacaataaaaacaacaaacaaccctgactatatatttaccacagaatctagcaattaaattcctcaaagcccatgttaagtgatgcatcttctcctacaaggccatctctccaaatcctaccctaacagttccactaaccagataccaaggatttaagtgtataaacctgaagggtccatttgaacaatacaggtagtaagtaagggatgaccttcatgtatggaccactgaggaactccccaaactagggaaatagaaaataatgacataaaggaactgtagtgattcaaatgagaatgaatccatgtttgagtacttgttctgcagtaggtggaactgtttgggaagaatctgaaggtgtgattttgttataggtggtgtgatactgggtgtgggttttgaaatctgaatatcttaaggcattacaagtatccctgctcctcagctcttagccagccttgtacttttggatcagatacaagctcttagctacttccccattg

SEQ ID NO: 4439 - DNA, 1400 bp, mus musculus
cctggctgtagttgattgtgtttttacacttgtttttaggcatctgggtctgggatggttgtaattctaggtaccttgtctttgttgaatgaataggttcttccctcattttttccccctctgtgttctttttttctttttctttttttcacttttgatagaatttctttcagaaacacattatagcaattaactcgtttttatcagtctcgactgtcgtggcctcttaaaccatgctccttcagtgcagttgattgagtgcactggcttttccaatagttgcattggtttggagtaggtttaaaactgaatttcattctgcagtgtttattaaggacttttggttattttgaacctttcccgttagttttgccctttattcaagcttgtgaatttacaacatttaaaaaaaattattaggtattttcttcatttacattttcagtgctatcccaaaagtctcccatacccgccccccactcccctacccaaccactcccatttcttggccctggcgttcccctatactgaggcatataaagtttgcacgaccaatgggcttctctttccactgatgatggcgtactaggccatcatctgatacatatgcagctagtgatacgagctctcggggatactggttagttcatatttttgttccacctatagggttgcagatccctttagctccttgggtactttctctagctcctccattgggggccctgtgatccatccaatagctgactgtgagcatccacttctgtgtttgctagtccccggcatagtctcacaagagacagctatatcagggtcctttcagcaaaatcttgctagtgtatgcaatggtttcagcgtttggaggctaatggggatttttggtaaagtatttttgttaggtacttttaactgacacgtaggtatagggatggggtgctgtaaccgttcccatgaagccagaaagcatagtattccaccagagtcttcttggtctcctgggattgggggcagagaaggagggagctggggcaactcagatggagcaggtgcaacagagctggcgatgggacagggtatatggatttagaggtaagtagaagaggtgaagatttaagttaccctacctgatttcttgtcccgggtcagtttggagagaatattatggtggtcattgttttcaatatggtcattgttttcaataggccaaattgagttcacatttgttggaagcatttttataatttgtaccatttaagggttatttcactaattaatatcatgtttgtatcatcatgtaacatcatgtaatgtttcatggattctttctgtaactgtgtcagggctcttttatactatatatagacttctccttagagaactaagcatattactagagaaaa

SEQ ID NO: 4440 - DNA, 1400 bp, mus musculus
tgtctcctcgtggcatactctcatacccactactgcacctgtaccccgaagtataatgagtctacttctcagaatagataaagtaagaagaaacattttggaaaatctatgcctgacttttatctaactctcttcactgactcttctatgttaatagtaacgtctattaatgtatatattcattaaaattggagaaaaatattgtcccattatttatttacttatttttatttacattattttatttacttatattacattccttgcccaccttggtctaccctctcagagttcctcatcgcatttctcctcccccttgcctccaagagggtgcttctccccactccccatcaggcttcccccttccatggagcatctcttgaaaattaggctaaacttctcctaaccaggcagacctctagtacatatatgctagggatcttggccaggcatgctcctggttggtggctcagtatctgggagctccctggggtctgggttagttgagactgctggtcttcctatggggtcactctccctttcagcttcttcaatcctttccctaattcaactataggggtctgagatttcagtccaatggttgggtgttataggcaggcatggcgagatttcactgacaggaacacaggggacatgtctctacctgagtcttttggtctgtaaaagcagtcaggctggagcccaaagcccacagtgtgtgtgagggggtggagctccctacactatgagctgcctactctggaagaaggtgaccagaaccaatgtggcctcagggccagtaccagcagcaggatgctggctcttcagctctgtccttgcctgtgtgcccagtggcaagtgcccttatcagagaattggcagctgtggctcaaacctttgctcattcaggtcgcaggagtaaatctgtgggtgcacaggggatacgccagaagaacccacggtagagcacagtgttgagcacctatggaagaacagactttgggggcagtcggccatgtccttgccagttatgtattttttgaggttacaatataaatacatcatctcccctttatttctcaaacccttcccaaatgcccatcttgtcatttttcaaattcaaagcctccttttaaaattactgttacatttatttatgaatatagtatataaataaactcttaaatatataattacaatctccttagtctgtataatttaactatattcctatattcagggctgatatttgatatcatattatcaattgatgtgctcgggaaggatatctctcctactttcagtagttcatagatgtctacagatctttgcctaaggctgaggtctccttggtgtttgatacacacagcccacactcacatgactagtacagggttgtc

SEQ ID NO: 4441 - DNA, 1200 bp, mus musculus
catacgcagcatggaaagtgtctggcttatgctttaccactgatctcaacattttgaaatccattaatggttcctgtcactcagattatgtgtgtgtcatttccttggaaatatggtgacaacatgttattaaactgagaatgcaaaaattaattcacccaagagtgatgattcaagcggatcccttctctgcatccctgtgcatcactttcacttacctttggagtgtcgatgtgagagaatgatgatcacaaaggacttttataatatggaataaaaaatgatggacttgagtacatatcgaaatgttgtcaaattattactttgatatctaattcaattaaaatttcaaaatgaaaagaggtacatgaatcagaatcattttatcagggagaaaattacttgctttttgatgtattagtaggtaatatattttcaattgtttatctttagacactaccttacttatagagtacattgccatattgggctcagtcagataatattttcttatatgtttctcaacaactttaaagaccctttcaaatttaattttattatatcacctcataccatatttatatgtatttatttttattacatttattttttcagtggagtatatgtatagatagatgcatgtcaggatgtgtttacaggataatctgtttgagacaatcatctacttctaccatatggattcctaggaataaaatttatgttctcagactgtgtggcaagtgccagcttgctggccctaattaatcacattgtaaacaaaaactctttgtgagtaataataaagaaagatcaagccaggcatggtggcacacacccttaatcccagcattctggaggcagaggcaggcagatttctcagttcaaggccagcctggtctacaaagtgaattccaggacagccaggactatacagggaaaccctgtctcaaaacaagacaagacaagacaagaacaataacaacaacaaaacaaatataaggccgggcatggtggcacgtgccattaatcccagcacttgggaggcagaggcagatggatttctgagttggaggacagcctggtctacagagtgagttccaagacagccaaggtacacagagaaacccagtctcaaaaaacaaaaacaaaaacaaaaaaaccacattcacgttgaaatcatcataataatgcaacatagat

SEQ ID NO: 4442 - DNA, 1400 bp, mus musculus
atgcccgagtttcattcttccatctcttggattctcttggttatgactgggtctgcagttcctgttctctttactagggtttctatgatcttggaccaatttattcatttgctttgcctgcatgattgtattttccagcaattctttaagggattcttgtttcctttttaagtgcttctacatgttttattatgtttcactatatttctttaagacaattattaatatcctctttaaaggcctctatgactttaaccagatggtgtttaaaatcacagtcttagtcttcagttgtgttagcataaccaagatttgctgaagtaggagtgctgggttttggtgatgtcatattccataggattctgttgattacttgtttgcgctatctggttgtctctgctgttggtaaacctggatgtcatcagttggagtagggctcctgagaggtaggcagaactgtgtggtggagtgtagtgctcgggttttgattgcagttatagatgcaaaccagaaagaagattgagctcagacaggtcatggcagaatgaacaactgggtctgctactatcccagcaggcatggggattgaggtaaggggttcacctgtgtgtctccagttagtgcagctctcctgggaactgtggtggggttgggtgaatgatgcagatctacaagtgcaggtgtaggtgctgactagaatgtagaagtattttaaattcaatattccattaataataattattaattactattaataattatattattattattacttttttgttgttttgtttttttgagacaggttttctctgtgtagcctttgctgtcctggaactcactctgcagaccagactggccttgatctcaaaaattcgcctgcctctgcctcccaagtgctgggattaaaggcatgtgccaccactgcccgatttattccattaattctttacttgtttttcttcattgaatattccatatgtgaataatatagaaagttaataatatgtagtgattgtttttttgtatttttgttttctatgtaaagtggactgattttcatacatgtgcaggtttataatgaattttgaatagaattgttacttttatcaaaacttaattgatgttaacaagtactaaattttagattctagttttatcaaagtaaatgcaaaaagaggattttactataaatccatgtaaattttataacatctataaaatttatagaagccatatggagagcaaaatttcctctgacaaggtaaaccatataaatattgttctgtatatgcacaaaacaatctgacttaaatttaatttttttctaaattttgcattatatatttataatataattaagttatctgaaattacataatatattattttctttgtct

SEQ ID NO: 4443 - DNA, 1200 bp, mus musculus
ttataattctgctttttctataaggtaaatgtgccccagctagttttatgattgtttgtttgttaattttgttttgactcaggaataacaaaaaaaacatgaacaatagctaagcttaacatattgaataaagttagttaaaaaacagacatagcagcaaacttatcctagtgatccatacatctagaataatacatgttattcccttttggccattctttttaaaacagtatattagaacaaggttttgcagaaaataacacaaaataaaactatgttttaaacaaaatactcaagatactgtttgtaaaacacatgaaaatcaagaaggaagaccaaagtatgaatacttacaaaatacccatgaaaggagttacagagacaaagtttggagcagaaactgaaggaatgaccatccagagactgtcttacctgaggatccatcccataagcaaccaacaaaaccagacactattgtggatgtcaacaagagcttgctgacaggagcctgatatagctgtctcctgagaggctctgccagtgcctgactaatagagaagtggatgctgagagtcatccattggatggagcacagaggtcccagtgaagtagctagagaaagtaaagtacccaaggagctaaaggggttcgcaggcccataggaggaacaacaatatgaactaaccagtacccccagagctccctgggactaaaccaccatatgtaggatggcctagttggtcatcaatgggaggagaggcccttgttcctctgaaggttctatgccccagtacaggggaataccagggccaggaagcaggaatgggtgggttggtgagcagggggattgggaagaatagaggattttcagaggggaaactaggaaaggagaaacatttgaaatgtaaataaaaaatatctaagaaaaaaaatttaaaaaaagactgtgtgtatatgccatccacaaggagttctaaactatgcatattataaaataaatacacatgcagataatgaaatactttgcatataaccatagatagatagatagatagatagatagatagatataaatattgatataattacttatatatacatatatatgtacaaaatattacacaatatatttgcctggtaatttagtttcataatgtcatgttaatgtcctacatagtttacaggtttgacttaggtctc

SEQ ID NO: 4444 - DNA, 1200 bp, mus musculus
aactgaaattctgtcattagcatcaaagtatacaataggacaccatcaaagttatttgaaataaatcagatactgaaaagcaattttgggggctcatgagtttgcatgtgtgtaatagtatatttgtgcatggtgatgtgtatatatgtgtgggctggtgcatgaggaggccagagaacaaaatcatgtcacattgctcaggcactctccactttgttattatagacagggtttcttgatagcttggctaggcaagctaggctacttggacaagcaagccttgaggatctgacagactttagctcctaagcactgagcttaaaagtctaagttaccaaacacagcattttgacttgactcctggggactgaacccaggtgctcacacatgcagagcaagcattttactgacttagctgtctccacacacaagtgttcatcccagccctgccatcgagtgaatacgtaatgaagagacgaaaaagaaagctaagctgagaagtttcactcactgaggagagaggtggaactgaagataacaggcaattctggtgaggaataagcagataggagaaacctgcacaagcacctgaacccatgatgatcacagaacctgagctgcgcccaggggccatgtttggatctgtagctctttcacatctaaatctgtattgatgtctgtgatctgtgttaccactaaagcccactcagatgctgatggtagtctgggctgctgcagcaggtggggagcagaggggtgggaaggtgtgagggtggggcaaactaattagagtagcctgtgttgctacctgaggccatggtgaatgcctgggcccttggtgttgctgtagctgtggtttgtgtcaaggtctatgttcctagttaccaccacaggccatgagaatgtctatgctctaggctgtcacctaaagacatgttgatgtcccagtactgtggtgtgcctgccccacaccttgcaagcaggatgtcagagaaaagtctctgtggggctcaggtattgatggtattgcaggagtcagacagattaaactagaccaaaggctcattgtggtcaacatttgcaaatgagccattgagacaaaaaaggtatactgtgtaacaaacatgtaacattttaaaacaagatttttgtttgtttgatttttcatctcagggggacaggttacaagatatcaaagaa

SEQ ID NO: 4445 - DNA, 1600 bp, mus musculus
tttgccattccctttctagtataaatttattcaagtggtatctctgtgtgatgcttcagattttgtgagtatgctctatcttagaaaagggcatccaactccatagaattataaccattgtagtgctcaacaggaagctcccacggaccacctccctcatgtcacaccacttcatatctgcactgaatattgtcttaactatgggttctgtcacctgtctgctttattgtgatcagtcattcaatgtgtataacctgaagtttgtatcttgaatttttaagacttttatcttgaaagcttaagatataccagtcaggttatcaactgatcttgccaatatgtgatcactctcattacatgcaaggaacataattagccattcatgtgcctaattgttcatatgcctattataatgtgtttgttgttagatgtttctccatcaattgtttttcaagtgtaattcaaagatgtctgcagtgcagctatattctcttgattgctcagtattaaattgggcattagcaccatttctgttaagactcagggaacaccatgggagatggggactgagaggtcataagagccagcagataagtagatagactgtgaaatactgtcttctgaacacagataatgctttcaagacctcccaatagtagtggtggccagcactgaacctacaatctgtgtctacctccatttgaccgtggatctgagggggccaactgctctctaatatggctgcagttgagaacctaccaggttacaatatatcattgcacacccaaggtctgacaaaacatcctgttgagtctcaaagattttcattaaaaaataaagtagaataaaaacaggacagtaatactcataggaagtaactagtatggaaggagctgtccataaaacagggttaggagagagtataggaggaggttataataaccagaatgattgttgtatgtataccatttttaatgaaaaaactcagtaacagtcaaaattatgtctttgtgggattcatgtaaatgttaaactgtgttactaaaacaccatagaatagaatattttttaagaagcagtagaattgaaaagccataaaacaaacaaacaaacaaacaaacaaacaaacagaacctaatgtgctttagtggcagagactaaacaagagggaatggaaaagactaattaaaaattacaaataaaggaagaaatagatgatgggcaaatctacagacttgggagaaaagtcagttttatggcatgtaccattgacagacaacagatataatttcacgtagagcccttatttaactcagccctcctttttaagtgattaatttattgtttgattaatgaaagcagagatgacagtgagaactgaaaagtattttgaatcccagagttactgtagtccttgaaaagagatgaaaaattcatatagaaaagtcactcaacaaatatgtgcaaatgtattgaattgctgaagtggatagtctctgaaaccctgtttctaacctccagttatttatatacacagagaattatgagcacatcaagatcagcccaaagaaaaaaatcacagaccgcatttcagtgtcca

SEQ ID NO: 4446 - DNA, 1000 bp, mus musculus
ccatgggatctttcttcttccacgttttcaaaatcaaattattttttccttctaaaaataatttaatataacaaaagtaagttatcagtcatccccattaccttccttccagtttctttctcaggctccctaccactagtccttttcaacttcgtgcatactttatttaaaatatatacttagaagagcactcagtgctgatgtattgcataagagctgggctgtgtattgaaacatgagtggcctctaagggcattcacttcccctaagtaaactgactcccacccccaggagccaccactccctagtagatcctcagctaaaggtggaacttcatgacacatgccctgttcatgctggagttttgtctgccttaatcttgtacagatcttgtgcccaaagttacagccattgggttttgtgttgtatataagctctataatggacatagaaccctgtgtggatggagtcatgcactagctttttctcttacaacctttgcttctgtttacctgcagttatccctgagccttgacagaagagaagttttatagctatcctattaaaattacacctattagctgctgctgctgcttcttcttcttcttcctcttcctcttcatcctcctcctcttcatcctcctcctcttcctcttcctcctcctcttcctcctcctcctcctcctcatcctccttcttccttcttcttttgcatgcacgtgagttcttgaataatatagaatgcatgtggagattagaagataacatcctggaatacattttccttccactgaggattgaagtcagattgtgattattgttgaatcattatgtaagcaaagtaaagaactgttttaattttagtagaggacctctctgccctttatacataaaaggataattggtatttttattttagaaatttataacagatgtatgtattttagcataaatagatattaatgtgttctatattgaaagaaattagtattctaaatat

SEQ ID NO: 4447 - DNA, 1000 bp, mus musculus
ctggaagttgatacttctcacctgtcttggtagattacacttttagtgtagagaggaagtctgctctttgcctttgtgtgcatgtgacaaatattgtagagaaacagtatgaaggtggaaagctttagttcagctcatggactcagaggtttagtccatggtcacttggtttcattgtttatgggttgtggtgaaacagaacatgaaggacaggaaaagggtgaacaaataatcccattcaggggtgaacaggaagcacagaggaataacaacattgagacttttccagatagagaattcaaaggcatggcacagctacccacttcatccaactatggccatcgtaacaacttcaccactttctatagtctgcaagcactacaaattcatcagtggactaagccttcaattagatctgtatgcttgtaatctaatggcttctggaaatccagtcacattagataggtgctgtagaaatctacaaatgtctcggttcaatcaagctcacaagatttaacaaaatggagaaaaaaataagctgcagcaaaattaaattactattatacctgatttctttcttctgcttggttcacatacacctgggaagtattgactgaagacttatttcaagggcatagagagatataatcttacgatactttggaagaatttcactagtgtaatctttatgtccttcaaatatatcaagcaaaactttcccctattagtgagtaaacaaatacaacccttaaatttgagtaattcagttaaaatgcaagtgttattgtgctcatttcatagttcccaatatagttttgagaaaagaaatcccactttgcaattaagcaaacctaactgcatggcttacacagatgagggtaggggaacaggaggagaaagagagtggtgcttgggaggctgcagggatagcaagatagcaccagcaaatgagcaggaagaacgggaggaggagaggagggatgggtaacataggctacaa

SEQ ID NO: 4448 - DNA, 1000 bp, mus musculus
aaattctgatattaggcaatccattcaaaatcctttctgccccctgatgttctaacttcctatttcttaatccaaaggccatctgattcattactgacagatgccacatccacacattcatacagacagctctacatcttgactgaaaggaagccagaagaagagtccctctttttccctagatggagcctaaaacaaggacctcaaagcctatccccacagtgactcacttcctcaaacaaaaccacacatcctaagagtcccagttcccatggaccaaagctattcaaaccaaaccaaattgatacaaatatacagtaaaaaaataatattgtaagtggggtaatcttttgcttcttaatacatattaattttagggcacaactgtcaggcaaacctgattgaaatgaatgtaaatcaatggatggctcaagaacttcccatattctatttcatgtggattgtcagaagaaaaccaaataagtgtaataaataatgtgaatgcttagtttctttatgctaaatttctaaattaaatgttctgaatgagtaccataagtagctaaactttttttggggtgttcaattatatcctatttctttaattgcatataccactaagtaatagctgatgggaaacctctaagcatgatagaatttccaatatattttttatgatataaggtaaatttaatatgccattcttgctagtgaattaaatgtgatgagtattatataatgtttaaatgtaattatagataagaagtaaataaaatttatgaaaaaccaactgaacataataaaagtaggtagtttattctatttttatagtacttgatatacagcagaatggagaagtaaataaaataactgaatttagtttggggttgtctactgatattatagaactgagatggactgtggagacccaaagattcaaatgctgtgagtgtctgaactccattttagctgatgctctgcttcacaaacatgttacttg

SEQ ID NO: 4449 - DNA, 1000 bp, mus musculus
gatgacttgtggggttgtgggtgtagaggaagaggggaataggagagagtgcccccgtccaaccagagttctggtgctctaggcaggcagactcaggaggactgtctcacactttccacatggccccaggtgggcatctggctatgtgaagccactgaccccacaaagcgagggggtggacaagtggcagctcctggtaccaggttctcaggctctggcatcccatgctggatgtggcagaggagctgagaacagaataggggtcccggggcagcactaggccctgaagatacaggaagagagggcaggaggggaggaggggggatactaggtgtttcccatgctggtgagtgtcttttgccagggacttgatgaacagagatagtctatggttttagagctttattgtaggaaggcagagggaaagagaagataaaaagagagactggccatggccaaaaggtgagaaggaggaagggaaagaaagaaatagagtcagagagtaagaaaagtgtgtgcttagagagagagaggaaaatgctttgagagtaagagagcttagagagagagtaaggaaagtaaaagcttaagagagtaagagacggaggtggggccaagcagcccctcttatagtgtgtgttgttttcttgctgttgctaggtaactgtggaggattctagccagaaggccagaagcttgggacattgttagtgtgactgctagctacaagcctttcctgtgggggttgtgggggcagtgatatcgataggagccaggggtccaggagatataagggaatacctattatcccatgtaggtggaaattatcacccatgggtcccatgggcttcaagaactcaactccacaggagaccaggctgtggtgcatagcccattgactcacaatgacttatagtttgtagtccaactagcccaccaatggtcagctgtgaatgggaagtccaacaatctagtagttcctcagtcccaccagagtagg

SEQ ID NO: 4450 - DNA, 1400 bp, mus musculus
acattttaatgatacattcataagtgtttcaaaattttgcttgtccttgatcatcagcagtagaaattttcataagatataaaataaatcacatcccttgataatgaaatatttgaacacataaagctcaaaaagctattaatccaatcacaatgagtgagattagaagttggacactaagctaccagatttgagtttacactacaggaatttgctttgtgttcatcccatatgttctaataatttctttatagaataagaagtgtttgccttatttgtagatgttacaggagcctatagttaaaatattttgggtggttaatgaaattttctattttcaaaatgttatttttttaaagactgtgaaacatttgaaaggaagaactgtgtcctatattatagtgacatgtaggcttagatttattattcaaaacctccttcatttagggttctcaagtgcttcaacctgccatctcacccactgtccagactgagaggaaaaagaaggttaataggaaaagggtgttgcagacctgtatagaagtagttttttggggtgattccattcctcattatcaggataccagcactcaaattcagtagcacacaccagacacactccagcagaaacaaggctctaccaaatcggcaggaatcagggaatcagccagagtaccatggcaaatcctttggtactgacatgtttttctctatggagtgaagacccaagaagaatggtgaagacaaggaagatcagcgaatctgtgcatgacatagcaatgtaaaagcctccttccattgtttgtggggttccatttatattctttctaaacatcacatgctctgtcaagtgtctgcttccaacaagagatggcatggcctctcacaagtcagatttcagaaaaacactgtgtgacacaactgtattgttatcgaaaaccagaaatgttcacttcatatcccctttctgttttaaagaaaaagaattttctctatcattaccaatctacacacaataggaataaatatgagaaccataaaaatagaaatttaaattaaattttaaataagctgcttatgtacaatatatcaaataatagtcgagcaaaacaaccttatatttctatcacaatgcaataatgaaacaaaattaaatttcagtagctaaacaataatcaaataatacaaccttaagtttctatcatcatacaataatcaaacaaaacaactttacatttctatcaagatatattaatcaatgtcaaagtaaaatagataagctggtggttaatttattattttttatattttgttattaatttttccctcttttaccccattgttagataaaagagagagacccctgatttaatctttattttgttttctccctgaccata

SEQ ID NO: 4451 - DNA, 1400 bp, mus musculus
aatccagcaattatccatgtttattttaaattttatgcttcatcttgcaacaaatctaaaggaacttaagaaaagaatgtttattctattcacaaacctcttaattcagcttcttaaatgtttacatgcttaatttcatcaatcagacatttagaatgaaatgaaaccaatcctccagaagatttcacttcccaggtggtgttaggatgaaatgttctggaagtaatataaattatctatctcggagccactgaagagtacaatgccagttacagataaaattaaaatttccaatctcttcatatttaattttagcagtgtatatatgattaactttgaaactcaaatatttataagaaatgaaactgaaaaggttgactttcttaaatatacataactagaatcttcaaacataaaaagggaaaagctgttgttaaattaatttattttttaaactccatatttcattccccgtcccctccccagtcaccctctgactgctccacatcccacatctcctccccaccccacccagtctccacatggatgtctcccttcccctacccgacatctctactccctggagcctccagtctcttgaagattaggcgcatcatctctgaatgaacacagacctggcagttctctactatatgcatgttggtggcctcatatcagccctgtatactgtctgtttggtggtccagtgtttgagagatctccggggatccagattaattgagactgctggtccttctacaggatggcccttctcctcagcttctttcagcctcccctaattcaacaaaaggggtcagctgcttctgtccattggttgggtgcaaatatcccattcagctgcttattggttctttggggagagagggaaggacctgggaaggaaagtagactggggaggggaacctgacctggtattgggtaagggaaaaggactgaagcccagagggccagcagaaagaatgaaaacaggcaacctcaggaaataggattttggggagacaccccaagaatgcaccagagacctaggaggtgagatacacccaggactctaagggagagacctttgataaaatgccagacagggagataagtatggatcaatttgcattcttctacatgataacaaccagttgtgccagcaccaattgttgaaaatgctgtctttcttccactggatggttttggctcccttgtcaaagatcaagtgatcataggtgtgtgggttcatttctgggtcttcaattctattccattggtccacttgtctatctctataccagtaccatgcagtttttatcacaattgctatgtagtaaagcttccaactggtaagaaggacacatgctccactatgttcatagcagccttatttataatag

SEQ ID NO: 4452 - DNA, 1000 bp, mus musculus
tgtgatactattaatttcgagtattgtaatggtttggattataatgttccatcacatacattcacatacttaaacaattggtctcctgtggctaaggctatttggagccagctgggaggtatgaccttactgaaagaaatggatctattgggaaagacggctttggtgctgaaagcctaatgctactttcagtttgtgtgtctgtttgatgtttacagttgaggatataaggggcagcttcctactcctcctggcatgcctgccacttgcgccaccccttcatgccatgatgaacatttcatgttcatgaagcttaagtcagaataaagtctttcctccaaaagttgctttgggccatggggttatatgaaaaacaatggtcttgtaactaatacaagggtcagttttatgtggtttagaaatatggatatgtgacaggcccaaattgggatctaggtcaaggggaggtttcaaggcctggaattatcattgatgctatggtatgcttacagacagaagcctagcctggctgccctctgagaaacccaaccagcatgtgaaagagtcagatgcagttactagcacccatccaatggacagaagccagggacctcagtgggtgaattaaggaaaagctggaaaaagctgaggaggagggcgaccccataggaagaccagcagtctcaactaacctggaactcctcagacatgacactgaaccaccaatcaggcagtataaaccagctgatataaagcccacaacatatgtacagcagaggactgccttgtctggccccagtgaaaaaagatgcacatcgagagacttgaggtcccagggagtggggaggtctggtgaggtgggcatggggatggcgacatcctcttggagacaggggaggaggtatgggataaggaacagttagagggcagaccaggagggggataaaaactggactataaaaaatatttaataataataataataaatagaaatatggat

SEQ ID NO: 4453 - DNA, 1200 bp, mus musculus
gtctctaacatactcttatatcatatcatatcatatcatatcatatcatatcatatcatatcatatcgtatcaatctgcctatcatctgccatccatctatcacctatctaatgaacaaaatctatagcatttatatcttgtaaatactcgatatacttactatacagcattctttcaagttaaaattaatcatagtggatattctttgttggggattggttctaatgctttgaattaatccacccgcccccaacattgggaatttgcatgtccaaatgtgaaggtcactttccccaatcggtttttgatcgatcaataaagaggccaatggctggcaggtagactgagccgggatctttagatttgcctgggataaggactgtgagagagaaagaagaatcacgatgtctcagaaggagtcagatcagatttagaactgcagaagaaaattcatccaaaatgtacatggaaagagaaagcggccatatagaaggaagggactgcctagaaggtaagagggcagcaaggataaaacataaatttatagatctagaaggccctgagctaggagtaatggagggaagtgtatgctagctgggcagaggataagaactgcccaccctttgagctagtcaaggcatattaaaaattaactggtgtgtgtgtgtgtgtgtgtgtgtgtgtgtgtgtgtgtgtgtgtgtgtgtgtctgtctgtctgtctgtctttcatttgtgaagccagattgcacttgggctagtgcgtatgtgttatcagttggaagctcaaagcagtttagcaaatccactattacagttctttgaggtcaactgctgtaaattaacatttttctttttaatagttctatagcatttgctcagataccagtttctgatggacattatctattgcaagttttatatgctttgatactgtgtttaacaatgttaaaatattttcaatatttgaacataaataaaaacagtggttttatgccataatatttgtgtaaatatttggaatacatatcctttgttttcaacatattatttacagtttgtttttcaaataaaatgacacttttctggctagagaaactatagtatccaaatatattacaatcatttaattgaatatagtcttaagttaaaagtattcattattccattgtgcaaaagggacatatttagaagaagcaga

SEQ ID NO: 4454 - DNA, 1000 bp, mus musculus
aaagtgtcccttttccttcctgtgacttccaactacaagaccacaattagagcagcacagtttctgctgagaatgagaacaaagaactaatctgcctccaccccctgcttccccatgttaggctaacatgtgtcaatcaactagcagtcttttactcttggaaaaagcaagaaagcttttaggactttttagaagttattatcatcagcagttcaggatagttagagagctagatcatccagaggcactcagactgtaaaaccacagcatcgtcctactctgtgccacctccagtaccctctccaagctgggatgctcccagtacacctacagaaatatccaatcaaatagataaaggaaatgaatagaagtatccaagaactaaaaatggaaataaatgtaatttaaaaaaacacaaattgtgataatcttggagatggaaaaacctgggaaaaagaacagaaactacagacacaagcatcaccaaaggaatacaagagatagaagaaaatatctcaaaaatagaatataaatcagaaaaaatatatcaatcaaagaaaatccaaatataaaaagattataatatctgagatatttgggaccctatgagaagacataacctaagaataatagcaataaaagaaaattcccagcgaaatggtccagataatttcttcaacaaaagtatagaagaaattttccataacctaaagaaagagatgcctataaacatactataagcttacagaacaccaaatagattagataagaaaatcctcctgccatgtcataatcaaatcactaacaacaaggaaagaatattaaaagtggcaagggaaaagggcaaagtaacatgtaaagacagacctatcagacgtacacttgttttcaacaacagagactctacaagccagaagagcctaggcatatgtcttgcaaactctaggagattgagaagacaaatgtcagcacagaattctatattcatcaaaatgttcaa

SEQ ID NO: 4455 - DNA, 1000 bp, mus musculus
tggaatacagggccccccaataaagaaactagagaaagcacccaaggactgaaggggtctgcaaccctataggtgaaacaacaatatgaactaaccagtaccccagagctcatgtctctaactacatatgtagcagaagatgtcctagcctgccatcattgggaagagaggccctttggtattgcaaactttatatgccccagtccaggggaactccagggccaagaagtggaagtgagtgggtagaggagcagggcagggggtgggtatagggaacttttgggatagcatttgaaatgtaaataaagaaaacatctaataaaaaaaattaaaaaaaacaatagaggaagaatttggaaatattaaataacactgcagacatttttgaaaagttagaaaagatacttattactgttggtatttacacacacacagacacacacacacacacacacacacacacacacacagtttaaatggagttataatataatgaagcaccaaacagaaactaaagtatgaggctatgtatgtcatatatctcttacctctattagagttgttggcaagagttttcctgagatccataaattttacaggttttctacaattttattggtcaccctaaggacaaaccccattgctgaagacaccacatacttgaatagtagaacatgaagaaaccctggttttatgggaattaaattttcgtcctcgctggtaactttaataatgatttaaattaccctacagtgcacttgcactgtaggataattttaaaaaataccaaagttaccaagttcaaagcctgggagctagtccaaaaacttatctagcaaaacttgccctctggtaaaatagtagaaatagcacaagcgtagacagacaaatgtttgtttgaagacatggtcgacaatatgaaacctacacctggcataatattaaggccaagaacaggtgactatacagttcttgggccctctaagagaactcattacta

SEQ ID NO: 4456 - DNA, 1200 bp, mus musculus
gatgatcaacacatgttcctgagatatatccaaatgttatataaacttcactgagtaatatagattctatatagtaaaggagcaaattctttggcaactcagcaaggcagaaagaaatgtaacaagaccagggttcatgtcactagaaaactatttttggagagaacatggtcactggaccctgcaaaacagggacaaagaatctagaaacatgaatttattaactcatcaatgaaaatgccagactaagaggatataagtcaactttcatgctaaaagaataagaagaaaatgaaaatattattcaggaaaccaggaaacaaagattaatacacactggctgaatgaaattcttcccaaagaggtaatgccagtcataataaagtttgaaaaagctttaaagttaaacttaaaaaaatcacatcacagagacagcgccattttcggctccagaaaaccagccaccttcctggccagaggacaggtgttcgcacggcccgggaggcttctgcctcaggttccgtggtagccaccttggttccgggactccgaggcaggcagtctacacaggtgagagtgtggactacataggctagcagcttctgggacacgcgatagccgcagtgcttctggggcagcgccgtttttgggctccagacatccggccatcttcctggccagaggacaggtgtccaaccagcctgggaggcatttgcctcaagatccgcagaagccatcttggttcgaggactctggggaaaatagtctacacaggtgagagtgtgaactactggaacaatggcttctgtgacaggccaaagcaacacagcttctgggaaagatcctgttttgggctttcatcttcagccaggaggaggtccatacacctgataactgtgcaccttccctgaaagaggagagcttgcctgcagagactgctctgaccactgaaactcagaagaaagacctagtctctcaggtctgctgatagagggtaacaaaatcaccagaagagcaatctctaaacagagacaactataacaactaacgccagagataaccagatggcgaaaggtaaacgtaagaatcttactaacagaaaccaggaccactcaccatcatcagaacccagaactcccccttcgcccagtccagggcaccccaacacacgcaaaaagctagacctgaatttaaaagcat

SEQ ID NO: 4457 - DNA, 1000 bp, mus musculus
attttaacatatcatgtaatccttaaagtgaaactgtaaattaacttaagaatattttctttccaattctataacttattcctatcatatgtagtttgataacaaaaacatatatttgtccttatacaaaaaagaatgtaaatctagagccattcaacttatatcattgaacactgcaatgccatggtgtaggaggaaggggaggtggatgccttggcataaatgccaggggccaggcagctgcaaaggcatctcgtgcaggaggacctaattcaacacagtctgagagatcaaggactgctgacacagaaaatggcagcaatcgggaactgctgtttggaagagatgcttgcttgtgacaagtgggttacagtggagagtattaaaggaccttgcagcagccttcatttgcacttgcagaggcattctctcctgcttctagagtctgactttgattctgtgccacctcatctccaacccccaagggccagtagggttgggcagcaggctgtccaggaaacaagcagcatcatgcatgttataaataatatagcattaaagatacaattattaatgctaaggatgttgggtatgttctttctcattgtcacttttatgcttttgtacacatatcatatgcaatatttcttgggaatgcaaatccttgggaactcattccaaattatcacttaggtattgtaaaggcataggaatagaattgcccaagtagcttttctgttctagttagatgttctgtatttcaagacgatatatttattttaaaatttattactgagtattatgttttcatatacaggttatctgggtagcagcattttgagtactaatatctactccttgaatggagttatattcatcttgctctggtccatgccttgacacagaaagcataagttctttaactctggcttcttcttgcattcagttgatggcattatataatgtgtgtgagcgtacacacaacagctactgaattctt

SEQ ID NO: 4458 - DNA, 1400 bp, mus musculus
tggggtgcccaggactaggtggagtaggagtgctgcgttctgatgatggtgagcagtcttgatttctgttaggaggattcttacgtttgcctttcagcatctggtaatctctggagctagttgttatagttgtctctgtttagagcgtgttcttcctgtgcttctgttatcctctatcagcagacctgggagactagctctctcttgagtttcagtggtcagagtactctgtgcaggcaagctctcctcttgcagggaaggtgcccagatatctggtgtttgaacctgcttccaggcagaagttgggttccactcaccagaggtcttaagatcccgtggagggtcctgtaaggaccttgggggtgtccaggaactctgtgtgccaggaaccctggtgctgtcatagaccagaaggtacttgtgcccctgatcaggccgggttatctgcttccctagttaatgcagtctcaggtcccttgagattggattatagcagacgctgtgttccactcaccagaggtcttaagatcccttggggaaattgtggtgcacagaggtctgggttctgacttgcttcctggctgaagatgaaggctcaaaacagggtccgtcccagaagatgtgttgcctttgcagtctgagtgctcacctgcacagactggtctttgagagacctgggacacaagatagcttgctcacatactcagacagtcagagccctcccaggtggccacctctcttctgtcggggaaggtgcccagatgtctggagcctgaaaagggatctgtcccagaacctgtgttacttctgcctgtctcagaggctgtgtagtttctgcagccagcactctcacctgtgcaaactggtctctgagggaccgggaacacaagatggctccttcacctgctctggcagtcagagccctcccaggcagccatttctcctctggcagggaaggtgcttggatgtctggagcccaaaatgggggtctttcccagaagctgtgtcgtctctgcagtctgcactctcacctgcgtagactggtctctgagggatcagggacacaggatggctccctcacttgctgtggcagaccccactccgtattttagtggtattattattcaattgtctgcagcctttgttgtagagtagaagtttatttaagacctaatttagaattaatggtaaagtaattaattaattaatttttactaacatatttggagagagagaattgtagggtaatcactctgaagctcctattgctaggtgaactgctctaaaattcagttgattggattctgttcaacaaatttaccttcatatatagaaaagaatgtatttcaatcaaaattttaagacatgtgattagttactatcaaaaaagagtaacttct

SEQ ID NO: 4459 - DNA, 1200 bp, mus musculus
cttttactaaccaccagcttacctactccattttcatagattagacattgtcttcaggaatgggattttattgtcagtctgtggaaaataatttacagcactggagaaggccaggttctttggggattccactgagacccatttggccaaaacctgaattagatataacccattccctgtcctgaacgttttatttgttggcaagatatgtacaaaaagggttgtccctctggcccctgtctccaagaggatgccctaacccccatttgtgggacaatgggctatgcacagtcagcctggtctccagttgagatgaggtcttgaacccgggtaggacctgtggtagtaatttccatctacataggatggaaggcgttccctcctgtctcttggacccctgactcatgtcgaagttaccgcctccccagcccccaaaggaggggcctggtggctatcagccacataggaataccaccaagccttcccatatgcaagtaaggtttccctcaaactctcacttcaagtaatgagaggtacctgctgtcaaacccagaatcacccccagaactgtatataaatccttccagggaattaaaggtactcgagaactattccttcgtctgagtcttttgttccacgagctctatgtaacacttgggaagggatctctcccgaagtgccacccaaggtcccgatgcactccttactggatggttggctttcccaaggcccagccggacctgactcagatcagagcagcttggagttgccaagtgacctggaaggcgtggcagagacttcttcctgcctgcatttgctttccttcactggaaccctagcacccagcctgagcagagatctatctctgtggaaaatctatagtacccaggcccacacccattcccaacccacaaggcttccccatttcctgaggcctcgagtcttttgagggttaggtgcaccttctctgatggagtccagaccctgcaatcctctgctgtatatgtgttggggcctcatatcagctggtgtatgctgcctggtgggtggctctatgtctgagagatctctgtggtccaggtcagttgagactgctggtgttcccatgaggctgcctcagcttcttccagctttttcacaattcaaccaagggggtcaccagcttctgtccactggttgggtgtaaatatctgcatctga

SEQ ID NO: 4460 - DNA, 1600 bp, mus musculus
atagaaaactcttcttgtacaaggtagtcatagccacagtttgcaaaaagtacagctattgattaattaaacaaaatattaactagatatacagtcctggggcttttaatctcctgtagccttgtctttttaaattaaataattttttaactaaaatatatattgaagggttaaaatattaaaaattactagatcttggaatctattcaccttcctttcagtttgcttgagccttgccaagtctctaggagattaaagagatgataagagttttctaagcctcaaatttttatgattctcctgtcctgacaagagatcatttcagcttaaactaaatcgtaagggaaactactatgtcctgttatataattctccgtgtgcagtatgttttggggttaaaaagttttaatactagaagatcttcaattaaaacctgtagcttttaaggctctaacctaacagggcatgatagtaaggctgtaaatgttcagaaatacatatgaagccatgctaagtactgatgcagttaataagttaaagcattatttagtctcctgtttcatgtttataatgtaaaatttagagcagatatctaaaacagataaaagttgttcaactcagaaatactaggataaaactggcgttcaaactgtcagaggtctgatgagtatggtatgtaatatgtttaaacttaccatgatggacagagattgcccaaggtgtccaagaagaggcaggcacaatgctacccacctgaactctggtataataaccactggtcttaactcccccaatgcttcacttgttgccagcacctggtctgaactgtagataaacagagggctactggggaactgattgccacatgttgctttagacaagataaggtcagtccttctcaggttcatcactttctgggcttgatggccaaagattgcttctgttctcagtgcctggggcagggagaaacctgcatcaactgtctgggtaatggaatacggataagtctgcctcatttcaatttatccttcaaattctctgattgcactgatgcttatttgtagcttagcagctaagaaaaaggcacctagcttcttacatccaggtaatctactattgtgttagattatgggttagtttgttagttaaaactactagttctcttgtttaaaaactggcaaaaaggttttctttattatcagacttcaaattgaaacataaacaggtttcagatgtagctctttactgttcatttatttaaacttgcttgcaataactattttcagtaataactactcatatttttgataaatgattagttggaaagagaaagatgcaaagctggtataatatagggatttaaggtatctgaaaaaaatggaaaacatttcagatttgtttccctcatctgcgttattattaaactacaatttcaaaagttcaccattttaatatagatcaatggaattttggtaagataatggaatattggctgttaacaattcagtcacaagttcaaaagatctgtctaatttaaggacattatttttgccatactttctaaatattcatatatactctaagacttgagtggatttgc

SEQ ID NO: 4461 - DNA, 1000 bp, mus musculus
gaagggacagtgaggagaaaaggaaaacaggatcaggtattgggggagtggggaataggattgaagccctgagggccaactgaaagaatggaaacaggcaacctgggggtggggggtaggaggtggggtgaccatctggaatgtaccagagacctgggaggtgtgagattctcagtacccaaagtgaggggccttagatgaattgcctaacagtggggagagggaacttgtagagctcacctccagtagaaaaaacagggcatcaagtggagggatgcagttaccaacccacagtcaaaaactctgacccaaaattgtctaaaagaactttagggacaaatatggagaagagactgagggaaagaaggtccagtgccaggcccaaattgggatccagcccaaaggcagaccccaaggcctgacactattactgatgctatggtgtgcttatggacaggactctagcatggctgccctccgagaggcacaagcagcggaaggggtcagatgcagatacttaaacccaacaaatggaaagcgatgttgggccttatttggccagatactgaggcctactgaggaagcctgagcttttgatcgtgtttagacttgtcttgctcacttcagtgctggagtgactcagcaggacttgcttaagcctgcctttgcctagctacactgatgtagaataactttattggccctgtcagtcacccaatacccttctctgcacccagtcatctcacctcaccaaaattccccacctacttcctcaaccctatataaacaaaaactgatacaataaaaccagttcctgctttgacagactcccagccagggtatttttgttttgggcccagacactccaggagagacttggctgggctgggttctctcctcttgcctggacctgctggcagagagcctgggaccactgtcttgaattagggaaaggctggaagaagctgagcaggaatgggatgaggaactgtcagtgggt

SEQ ID NO: 4462 - DNA, 1000 bp, mus musculus
ctgcattggacagtagtctctttctccttgcaacatgagattgaaacctttgtttagctttttattttttaattaattatttttatacaccatattttattcctccttcccccatccatcatttgactgttccacatcccatacatcctccctacccccctgtctccacatggatgtccctatcccccatgccacctgacctctaaacttcttggggcctccagtctcttgagggttaggtacatcacatctgaatgaacacatacctggcagtcctctactgtaagtgtgttgggggcttcatatcaactggtatatactgcctgtttggtggtacaatgtttgagagatcatagggtaccagattaattgagactgctgggactcctacagggttgcccttctcctctgcttctttcagccttccctaattcaaccacattggtcagctgcttctgttcattggttgggtgcaaatatctgcatctgattctttcagatgcttgttaggtcttccagagtgcagtcatgataggtgtctttttgtgagtgctccatagcctcagtaatagtgtcagaccttgggacctccccttgagctggatccaactctgggcctgttgctggaccaacttttcctctctggcttctcttcatttccatccctgtagttctttcagacaggaacaattatgggtcagagttgtgactgtgtgatggccccctttcctcatttcattctgtcttcctgctggaggtgggctctataagttccctctctatactgtctggcatttcatctaaggtccctccctttgagtcctgggagtctctcacctcccaggtctctgctgcattctggagggtcccccaaactcctatttcacaaagtttgcctgcttcctttctttctgttggccctcaggacttcattctttttccctctcccaataccagagcaggttcccctctcccccaacaccttcccttctacatctta

SEQ ID NO: 4463 - DNA, 1000 bp, mus musculus
ggcatgagatttaaagttaggtgtttcctcttggctcagtttgagatgttagtgatgctctaattccatggggaagctcttatgtgcttactggtagggtcctctcagtgaggtgtcgtggttacatgttccagatcaggttaaaaaaaatgggtagagagcagctctactgcagatctcaaatctttgtgatgcccaggatctgagtttactcaaccttaccaggtcttctgtctggtagcacagtcaactggccctacgtttatctcttaaaaatctgacctatccaaactgtttttacatggcatattatgattacacaggaaaatggaatttgtttcaactatttatcctaattacattatcataagtagttttcagagtatggtaattaggcagtgtaaaggggcaagaaataacatattatatgatttacagaaaagatttcctcacagtgtgtgtgtgtgtgtgtaatctgctaaagaaataatctatctaataaaggatagaaaattcaaagaaatattttaacttgagttgatgacagctccccagcaataggataatagaacgaattatcaactttcctttattttttttggttgtttcttccttttttatttcctccatttttctaagatagagctttatatgtcaggggcatcggaccagctagtgtatgctgcctggttggtagctcagtgtctgagagatctcagggcccctgcttaattgagactgctggtcttcctatgggatcaccctcctccttagcttctcccagccttttgttaattcaaccacaggggtccacagcttctgtccactgactgggtgtaagtatctgcttctgtctcagtcaactgcttgttggacttcttagaggagagccatgcaaggctcctgtctgtaagtacatcatagctgtgttagtcagagtttctattcctgcacaaacatcatgaacaagaagcaagttggggaggaaagggtttattca

SEQ ID NO: 4464 - DNA, 1600 bp, mus musculus
tcaaggaaaacattcatcccaggtttttattaattactatctggatatatttatttataatatttattattaattactatctggatgtattttacagttaaaattacataattaacttttcacataaaaattgcttttgatcaatgtatacattttggtagcatacatgttttctaaggtctaaaagcaggaaacatttttacatgaggttattattctattgatatcatctatcattcctattttgtttgtacaatgaacttaacttcaagttaagtatgaaattcaaacactagcttgacaaaaccacttttgtccatgataaatcttactttacaaagtataaatattttgaattataatatttatatatatgcataagtggaaataaattaaaatgaagtgtattacattgacaactgtatgtttcttttccaaatttgctatttattaatatttattatttttctaagaatacaagagtaacatgaatgatttttttttttatgaacctagtagtcagtatatttaacttgtcaccacaggtatcttgggaacaagcttaatttaaaaaaattagtcagattgctcttacaaatgcaaaaccataaaaacaccatgctgacatggttaacataaggagatcttccaaaagctgcatgacatctgctaggtatccgcaagagtatacggatgagtagcatgcctatcaaacccattgagatcactggacatcactgttctattttattatccatgagtctatttatgtccagtctccctctagctgtcaagtgtggtggtttgaatatgagtgagtagccttattcggagttgtggcctcattgaaataggtatggccttgttggaggatgtgtggccttgtggtagtgggctttggaacccttgtcctagctgcacggaagacattttctttattctacctttggataaagatgttggacttctatctccttcttcagtaacatgcttggctgccttgtttcctgttatgatgataatggtctaagcctctgaaattgtaagactgccccaactaaatatttgccttcataagagttacattggtcattgtgtctcttcagagcaatgaaaacccaagttaagaagttggtaccagtgactggggtattgttgtgatagggctgaccatgtttttgtttagaggagtgtggatttgggaagttttgatttgggaaacaatggaatgctctattgacaatcctggtaggaatatggaagacagtcatgctgtaggtggtttgacctctggaggctgctggttcaagagacttcagatgagaattttagcacatgacctagagactgttcttgtgatattttggtgaagaatgtggctgctattttgcctttgtctgaagaggctccatgaaaataagctgaagataattcagattaattgcattgacaaaggaagtctcaaaaatagtccagcatggacttcatgctctggtttactttcactataagaattctgaccaaacatcacaaggttagaaagaaaactacaaaatgtaaggttcgactattaaagggacaccacaatgtggaatggagc

SEQ ID NO: 4465 - DNA, 1000 bp, mus musculus
ccctgagggctagaagaaagaatggaaacaggcaactgcaaggagtaggaggttggctggaccctccagaacataccagagacctgagaggtgaaatactcttgggactcaaaatgcctaacagtagggagacataacttatagagcacacctccaacaggaagatagggtatcaagtgaggaagggggttgccatcccacagtcaaaactctgacccatgtttgttctggtctgaaagaactgcagggataggaatggagaggagcctgaggaaaagaaggttcagtgacagggccaaagctggatctagctcaaggagaggtcctaaggcctggcactgttactgaggctatggagcgctcacaaaaagggacctagcatgaccacactccagaagacccaacaagcagctgaaagagtcatatgcagatatttgcacccaaccaataaacagaagttgcttcttaattcaacctgtgattgaattaaggaaatactttaagaagctgaggagtgtgaccctgtaggaggaccagcagtctcaattaacctggacctcgagatctctcaaacactggaccatcaaccaggcagcaaataccagctgatatgaggtctccaacacatatacaacagagtacttccaggtctgggttcaatcagaaaagatacatctaaccttcaagagactggggggctccagggagtttagaggtctggttgggttgggtgtagggattggagacatcctcatggagacggggggcagggggtaggaggtataggataaggaacagttgtagagtggacaggactgggggagggaataaaatctggtgtgtaaataaataaatagacaaaaatgaaaaataagttatatttatattcaaggagtattaaaaggaacttctgtgacatgtaagaaattaaattatttatcaaattacataaaaagtgtgctacccttagaaattaagggcatataatcttagtaacact

SEQ ID NO: 4466 - DNA, 1000 bp, mus musculus
gtattccatgataaaaccaaatttgcaaaccacaaacccagccattcaaggataataaagggaaaactccaacacaaggagggaaactgctcatggctcaatatacagaaatccatcaatgtaatccactacataaacaaactcaaagaaaaagatcacataatcatttcattaaatgcatttgacaaaattcatcatcctttcatgtgaaaagtcttggaaagatcaggaactcatgacccatacctaaaaatagtgaaagcagtacacagaaaacctgtagcctcccccagcctgaagaaggcttgtgcagaccttgtcaccactgaggtggggccacctgtggtgcagctttctgacttggttggtttcttttgatgtgtcaagatgggccttcccccttttaatcacaatctcttagtaaactcacggaccttgatcagagaaaatttgtcttggtttcattcttttcttgccatctagtctctctttcagccccaagcctacatttcaggattacacggttcatgtaggctgtggtcagcttacaattacaaaaacccatagccaacatcaaactaaatgaagagaaatttgaaacaatcccactaaaatcagggacttgacaaggctgcttattctctgcctgtctagtcaatattgtacttgaagttctagctagagcactttaacaataaaaggatgtcaaaggaatacaaatgggaaagaaagaagtcaaaatatcattatttgcatatgataagatagtataactaagtgaccccaaaaattccaccagagaacctctacagctgataaacatcttcaacaatgtggctggatacaatattaactcaaagaaatcaatcacctttctctactcaaagaataaatgggctgagaaagaaattagggaaataacacccttaccatagccaaaaataatattacataccttggtgtgactctaaccaagcaagtgaaaaatctgtatgacaag

SEQ ID NO: 4467 - DNA, 1000 bp, mus musculus
cagattatagggtatggtaattggttacgaagattgaggaactaaacagagtatatgaatattgtttttatgaagtgttgaatgtgaagatataaatttattataagtcagacagcataaatttgttattttagtgagtgataatgatgttaattatcattgatgtgtggcatgacatatgttgaaggtataattgtacttgaaaaatgaaaatacacagaaaaattatttaaggaattacatattctacattgaaaaaaaaatattagcaggaagagaattacaaagttcaaggaaaacatgaaaaacaggataaataggtgtgtttaattttcaaaaggtttaaagagaatatataaagttataacttcataaactccaagttatttatagaaaatatgggagtaaatttggaattgttgaatattgttgaatctattaagtgtgatgaacaatctattaattgttagaaatcctaaatccagaagtttagtgctcagcaatgttactgaaggtgacgagggatttgcttctagtattttcttcctaaactgattctcttgactgaccatattcactttcatggaagtcattactcacttctgcattcttcaaaggcactgactacccagacaaatttctactgaataaatcccaggatagtcttcctggctatggagtggttagagtaaagaacaatgctaaagtacagtgtcaagaggcaagtagaggagacaagatccaggtgtctgcactcggcaaggtgtcagcaaggcagaaacagagcccaagatgtttccatagacttttgttgacttcaagtcaggccagctgtggtttccaaaagaaattaaagggttgaaagatttcattaaaaatattttaataaaacacaagaatttcaagacttagaattgcttagaagaatgtaagttacacttatgttgctctctatgctcccaagccagagtaaggaaaaataacagaaccctcaatgggc

SEQ ID NO: 4468 - DNA, 1400 bp, mus musculus
tatttgtgaatttcacatcatgcaccctaaggctactcatttgctcatcccctcacacccaccctccaccattcctatttccccaacaaaaagaaaacagtaattataaaccagaaagaactctccccccatctctctctttctcccccccccccacatgtgagctgcagtgtgtcacagtgtgtcacatagttcactccaccttcgcccaaatagctttccttgcagatgttcactggagtgagtcattgttctggtttgggagcctctggcttctgctgtactatcagtactggatcctcacaaggattactcttctggatatcctgctgttgccccttgtcatggagatactgaagctttggataaacaggaacagacctttcatgagctgcagaagattataggtggggtagatgttggggtaggcaaattcagagccctagtccttggcctgggtagaagctgagctgatcaaactgccatctctcctgttcccctcacaccaggaccaacattattgtactgctgaagtgaggtactgcaatttctctccctagcactgtagccactgaagggtggcaccagatctcccattctcacaccctcagggaagctcaccagcatgcaaacggtagcatggtcagaggagcaagaaggtatgtcttccatccaatgctaagtgtagaagattggaacagccagtgctctggagtgctgcaaatgagtgtcatagccagttctatatcttcactatcatacctagctctcttatactgcacaggcaaggagtaaggccaactcttccaagtgtggtgactggcaaggggtcaagccaaatctccaaccaaaagagatgggctagctcagcataatacttagacatcaacattgcctcaggaagcagcccagaccaggggtatccatatgacctttggtggtaaaatgtaccatggaccccaatgcacaccttggctacaatagaacaaatgatctggacatggatcctggtggcagaatggacctcaatgtcatgatggcttcaggtggtagcacaagtcactgagatttattggacactggcatcatcactggccccggatatcaacatggtctaaggttgccgttcaaaccagtgatgttggatgccctttgaagaacatgagccatagacatcagcacacaccctgaatgaggtaagaccaaggacccagacatggcctttagaggtaacctgggtctgaacataaccacggcctcaggtggtcatacagcttcctcctatctacctgttcatcatactagtcttctttattggagtcaaaatttttgtataatcaggctttggtggttagcttttacctatcattatgctacaactgccaatcacctacaattga

SEQ ID NO: 4469 - DNA, 1000 bp, mus musculus
gtgtgtctgtaaccacagtaataagtgggcagagaatgttggcacttaccaaattctgtctcctcttttgttgagcagtgggtgtaggggaaagtgggaatgggagaaaacccacatccagccagagttccagtgctcagggagggtggacccggaggactgctgcacactttccaagtgggagggtgggtttctggctgtgggaagccattggacaccagcttggggggggggggagaaggaggggcagtcctagcaacagttctcagtcacaggcatcccaaacacccacagaagagctgagaacagaatgggagccccaggggccgaaagtagaagagggcagggagagagggggcactgggtggtttccatgcagcagagagttcctcgcctggtccatggctggaagacaggaaggcctttaagagagaggttagacactgcttgttaggggaaagcctgtcccagcgttaaagtacagcaggccttgatggtcagagacagtctatggttttagagcttcattgtagaaaggcagggagaaagagagaaggtagaaagatggagagagactggcagtggccacgtggaaagaggggtgagagagggagggacagagagaagaaggtctagaggggagagtaggaaatgtgacagcttaaagagagtgaggagaggccaagcagctcattttatagtgggctagactatcttgctattgacaggtaactgtgcggtggagcatacctggctattgtcaggtaactatggggacagagtctagccagaattccagaagcttgggacattgtctgcatgacttatagttacagaattatggagttgggggctctgtggtgtcaggcacctgtctctgggaacgtggttcgctgtttcttcccaaatagagttttctactgggttgccagaacaagtctcattcaaccaaaataggctgcctttcacgtctccacattcttttagcaagatatctact

SEQ ID NO: 4470 - DNA, 1000 bp, mus musculus
tcttgttttcctgcaattctttaaggaatttttgtgcttcctctgtaacttcttctacctgttttgtagtgttctcctgtatttctttaagtgagttattaaagtccttcttgatgtcctctaccatcatgatgagataagcttttaaatctgggtctatcttgtcgggtgttgtggggtggccaggactgtgtggggtgggaatgctgtgttctgatgatggtgagtgatcttggtttctgttagtaagatccttgtgtttgcctttcgccatctggtaatctctggagttagttgttatagttgtttctggttagagcttgttcctcaggtgattatgttagcctctatcagcagacctgggaaacttgatctctcctgagtttcagtggtcagagtactatctgcaggcaagctctcctcttgcagggaaggtgcccagatatctggtgttcgaacttgccttatgacagaagttgtgttccattcaccagaggtcctaagatcccgtggagagtcctctgaggaccttgggggtgtccacagactctgtgcccaaggtgcccaggtgctggtgccaactggaagggccttgtaaccctggtcaggcctgcttttctgcttccccaattaatgctgtctcaagtcccgtgagattgtattggagcagcagttgtgttccactcaccagaggttttaagatccagtggagagtcctatggggtacttgggggtgtccgcagactcagcacccaaggtcttggtgccgatcagaagggaccctcactcttctttctaacttgtttctgttctaggtttgcagtccccctcacacctacaaataactgggttctgctggataggacaagtggcgcccaatgggaggccgaggttcagaccttttaccttaggtggagattatggagtttgactcccccagagaagttcgtcatgacccaaagaagaaataagtagtggaggaccgctctcacagctcata

SEQ ID NO: 4471 - DNA, 1000 bp, mus musculus
atgtaaatatagtcctgactctgcggggcagtgagcaagggttggggtgggtggggataaagggagtgggagaaaacacacaccctgccagagttccggtgctctgggcaggcatatagggaagaactgctgcactcttccatatgacccatgtgggtgcctggctgtgtgaagccactaaatcactcagtgggtggtggacaaggcacagttctaggtaccaggttctcagccttgggcatctcatgctggacaccatgacgagctgagaacagaatgaaggccctgcgggtggctcagtcatccctggggctggagggaggagagggcagggagaaagggagtcgctgagtggttcccatgtgagcatgagtccttggtctggtcaggggctggagtgcaggaagaccttcaggcgggagggtagaccccgctccttaggggaaaccctatctcatctcatctttcaatcaagacacaaggcaggccttgatgatcagagacagtctatggttttagagctttattgtggaaagcagggggaaagagagaagggagagagaggggggggtgcatggccatggagagaggggggggaagagagagaaggagggctagagcagagagtaagaaaggtgagagcttaaagagagtgaggaggggccaagcagccccttttatagtgggctgggctatcaggtaactgtggggaggagcatacctggatatagtcaggtagctgtgagggtgcagtctagccagaattccagaagcttgggacattgtttatgtgacttatagtcacagaatcatggaattgggggctctgtggtgtcaggcacctgactctggaaacatggcttgcttttctgtcccttgtagagttttctactgggtcactggagcaagcctcattcaaccaaaataggctgcctatcagcgccccacattctccttaaggaaactgctgttttcaatagatggagatcattacacaaat

SEQ ID NO: 4472 - DNA, 1400 bp, mus musculus
ctttccaccggagtctcaaggttttctgcgtggagacgtctaatgtagcaggtcttcttctcttgagtaggccttctggagctgctttttcgctcgctgtctcactcactggagcaccttgagcctagagaacaaaggctgggaaagcagcatgtcagcactaggtacaaaggctatttttaccagtggaggggggccccctctagagtaatttataggggggtcagtctaaactgtccaggggtgtttctatccctgaagagcataaagggtaggagagctatctaatcatagcaccagtctccgctgtcaatttggtaaggatcccttaatggttctattaattttttttttacctgtcctgagctttggggcctgcgtgcacaatgtaacttttaaccgatctctaatatcttggccagtccctgatttacctgggcaacaaaggcaggtccattaccttgggaagatttcttttagaaattctacctcatcatagcacagtccttgaagcttttgactatttcttctgccaagtcagagtcctgtaacatagcagtcaaaggacctaaccacacctttgaatttcttggcccccaggccaagtcaaatactgtccataacttgatagtgctcagcgacgtatctaaagctggtctctctgatgtcataataatctttagggctccttgactgccaggatcactgctccttgggcctcctgattggcggttagatctgccacctgaatttttttagccacagtatcttaggtctttttctgcagatgtcaacagccctctttgtatattgccccgtacagtggcaaaagcatacctgttgtcagtgtagacttttctttgtcatttatagagcttgtcttaaagtcacaagttcagctttctgggcctacgtccctcaggaaggctgctggcctagatcacttgctttctgttcaccaccatactgctgtccccgccttctgcttacctttaaccttgaggctactgtcctcagaccaaggctgatctgatccttcagatcatttcttctgccagaatgtcagcgcagtgatgagtaggtgcagtctcacgcagtgggacagcaggtggaatgaagcgaagatcactcatttagacaacaaaaagctctgatgtgtcacaggagcgttggtaatgctttcaagagtgtgggatgccactacagttatttgctgtcccagagtgagcttatcagcatccttgacaagcagattatggcagcaatagctttcaggcaagaaaaccacccgctggcaacagggtgtaacttcttggataggtaagtcactggccttttttaaagtcccaaagtctgagtaaggactcctctggtgacccctgctctctcttttacataaa

SEQ ID NO: 4473 - DNA, 1600 bp, mus musculus
tttgctcatttaaaccaaacaaaattcttaatttttctagctgtaatttcaaaagaggagcaccttgtcacctgatgaatccaatttttgtaggaaaaacagccatctgttcccttaccatagaactttgagaagctgctggtccctataagaacagcatttataatcagtgtctagcagggcttctctagccacactagattcctaactacaggtgcagggtttcaaagaccaattaatactgtttattttattttatttttttattaccaaattatctccagatagtcggagagtactgcttttctcaaaacccattttctcacatctcaggtgtaaactatctctagtcagggtataaagcacctatgagaattacctttgtttctgtagattttcacatagctctaaacacgtacacaaaaacacatagaacagaaaccaacaaatccagacacactcgaccctttcttgtcctccacaagcaggcaaaagaattagacgatgttggagggggaagcttccgcttcaacagaactcggtccctctgaccgatctccggagacagccaggcgtccctgactctccctacctcccagggcgtcccccagggccacagcctgtggtcctcttagcacgtctgccgaccacagtcctccggtccttacggcccaaaaggacagctgcaaatacagacgcgcgcatttcagaaaaccccatcaccccatcgtctacaaacaccgtcgtccacttttacctagacaaccaaaaccagagaatctcacttgtttctcactttgccaggtgtaaaaccaaagcacgaggaggtgggactcgaacccacgatctcgtaaccctgaaaccaaagcacgaggtgggactggaacccacgatctcacaacccgaaaaccaaggcacgaggtgggactcgaacccacgatcttgtaaccctgaaaccaagacacaaattcaataaactcagatggatccaaactcagactttgccgtgcttcagaaacataggacaagacacaaacaacccaacataacaagcacatgttctaatgttcgttttagaaaacagacactcaaaacagatacaccggccggcacacacacaagaggggatccccatacctccaagtcggttctcgggtgtgaggggtggtcgcgtttcccggccaacgcaccaaatgaaagacccacaacgtgaggactcccccacgttctgactcaggagaggcgacaccccaaaatcaccaacgagaaaacggtcttgttgtaaattgcaagaggatttttattcaagagcgctctcgggcccacggtcatacaccacgcaggggtagaggactgtggcgccctgagtagctgggtaagggggtatttaaaggaagaaactgaaactcaaggaagtggggagggctttgttggaagataccaaagataccagttaagagtcacaaggaagtgtaaagttacaagagtcacaaggaatagctggtaattgttaactctcaagacagcttctaagagcccctaacaatagcacatttgcattgcaggttctggtaatggccagggtgactttctttgaatg

SEQ ID NO: 4474 - DNA, 1200 bp, mus musculus
taataaacctgcatggctagcctagcagttcttttaggctggactcaataaatcaatagtaaattcaattttatcatctcacatataaaaattctctcactatagacacttatatgctaagtttcatgtttttaaaatatacagttgtttgttgggaactaatgagggttaggggaaagaggagggagggaggctagcccacgtccagccagagttcctcctgtgctcttggcaggcggacatgggagggctgccagaggctgtccacttggcccgggtgggcatctaagccattgaccccacttgacagggggtggacaaggggcatccccctaccagggaccctgaggtgataccctcggcccatatgagaaagagggctaagcgagagaggttcacatgtaggtgagggtctttagtctaggtcttgactggagcacaggaaggccttccattaggagattagaaatggctcattagagcagagcctatcccatcttccaagcacagcagaccttgatgaacagagacagtctatggttttagagctttattgttagaaaagcagggagaaaggagagagggagagagagagagagagagagagagagagagagagagagagagagagagagagagagagagagaccggctatggccaagaggagagaagcgggaaaaggagaggaaaagaagaaaggctagagtgtaagaaagagagtgtaagagggagagagagtaagaaagtgagaggatagaagatgagtgaagagagtagaggtaagagagcgaggtggggccaaccagccactcttatggtgggatgttatctttactgttgctaggtaactgggtaggagtgtagcctgaaggtcagaagcttgggacattgtctatgtgactgctagacacacttctcctgtggggctgtgggggcggtaacttcgacaggagccttgaaaccaggagacatgagggaacatgccatgtaggtgaattatcaccactccagggttcagacttcagctcaactggagacaagacggtctgtacatagaccaatgccccacagttgtttatgtctgatattcatttattaatatttggttaaagtatatggtaactaacattgcaggtgcatataaaaacaaaaaagtagttatagaacagagcaaagggagcttgcattagagagcttga

SEQ ID NO: 4475 - DNA, 1000 bp, mus musculus
gctttgaaactcctttttcacaacagcacacttcctttttctaaccaatctagcttagattaagtcactagctatattgagcccatttcttttaattaaaattaaaagactgccatctctttacgagtgttcttttgctgtaaaagagacatcgtgaccacagcagctctctgagcatttaattgaggtctgcttacagtttcggatgtttaatccattattatcactccagaagcatgtcaggacacatgtagacatggaagcttggatttcaacatctagatccagagacagcagcaaagagagactttgaacctagagggagcttttgaaacttcaaagtccaccagtagagattcacttcctccaagagcatacctctgaatagtggaatagtgccactgcctggcgactgagcattcaaatctatgtgcttgtaggcatccactcttattaaaaccaccacaccatccattagatgtgaagagaaatctaatgctatcttcaagtacagatttcattagttactcaagaagaaaaacacaaataatgtgtgttttaagctataaacattggggatactcacagccaaccattagactgagcatggggtccccagtgcggtccccaagagagaagttagaaaagggactgaaggagctgaaggggtttgcaaccccataggaaaaccaacaatatcaaccaaccagacccgatcccccctacccagagctcccaggagccaccaaccaaagagtacacatggagggacccatggctctagctgcatatttagcagaggatggccttgttagtcatcaatgggaggagaggccgttggtcctgtgaaggctcagatgcacctggaattcgagggcagtgaggtgagagtgggtgggtgggttgaggagtaccctcattagaagcaatgggagggaatatggggtagggaatttcgggagaggtgtgataccgtgaaaggggataatatttaaaatat

SEQ ID NO: 4476 - DNA, 1000 bp, mus musculus
tcctgtgctactcccagctactctgccccagcagccgtgccgaccagttcttatctcctggagactctcagattcagagcttcaacatctctccagccagcacagtttgttcccactcgcgagtctctaccgtgccagctccatgtgtcaaatcccccatgacctttgtggtgcacatctgacaaacccatgcttagccaccatacctttctttcttgaactcagatgaactgtatgaaggaaaacacaacacaaacttacttcagaaacaacagtactcaatcgctgggcacaaaaactaaaatcctaacttgtcagccttattgaatctaaatcatccagtgacgaatcctgatagatccaccagtgaaaccgggagacatagctacaccttgtcctcatccaatcctagtctcaaaggatcctctctctcctgcttcctctcttcctctgtccaacccagatgtcctgcattctcacccagtgactggctccttcattcattaggggatggttcagaagaagtcacctgagcaactgactcattccttgttcactacccctcccaaaaaatcagaattagcatcaaaatacaagaaaccccagggctatcaacaacaccatttccaggtttctccctccccagaaaccctctatttcatctaccctccccagtttctatgagggtgtttggccacccacccagtcacccactcccacctctcctccctggcattaccctacactgggacatcaagcattcacaggaacaaggacttctcctcccattgatgtccaaaaaggccatcctctactacataggcagctggagccatgggtccctccataggtactccttggttggtgcttaaatccctgggaggtctgggaggggcaggggcggggagagtctggttgcttgatgttgtcctttttagggggttgcaagtcctttcagctccttcattcctttctttactcctctataggggacctcatg

SEQ ID NO: 4477 - DNA, 1000 bp, mus musculus
atttctgaacatgaacttcatcatctctgaaatggttttaatgataaaatcatatctgactgcactcatggtgcttataaatttcatcatatcattatttacatgataatgcaatatgggaaattaataatgcacatgcaaaacagtgtaaattaatcttttgtaattaatccattaaatatgtataactaatacacatttagaaatgtactgttggttatcaaacaattttatagattgatcaatgtctaattatatatatatatattttttgcttatttatttatttatttattttaaactccagattttattcccctcccggtccacccttcgactcttccacatcctctccgtgcacctctgtctccatgaggatgtccccaccccccattccccaccccatgaatcctctaaacttcctggagccatcagcctcttgaggattaggcgcatcttctctgaataaacccagacctggcagtcctctgctgtgtatgtgttggggcctcatatcagctggtgtatgctgtctctttggtggtccagtagtttgagagacctcgggggtccagaataattgagattactggtcctcctatagggttgccctcctcctcagcttctttcagcctttgctaattcaacaacaggagtcagctgcttctgtccactgattgggtgcaaatatctgcatctgactcagctgcttgttgggtctttcagaggacaaacatgataggtccctttttgtgagcactccatactctcagtaatagtgtcaggtcttaagttcaacaaaggtgagattaatgtaaacctaaccatatggatagaatatatgcatattttgcttgtagtctgataaaatttggctataactaggaataacaaaaacttcatatgttaagaacatttaagggttggatttcttatgttgattctggtgtatctacaaaacagaagtattttgatcatcatcttacacacacacacacac

SEQ ID NO: 4478 - DNA, 1400 bp, mus musculus
caagaaggaagaccaaagtgtggatactttgttccactttagaatggggaacaaaatacccatggtgggagttacagaaacaaagttctaagctgagaaggaaggaaggaccatccggagagtgccccaccaggagatccatcccataaacagccaccaaaaccagacactattgcatatgccagcaagattttgccgacatgaccctgctatagctttctcttgtgaggctatgccagagcctggcaaatacagaagtggatgctgacagtcttctattggatggaacataggttcccccaatggaggagctagagaaaatacccaaggagctgaaggagtctgcaaccttataggagggacaacaatatgaactaaccagtacctccagagctcgttgctctagctgcatatgtagcagaagatgacctagtcgggcatcaatgggagaaaaggcccttggtcttgagaacattatatgccactgtgcaggggaatgccagggccaggaagtgggagtgggtgggttggggaacagggcaggggagggtataggggacttttgggatagaatttgaaatgtaaatgaagaaaatatctaataaaaataaaatgaaaaaatatggttgatcaagaaaaacagaacaatattgtcatgcatttatttatttatttttgcttccttccacctgttatgttggcattcatacctgtaagggatcaggaaaggggaatagaaatgtaaggaaaaaatgggacattagggaaaacagcctgccacgcactctcaaaaagtgacacaaagaaaccatagagaagttctgttttatctacaaagtatcttgtgcagctctctcaaacagcctttactgggatcctcttgttggcactgaaggcaaacatcaccacgttgagtcaaataattcccgtacctcttagattctgtttttgtagtggtgcttcagattgaggtccgcacgtgttccctctactacttcctaccccaacctacattatgaatgggaaacgtgatgaatgaaaatgctgaacgaaagagaactggtctgcagaacagtgcccagtacactgacggtgctgcaacctgaaggctgaatgaagctggatgtgggaagtggtggacaaaggaaccggcgcagaagcaggtgcgaagcatatctcttactccaggaagctcttgatgctcccatttgtaagaagaattacttagtcttaatcagcacaaaacacattcattaacacaaatgaaactgcaatgtgggtgaaatattttttcagacaatgtttttgccagttaagtgaagaaatgataccattctctcctttaaaaaattccagacttggccttcgtgcttcacagagcagtactgacagccttcttt

SEQ ID NO: 4479 - DNA, 1200 bp, mus musculus
cttatcaactgtggatataacaatctaattgaagtcaatatatactatgaaattaaggtgtctttatcatgcatattatactatacattaaaattctggttttaaaatttatttaaacttttttttacagtccagattttatttccatcccagtccatcctctgactgttccatataccatacctgccccctgccatctccacaaggatgtccccactccccacccctgacctcaccagacctcctcactccctggggtctccagacccttgagggttaagtgcatcttctctgactgaatccaaaccttagagtcctctgctgtatacctgtttgggacttcatattagctggtatatgctacctggttggtgactcagtgattgagagatctcggggtccaggttagttgagactgctggtcctcctacagggtcacccttctcctcagcttcttctatcatttcctaattcaattgcaggggtcagaagtttctttccattggttgggtgcaaatatctgcatctaactctttcagctgcttgtggaggacaatcgtgagcacaccataaactcagtaatagtgtcagaccttgggacctccccttgaactggatcccaatttgggtctgttgctagacctccttttcctcggaaccttctgcattattgttcctgcagttctttcaaacaagaacaattatggattagagcttttgactgtggaatggcgaccctatccctcatttgatgccccgtctttgtgctggaggtgggctctacaaggtccctcttcccattgtagggcatttcattttaggcccctcccttagagtcctgagagttccctacctcccaggtctctggtacattctgtaatctacccacctcctacctcctgaggttgcatgtttccattctttctgctggccctcagtgtttaagtcctattccctctgccctcatacacccaatacctgattatcttcccctcttcccctccctccttccaaccttcccacctcttgtgattgcttttttctctcttccaagtggaattgaggagtcctcacttgggctttttaacttgttaaacttttttgagttctgtggattctgtaccttttatctatctatctatctatctatctatctacctacctatctatctatttatttttttgctaatatccacgtgt

SEQ ID NO: 4480 - DNA, 1200 bp, mus musculus
atgtctgtcaccctcaatagacagaagaataaaaggaaacatttcctgcagaaaataataaatcaaaacattctagttaaggaaaatggtatacagtttgtggttagttgtattttgctatggaattttgagagttgaatttctagttttagggatatatctgattgttttggggaaaatatcagatatttaaaatgagagaataatattaggtgagagacatcacaagtgtcataattattaaaggaacacaactatagtaagacttcggtttgggaaggacattgaatgtattttgtggtcatcatcatggttttaagaggcatgaccatgaaagacatgacttctctagagtcttatttatatatccatgtatcttatatttttggttgtgagcctagcctttaatggctgagccatctccccatccgtatttctccatttctcaactgcaaatatttatgtgtaggaaatttttggcatcaattatattaatttattatttaacaatcagagaagaaatgctaagaagaaaacatctaagagcagcagatagatacatcatcgaatcaggtgctttaaaacacccaacggaaatgccaggagcaaccaaataagagcaagcaaaagtaaaattaccaaactgtgtgtttaaaatagtcaccagaaattgcctggtaaatcaactctgaaacagttggactggcagatctccaggaacagcggagtattctctccgcagacaagtctcctccagcatgttcctcctgaggcagttttgtacaatgggatcaaaatagtaacatggggctggagagatggcccagtgattaaatgcacttggggctttcaaagggtactagggtttggaccccagtactcacagggtaactcctgggatcgtatgctctcctctgacctcctgcactagacataaagagtgcacttataaagaggtggtggggaatagcaacctcttttgagaaatttcccctttttccttcaagctcacattgtttctaaggctctatttgctttttgattgattgattgattgattgattgattgtctattccttgttaaagagccagggagcaaccccacccccagaacagagtgttttcaaagacactggaattaaacatgtttttctctcagaatttacttaccagtatgcttaaagagcacaggacaatttg

SEQ ID NO: 4481 - DNA, 1200 bp, mus musculus
atcttaatatgccagtcattttagggttcatagtcaataatgctgggtaggtcaactaattacatttctcacttggcaatttgtttagaatcttctaatacaatgaaagctagtcctcggggaggaaggtttaaggtcagttctaggttaaatcctccaagtcctgtatacaaagtatattgtcttcagcaatgggatagtggctcagtctgtaaaagccctaagtgtccaggttagttgactctgttggctatcctgtggagctcctctggatattccctctgcagccctcaatccttcccccatctcttccataagactccctgagctctagacaatgttcagctgaggggctctgcatctgtttcagccagctgcaggatggaacctctcaaagaacagttatgctcctgtcttcaagcataacagtatcattaatagtgttagggataagtgcttacctttgggatgagtctaaagctgggccagttattactaagcccaacaaaatctcttctccatcttttctcctgcatttcttgtagacagaacaaattttgggatcaaagtttggcaggtgattgctgtctttacccttccactaggggtcctgcctgtctatgggaagtggccatttgaagttccatatcccccaactctcgggatctcatctagagtcacctctctaaactccctggaacctcccccatcccaagtctctggcatgtcctaacaatgcctcttgacaccccttaagtcctccaccccaccagctattgatttccattcatcctcctggccctctgaccctttgtctgttctcacacctgatcctaaacttccaattcccatcgtcatctcttctctcacccaagtgcatctttccatctgtctcctttgaacattttatttccccttctaagtgaaactcaaccatcctcacttgggcctttccttttccttagcttcttttggtctgggttgtagtgtgagtgtcctgtagtttatggctaatattcacttattagtgtgtagatactatacctgtattttgagtctttacaggagattttcagtttcatgatgtccatttatcaattattgatcttagtgtctgagtaactggcgttatgttcaggaagttgtatcctgtgcttatctgtacaaggctatcccccactctttcttctcttagatttt

SEQ ID NO: 4482 - DNA, 1000 bp, mus musculus
tgcaaaagaactaactgaatatatctttccttgcctgtagctataaatcttcaacccaattatgtcccagcaatgaaaacacaacacaattaatgtgaacacatgctgtgaacctagattgggcagatctactgctgaaagaacctagtggggaaacccccactcaattcttgattcggcgcacacccaagaatcatgaacagacgaccaacttgatgtaagaacacaaggtagtttaatggcggagctccgggcctacacgtatctcccacaggagacagaggtgttgaccacatggtggagccataatggtggagctccggttcgaaacgtatctcacacaggagacagtggtttcgaccccgacgcttggaagctaggggtttttatagaaaaggggtggggctgggggaggaattagcacggtttcacatgattggtccatgtaaacatcaacagatgtttcagtcaaaagataggagctgtataacatcacacccttaaaaaagtccatgccttaccatacttctacagtgatgttttaagatgaagtattgcaatacatcaagttttatttcctttcactgctacactaccatcttccacatctatgagaccccttagaacttgcagtttctccaggccacgtgcttctgctctgcttttcattgtcttcctcttcctctgagtcctcttcctcttccactttctccatctattctctccccacctccctctccaccttccctttatttgaccaatcatcagctctcctttattttacaaattaaggtaggaatcaggtttacaggaaatcacctgagtgctgactcattccttattcagagcccttcaaaggagaatagaattaacataaaaaataattagccccagggctatcatgagtcttgctaatcattactctcattaatatctattaattatcaaataaaccaaaaagaaattaaattagagatatcagtactatctctacagaagt

SEQ ID NO: 4483 - DNA, 1200 bp, mus musculus
ggagagatagggacagaaagaaggaaaaaaactacacaaatgaataagtagcaataaaaagaaaacctaaaataatatgagaagaattttcattttatttatttatttacattctagtcattgccctcctttctaggtccccctcatttttcctcccccttgcctccaagagactgctttcccccatcagtcctctccctctttgtgggacctcaagtctctcaaggattaagcccatcttctcccactgaggacagaccaggcagaccgctgctataaatgtgccaggggcctcagaccacctggcccatggatgctactagttggtggctcagtctctgggaactctctggggtctgggttagttgagactgctggtcttcctatggtgttgctctccccttcagttccttcaatcctttccctaattcaaccataggggttcccacattcagcctaattgttgggtataagtatttgcagcatctttcccaatcagctgctggtaggacctctcagaggaaaggaatgccaagctagatggatcccaagtatggccagtcattggaccacctttttttctgtctcttctccacttttatctctgcagtttttttaggcaagaacaattctgggtcagaaattttgactgtgggttggtaaccctgtccctccacttgaggccctatctatctactggaggtggactcttccagttctccctctctccaatgttgggcattttggctaaggtcatcttcaatgaatcctgagagtgtctcacctcctgggtgtctggtactctctatagggtggtcccacctcatttttaatagctgaatagtatttcattgtgtaaatgacccacatcttctctatccattctttggttgagagacatattggttgtttccagcttctggctattaccaaaaagcctgctgtgaacaagatggagctcatgtccttgtggcatgctgaggcaacttttgggtagatacccaggagtggtatagatgggtcttcaggtaaaactatttccaattttctgaggagccaccagatagattttcatagtggttgtaccagtttgcaatcccagcagcagtggaggagtgacccatgtgctgtcacttgggtttttgatcttcgtcactctgattagtgtgagatggaatctcagggtcattttgatttgca

SEQ ID NO: 4484 - DNA, 1000 bp, mus musculus
gcagttccaatagagtctttcaatgcaggtaacctgaaaccagaagcagcctctaaatgctcttatatcagccattagcagccaagtcaactatattgagaaaaattatatccagtaacttttagaatccccagctgttccttctaaaggtagttttaaagtttaatagcttgtcaatgtgatttttatcttctattggcatactgttttattataacaaatgaatctatgttataaatatttataacatttgcaaataaagagatccataacaacttaaacctaatatttatttatgaaattatttccatgtattttgttagcttatacaatatttatttactcggtagagaatgcagttttatttcccatgtcaagagcgatatggaaaagtaatatcacacgtctctgctgaagaaagtttctgtttaagtagaaaataataaactctagaagcagaatgattatgatagcgcacttactttgaacaatagaaatgctataaatatttacagcatccacatattttaatactctttcaacagtgtctttgagaagcctctatttacctcccacttggaagtctcataatattttctgctgcttgtcttctgcaatacctattagcacatttatttagtaaggacaacaaaatcagggatagaataaatcaacaactaaccccaggcatggcccgggggtgccttttttgatattacacagtggttgtcatgtacatagaacatccaacaaacgatcgaaagagtaagcaactctcagattgtggtgtcttgggaggaaggtcatggtgtgaatgtagcattctctccttacagcatctagatgcctggatggaactcagttcatcaagcttaaaaagtgtaatttcatgctgaggtctctcatcagcctttaacagagctttaagaaaataaagtttgaaactcaagaaaaatgaagactgaagtgtggacactatgcccctccttagaagtgggaa

SEQ ID NO: 4485 - DNA, 1000 bp, mus musculus
agaggaggcggttgccttggcaaccgtatctgatagcagaaaatatggccgacaggtacacagaaagatccagggagcaaagcctccaggctgctgctgctgtcagtgttatgcactcaggacgcattaacaaacgccaaggtttacactgacacctaatttatgaccggggaaaatttctgagtagcatttatctagttccaatcaatgcagtttataatttggtaccgtgaggcaatcgctgagcatgaaatctgacttccagcataaacaagcaaccaccacaaatgactgtcaaggtagacccgaaacatagaaaggtagctttgaggcaagatcgattcgcacgttcattgattcccacccacgtgtatgcttactcagattccccagtcacactccattctctgttcttttacagggatgcaacttttaaggcaagttatcaaactgggcagaggattcattactttgatttataaaaggatttgtcatttatgttcatatctactttttaaagagtaagtgttgctcaatgttgcctgagccctcagtcctgcccagcatcccccttgggggccagtgggtaagaaggtgcagaatctatgtctcagatgagaaaacagcaggaggctcgttcactaagtctcagggcgtgccctttataccctctaccctcttcccattggttccaagcaagggtgtcctccaggtagcaggtcctgattggctgtcactgtctacatcaccaatctcaggtaggcttcattttggtcctcatggggaagtttctttcctctgtggctatgctgccccacttgctgtttacctacattcacggggaagtgagcaccaccttggcagcagtgccttctgttcctcctacatctcaaccgtctatgtgtactcagaaccttgttctaatcctgaaccctacttcaacaatctaacacataacggcatatgttaataatggatccttgacgacaaagggtgagag

SEQ ID NO: 4486 - DNA, 1400 bp, mus musculus
gagacactgtctagcccacactggggagcaaagatgtatgtctgttattttctatcacacgttcaggttctaaagcagtttaagaaggctgagttctgaatgctacaggcttgaggctgtttgaaagccatacacaataggaaccagtaaagtgtagttgaggttaagtcagacctcatcagacatctagttagacattatgatcactacacacacacacacacacacacacacacacacacacattttgctacattcttttcccaatttaagaatgatttgtttctcaggtaggaaaaaaatcttaaagtgattttgacacgtcagttgtataattatacacacacacacatcatttttgcctcactttttgtaatgacctgcaccctggttgtctgtgtcctaaaggagtttgagccgataggagaggccgccatgcctatctgcatggtgaatttagtaaaaattgcacttaggtgaatatgttctaggctttggcctctgtctgcgacagtcattcactacttggacttcataaaataaaggattcttactttgtgctaatacaaaaccatgaccaaaaccaacacagagaagaatttatttgggcttaccgttccacagggagagtccataacaacagggcgggcatgaccacatatgaccagtgcaggaagctggtggatcctactgtatcagcacacaagaagcagagggggctggtcagaagtgggacaaggctatacactctcaaaactagatctcagggatggacttgcaccagcgaggttccatatcctaaaagtcacatcacctctccaggcagtacccaggtgagaaccaaatgtcaaacacgtgagcctgggcggggagggggtcatttctcattcaaaccactccaccaagacgtgggacacagacaaccggccaccttcctggtgagtgcacaggggtcctccagcccgagaggtttgtgcctcaggccccagcgggagcctccttggctccaggactcctcggagggcaggctgcacgggtgacagtgtggaatacagaggccagccatttctgggacaggcgagagctacagagcttctgaggcggcgccatcttcggctccagacaaccggccaccttcctggtcgaagcaacacagcttcggggaaagatcctgttttgggccttcatcttcagccaggaggaggtccaaacaccagataactgtgcaccttccctgaaagaggagagcttgcctgcagagacttctctgaccactgaaactcagagaagagagctagtctcccacatctgctgatagagggtaacaaaatcaacagaggaacaatctctaaacaaagacaactataacaactaactccagagattgccagatggcgaaa

SEQ ID NO: 4487 - DNA, 1200 bp, mus musculus
gttcacagacctcctgagggagcatggccatgatatgcagaacatgaaagaacatctgggtatagacaaacagggtttcctgagtaagatccccttcttgtccttgggcccagggacccactgactgcatcaacctgactgcatccaggacactggtcagactgttacagaggagtgtgaccacatggctccaactgtccaaaggaagccagttacaacagctctggctgcagagaaactggaacactctcaaagaaagaacagagagctgaagcaaaaggcttcaggttgagcaggggaacaaactgaatatactctagactgtaagggacatgaagaagctctttctccaatagcttcctggtcagctgctgaaggtactgccattcctgggggctacaccaaggcatgacttgtaccagggccaccagaaagcccttgctaaacagtctgacctcctcgggattgcccacatccatcagcagaagggaaagcatctggtcagagatactgctggagactgaacagcactccatccaggcgagaaggcccgtgccaggcccatacccttcgtggacctgtgaggtccactgggcctcagagagtttacagatctcaaaaagggtagctggcacctcacacttgaagtggccttcaaagaagttcttcagtctcaggcccacagtccaatctagctggtctaatttgcggtggagccaggacagggacttggcccaggtgtctggggagaaggtttctgtgttggctagcacgatctcacagaggagttccagaatgtgggtcacaagatccttgctgtccagcgtgaggtagcgcttctcccgggggagctgccagaacttgctgaagctgtccaggagctggcacaagctgaagagcagagggaatggggagcagctctgcagccaatactcttccaggcctgcattggcttcgagggtctggatgaagagcttcagactcaggcctacctcctccatgtccaacatcaagaaaggcaggacagactccttgagcacctcatctggctccagaagagcagccacaggatcggcctcctttcttataccatctatgactatctgtccagggtggtaccactgcctatagggtggtccctccaatatcaatcactgatcaagaaaatttactacaggcttacttccaggctaatctggt

SEQ ID NO: 4488 - DNA, 1200 bp, mus musculus
ctgtagctaatgctcgcatctatggttcaagatttctttcctagggtttctatctctagcgttgcctcactttgggttttctttattgtgtctacttccctttttaggtctagtatggttttgttcatttccatcacctgtttggatgtgttttcctgtttatctttaaggacttccacctctttggttgtattttcctgtttttctttaaggacttgtaactctttagcagtgttctcctgtgttcttctgtatttctttaagtgagttattaaagtccttcttgatgtcctctaccatcatcatgagatatgcttttaaatccgggtctagcttttcgggtgtgttggggcacccaggtctggctgaggtggaagtgctgggttctgataatggtgagtggtcttggtttctgttagtaagattcttacatttgcctttcaccacctcgtaatctctgaagttagttgttatagttgtctctggttagagattgttcctcttgtgattctgttagcctctatcagcagacctggaagactagatctctcctgaatttcagtggttagagcactctctgcagacaatctctcctcttgcagggaaggtggaagatatctggcattcggaactgcctcctggcagaagatgaaggcccgaaacagggcttgtcccggaatctgtgtagcttctgtagtccacactctcacctgtgcagagtagtcttggcgttatccgggaaccaagatgtctcccccagatgctgtggcaaagccttcccgggcgggccagacacctctcctctggcaggaaggtgcctggatgtctggagcccaaaacaggatctgccccagaagctctgtggcttttgcctgtcccagaagctgttagtctctgcagtccacactctgacctgtgcagaccagtcttggcagctacaaactctttataagcatctttactgaagaaagtcactaaaatacttaagtattgaaatttcaatcctcatctatttgtcatgtacacttgattatagaaaactttaatttatttaattagtaaataacaatttgagctgatcattctatcccctaaatcaatgtcttttttttaacatgggtttttttttaattaggtattttcttcatttacgtttccaatgctatcccaaaagtcccccataccctgccccccactccc

SEQ ID NO: 4489 - DNA, 1600 bp, mus musculus
caacaacaacaacaacaaaccaagataggtacacctttagcaaaactaaccaaaaggcacagagacagtatacaaattaacaaaatcagaaaggaaaagggaggcaaaacaacagaaactgaagaaattcaaacagttattaggcctgacttcacaatcctatacttcacaaaactggaaaatctaagtgaaatggatgaatttctagacatataccacaaaccaaagttaaatcaagatcaggctaagtatctaaacagtcccataacacccaaggaaatagaagcagtcattaaaagtttccaaacaaaaacaaaaacaaaaacaaaacaaaacaaaacaaaacaaaaacccttccggttggcaccagcactgggtcaccttgggtgcagaatcagtggacacccccacaattcccagaggactctccatccgatcttaggatcactggtgagtgaaacacaacttctgttccaatccaatctcatgggacctgagacagcattagggaagcagaaaaccggcctgaccaggggcacaagtcccttccagtcaggaacagcaccaggtcacctagggcggacacccccatggtccctagagcactctccatgcgatcttaggatcactggtgagcagaacacaacatcagttccaatccaattgtgatgggcccatgacagcagaaacaaggacaccagagcccttcctgaccagaggctcaggttacttttgatcagttctggtttaccttggtttcaaacagaccagacagctccaaggtccacaaaggagataccacttccaggcactgtaacatgctcaggatcttaggacacaggatcctgggaaaacaggagctaggtcacaccagtatttcagggtctcagagcaagcttgactgccaaaaactctgacacacccagaatctcaggttcacaggaacccacaatcagaggatcacagagaaagctggactctgaggagtcctgaatcaactgggattataggaaggtcaagctccaatctgatatattgagggcagcaagcacttgagataatcagatggcaggaggcaagcataagtacagaagcaatagaaaccaaggttacttgtcatcatcagaaccaaactattccaccatagcaagtcctggatacaccatcacaccagaaaagcaagatgtggatctaaagacacttctcatgatgatgatggaggactttaagaaggaaatacagtttcctgggcatatacccagaagatgttccaactggtaataaggacacatgctccactatgttcacagaagcctcatttataatagccagaagctagaaagaacccagatgtccctcaacagagaaatggatacagaaaatgtggtatatttacacaatcgagtactactcagctattaaaaacaataaatttatgaaattcttgggcaaatggatgtatctggaggatatcatcctgagtgaggtaacccaatcacaaaataagtcacttgatatgcactcactgataagtggatattagcccagaaacctagaatacccaagatacaacatcgaaaacacaagaaaattaagaagg

SEQ ID NO: 4490 - DNA, 1000 bp, mus musculus
gaaataaaaacatttatttaagtgagtgaaagcaaaggggcacacacctaacctgcaccactcgggctggatgggtatcttctatgaattgtctggcgagcacaagtcccagggtttcatccccaacatctatataaaagcttgtcatgagtacaaatgcttgtaactccagcattggaggacagagacagaaagattttgagagctcactgatcagaaaacctattcaaactggtgagcttcaggtgtgtgatagacactgggtcgaaagaagatgacataaagtgttagagcaggatatctcatgttctcctctggattcgttgtgtacacatatacctgtacatatgcacaaactactctctctctctctctctccctctctctctctctctctcatatgcacacacataaacaaatttaaaaaattaagagaaagttatctatagtcttttattttcaaaacctacttttaataaaggttcttaaatggtttaaccttccttctagtctaccacccagcagaggtagtggtaaggaaaggttaatagagaaaagaagggtgtggacctgtttagaaatagttctttgtagcaaatccaatctacactgtcaggatatgagcagttcagttcacatgtgtccagaggtagattaatccactcgaaaaaaaaaacaccattcagcaatcagcaacagtagttcaatgtagaagaaaccttgtggctcttccaattggcctgtagaaacagcaagagggctctggaacaccaccagacagtctttggtgacatttttctctatgaagtcacaacaatggtgaccagcaaagagtggcaagacaaaccaataccacaaagtgttgtcagagaagggcaacttcagcaaagcccaatgatgaccagcaaaaaatagcaaggtgaaccaatgccatacagtgtcatccactgtctgttgtattgcatttatgctctttccagacatcacgtgttctctcaag

SEQ ID NO: 4491 - DNA, 1400 bp, mus musculus
tcaaagtagctagtaattttggtttttccagttactgccaatgaacttatatttcaatggattcattttaatgctaaatatttaactaattctagtaaagcattttgtcataaaggcagatctaaaaattttagttaatgaaacccttgattttattcgaagagtcaatgtgatgtagccttttcactggtgtttataggtagagataaaggagagatggaatatttcaagatggaacatagactttacctgatcaagttttggatggaacctcatcctagtaagttcacctatatcatctgaaacagcagtcacagaacataatctatacaatggtgcgactgagaactcacacatttgtatgattttaaacaatgactatgactatatggatctcccaggtctctaaaatgtcatgggttataatatctgctcatagtctgttacactactagaagagagagaacagccataatggaaggaagatagttcattatgggcatgcactgcctgaccaatacagaggtagatgctcacagccaataacaggactgatcacaggaaccccaatggagtagttaggggaaggactgaaggagctgaacgggattgcaaccccataggaagaacaacaatatcaactaaagggacgtcctcagattcctagggacaaaaccaccaaccaaagagtacacatggagggacccatggctctagttgcatatgtagctgagaacagccttatttggcaaccatgggaggagaaacccttggtcctgtgaaggcttgatgccccagtgtaggggaatgatagggtggtgaggcaggaatgggtaggtgggtaggtaagcaggggttgggggatgggataggaaagagtgtttgaggaggggaaaccgggaagggggccaacacttggaatgtaaatacattacataaccaagaaaaatattttgaaatgaaaatatctgaacctttgcaattcccttgctttcaggccactctaaaggtactaaatgtctgtgatgctccaccctgtgatagactgcaaagactaatgccaaataagaatgactgaaccatataagaacataagccaaaatgaaccttttatattcataagttaacttaagctttttttttaatgctattttgttgttgttgttgttgtttttaaagtgatgggaaagagaaagtgtgtaccatgctgttttgtaaatataatgttaattttgctgaatttcactcttcttgtgatatttttgtcattaatatttaaacttcttttatgttgctataaaaacaaattgtagctattacatttgtatcaaaggaagttttaattactaatagattttttaaattcaaacccaaatatgcttgataccaaataatgctca

SEQ ID NO: 4492 - DNA, 1200 bp, mus musculus
tacatgtaaaataaatagtttttaatatgaatgacaataaggctcttgctcagtcaaaaaacaaaggaagaaatgttctgtgtgatctggatggggatcatcctggaaactcatgtcccttaaacagtttctttatttgatatatggaatctaaataacgatgcaatacacaactctaaatgaggaaataatagtaacagtatctcaacctctcccataaatgaatgtgcagatttatttttaaaaattattttatttatttataccccaaatgttgtgcctgcccccagaccccattcccagagttcatcaccctatcccacctcccctatgcctctgagagggtgctccccccaggccatacccctttcctggaacatcaagtctctataggattagacacatcctctcccactgaggccagacaaggcagtcctgtgttacacatgtgcagagggccttggaccagcccatgaatgctctttggttggtggcttagattctggaagctcccaggagtctgcattaactgacacatttggccatcctatggggttgccatccccttcagctccttcaatccttcctccaactcttccatatgggtccctgacctcagtccaacacctgactgtgtgtatctgcatctggctcagtcagctgttgctagagcctctcagaggacagctatgctaggctcctgtttgcaagcacaacagcacctgtaatagtgtcagggtttggtacctgctcatgggatggatcccaaggtgtgccagtcactggatagtctttccttcagtctctgctcttttaaaattatgtttttacaggcaagtcttaaaattcatattttgaaattttagtcaacatcagcattacagatcatgtttttaaaggtagctacacacttaggcaataaatgggaacttagcccttttttacccggtcaccatgggtccaacaatggctttgtggccatttcgttttttattatattccatagtagaattaatcatgtcacctctaagatttctagtgaaagttacaagattggcaaatgtcaggggaatttcagggaaaaaacaaagtagtctcttaactcatataaattatacttgaggaatattgtgctctgtctaaagtaagaattttactgttgtatttaagaagataaaattgatggaattgtgaagccat

SEQ ID NO: 4493 - DNA, 1000 bp, mus musculus
cccatgctatactccacagacttaaagaaaggaaggcccaaggaaaggatgcttgaattccacttagaacaggaacaaaatagtcatgtgaggcagaggaaggagaaggaatggggagcagaatatgagggcacgatcaggtgtgggaagagacaagagagaggcccagaaagccaggagaataaatggaaatagttgctgagtgttgagaggtggggtgggtaatccataggcagttcctgagacctgactcggggagacccctggagttcatgtgggcaaatttagcagggatacctaacagtggggacatggaacctggacaggttacctcctgtggccaggcagggtccccagtggaggaataaggctaacaatgtacccataaaactttggatccaaaatttgtcctgtctaaaagaaaggcagggacaaagatggagcaaagactgaagaaattgccaaccaataactgccccaacttgagaccaattccatgcacaagcacccactctagacactattcatggtactccattgtgcttacagacaggaccctagcataactgtcctctgagaggctctacccagcaactaactgaaacagatgcagatactctcagccaaacattggatgactggaggacccttttggaagagctgggggaaggactgaaggccttaaaggggatgggaactccataggaagaccaacagtgtcaactaacctggacctctgggagctctcagagactgagccaccaataaatgagcatacaatggctagacatagaccccaggcacataggtagcagagggctgccttgtcctgtctcaatgagagaggatgcacctaatcctgcaaagatttgatgtgccagagtgggggaatatcccaggggttcctaccctctcagaagtgatgggaatgggggatttgggaaggactctctgatgggggctgggaacgggtacaatgtttgggatgtgattaattaaa

SEQ ID NO: 4494 - DNA, 1800 bp, mus musculus
acaaccttagccatcaatgagatgcaaattaaaaacactgaggttttattgcacctcactcagaatgcttagatcccaaaccaaatgaccacagatgtttgcacaaatctctgtaaaagtgaacaatggttcactgcctgtaggaatgcaaactagtgaagccattgtggatcccaactagatcttgatctatcacatacctagttagaccactctcaggtgtataaacaagggacttctgtagatatagtgttcattcatgttcattgctgctcaattcacaatagataagaagtgaaaatagcctaaaactctgtaactgatgaatgattaagaaaattgtcatacatttacacaatggaatattgatctgctgttaagaagaactatgaagttcacaggtaaatagatgaacatggaaacaaccatgttgagtgaggtaaattaaacccataaaaataagcatcacatattttttttttctcattggttgttattagcttcgaatcttcaaatacctgtgttttctttggaataccaataaatatcagagttatgggatgctggagaagaaaagcactcgtcaatctcaagcagctgcgaaacctgcaaactgcagtaacagccagcctaacaaaacatcgacattgcccactggtgcaatagtggcatgcgtggcgtggagtaaccaaccactttttttttttttttttttttttttttctggttcaaagacatattttattgtgacataatcataaatattcatgtaaccatggtggtacaaataataacaataagtgtctttctttgtgtggaaagaagagtcttctaactatggatgctggaagctctaagaaaaacattagtaagtcaactacgtgctcatctggcacagtcttgggtcccctctgggcacctggaggaaagtccttcggttctcgtgccttctgctccccgagtgtgtgctagtttgacagacactaaattacagggcacaaagcaactcctccttccctttttaaataatcattttacttaacattgcgacccattcccagactgtatttgtttgtttttttttttttttttttttccattttttattaggtatttcgctcatttacatttgcaatgctataccaaaagtcccccatagccacccaccccctctcccctacccacccactccccttttatggccctggcgttcccctgtactggggcatataaagtttgcgtgtccaatgggcctctctttccagtgatggccgactaggccatcttttgatgcatatgcagctagagtcaagagctccggggtactggttagttcataatgttgttccacctatagggttgcagatccctttagcttctttggtactttctctagctccttcattgggggccatgtgatccatccaatagccgactgtgagcatccacttctatgtttgctaggcccaggcatactctgacaagagacagctatatcagggtcctttcagcataatcttgctagtgtatgcaatggtgtcagcatttggaagctgattatgggatggatccccggatatggtagtgtctacatggtccatccttttatctcaactccaaactttgtctctgtaactccttccaagggtgttttgctcccacttctaaggaggggcatagtgttcacacttcagtcttcatttttcttgagtttcatgtgtttaggaaattgtatcttatatcttgggtatcttaggttttgggctaatatccacttatcagtgagtacatattgtgtga

SEQ ID NO: 4495 - DNA, 1200 bp, mus musculus
actttatgtgactagggaaggctttctgcaggcacagaggtgggctctctgtctcgcctggctgtgcttggataacaccagggatcccacagcttatgcttcccagtgcactaggacaggagagcacaaggatgctggtcatccggcagccgatgggcttgctgaggcgtcctcatttgcgtggaactgccgatgtttcgttttgtctccagcagtaaccttagttcagtggtgtgcatgccatacaaggaaatctcaaacgcctgcagtgaggaatgacaaatcacacggaatcacctgtgagagtggttgtatgtacacgggtgtcaaagcaaaatgcaggcaaccattacatcgtggtctccagctcagagtttctgctctgaacatgtacttaaccctcagtattgacccagacatttacttgctagggctgccatagggagcaggcactaactgggtgggttaaaaatagatattttctgtttgtgagtgtgaccttatatatgtaaaatggaatttttgaagatagaaacaagagtcttgagatgagaccattgtgaagaactcacatgggcgctaagtccaaaaatgagaggcctcctgagacatagaggaaggaagcaaagtacttagaggagaaggccgtgcaaagacactgatgcaatgcagcctccctctggaaaagctgccagactctagctagagttgaagaaatgttcttctgtggatgtcaggggcatacagctctccctctatcttggtttctgactcaaagctcccagaagggtgaaatctgtgtctgactttgaaacactaacctgctcaagtcatttgatgaaacagtcacaggaaaccaatgcagaaggaatggaagagccccgtgcacagtgtccctgtgtctcaggatctgctcatctgccaactggagcactaccttggagtccctcagtcctctccacctctgcgttagatagtttatctgaacacagctgtttgctgctgatcctgcgaacagcttcccaggtgatagtttcccttcaggcttcattcagtattctgaactcacccacttggtatttaggaaaatacttacctcagcttgaccttagcaacttgccagtcaacagttgtttcctaaacttgacttaactaatagaattgtgtcaggccaatcaaatatcattgaaccttctgact

SEQ ID NO: 4496 - DNA, 1200 bp, mus musculus
attacactgaaatcagttaggttcagcaccccttcttaacctacagacgtcagccaatggtttccaggtttttgcctcattgttgcagaagtcatttctgatggctccctgggagggtctcacacagggcttgatttatttggttctacttgaagtaaggcctgatgaccaggatgttcctagagtcaaaggaagcaagggttagtctagcacagtggttatcaactagtggggtgtggtcctttgggcgatcaaacaactggttcaaaggggttgcatgtcagatattccgcttatcagatatttacatttatgatcaacagtagcaacactacagttatgaagtaacaatgaactacgtttatgtttgggggtctccacaacatgagaaagtatattaaagggtcccagcattaggaaggttctagcataacagcatggtcaaacagaactcaggcaggacgcagcctctccccatgagctcctcggtggtgtggatgtcttatggatgtgttgccaggctttcctttttcagattttcacagctttgaccaaaccctccgaccacagtgactgaatgcttccaaggcattccttgccttccttgttatgtgagtcttcaccccgagccgtccatcttcactgtgttttgctgcaataccaaagtagtcaaatcccaggcttatttacaaatggcattcttcagcatcatgtgtccttccagagaagcccatgccttgagaatgctgtggtcattgccaagcaggacaactgagggtcaaaacaacaacccgcagagcataaaggttctgcttgggtgcagcccgtcacacctgctggcacaagcgaatcacaaggtgaagtctgaacgagggaggaggtaaaggagtgtagcagtcttacaggacgagagaccagaattcccagtgataacagatatgacactactctgtcttggacaaactattaatttccctgtaggcaacaactgtcactatcttgatttaaaacaccctcaaatccctgcagactatgctatcctgtagttttctgaacgcagtctatacccagtcaccttgacatagacctgcaaacaccacaccagcagcaacaacccaagttaactttggaggaaagtggcacagtgaatgtccccatgtgacaaagctaatgatgttaggaggcacgctctagccccgc

SEQ ID NO: 4497 - DNA, 1000 bp, mus musculus
tgtttgtttgtttttgttttgtttgtttgtttttgttgttgttttcttggatattttatttatttacatttcaaatgctatctgctttccagtttcctatctggaaccctcctatcccataccaccttcccctgcttctgtggggcacttccacctcactgtcctggcattcccctacactggggaattgagctgtcacaggaccaagagcctctcctcctatagatgccaaacaatgccatcctctgctacatatgcagctggagccattggtctttctgtcccatccaccacgaccagcaggaaagacgcaacaccacgttctccttctttaagcaggtttattcaggaacacttcacattgcaatgaaggaacaggaatctcctgaacaaccccagggcacaccttaaataccctactgactcctcccaatcaccccagtcacataacggcagtccattggttcacagcaaatgaggacacctcaggcaagctgacgaggtatggtgtctgtgcagtgcaggcagctgggatgtggctaagtcagtggtaatgaggaagtcaggcgcaggtcataagacctggcagccatactgggcgccattttggagcggcggccgcacccgctcatcacatctcccccttatttatcattttggcagagagaatacctgtcttaggttgccccctgcgataatgctccttacccgtcattgggaggacagacagcaatggtctgatcactgttttaggttggtaacacctccagggagtcttacccgtcattgactacttctctagcatgccaagccacacttgagaagattgtcccagctctagggctgcaaaagcctgaatcaacagtacctgcgcaagggtatgccttttttgcaccacagggccattactcctgtggcaacacagatgattgccagccctcctatgccagcccattccttgaggtgcgatattgctgtgatgatgtgaacaatggactgt

SEQ ID NO: 4498 - DNA, 1000 bp, mus musculus
tattatcttcatgagataggatttttaggtcagcttggtgattttcagttgtgttgttgtattcagggcttgctgtggtgggagaactgggttctgatgatgcctgcatatattggcttctgttgcttatggtcttgtggttgcctttcgccatctggatatccttggtgtttgttggtctgggtgattgtctggaatctgcctcttttatccctgggttacttcaggtctcctggttggcctgtagccttggctgtagcagaccacctgtttgaccttccaactgggagctcttcacagggacagagaagctgctgatctgttgccctgctgcagtagatctcctgtgaggccttcagactgttgggtcttcagtgaagcagtcaagctgttgtccaactgctctgagtgcagtgggtcctctagggtgggtcaggatatggtgtcttcacggaagcagaccagctaggagtctgtcctagcagaaaggactgggcagaaggggcagaagggatggaaaggaagtggtattcaggagagtgggggctttggtgggtgatgggtcccaagtccactgggctctgagccacagttctgggactctgagggaggaagtcttaccaactgctctcagtgcaatggatcctgagcagaccagctaagagtctggcccagtagagggaaccaggtagaatcccttatttgtcttttgatcaggcaaattcacttcaatctagagtctgaggacataccaatagagggggcacatttatgtgttctgcttaccttaattctatccttctccactttcaagccatactggcctggctggggttacactgtaccagcctcattccttagactgccttgcaatcagtttccttctgctgagcactttcccttattcctcttgtacctactagaggtatgctaatgtatgcttcacagagaacacacatttcagagcactaggctctgcattctccttcctactgtcttg

SEQ ID NO: 4499 - DNA, 1000 bp, mus musculus
aagcaaagtaaagtatgcagtagagcacagccaggcctgttctgtgcgaaccagtcaaatcccattccacttaaatattatgcaatctctcaagctttctcttttgctaaaaaatacacttaaaatgagaaaaggtgaaaggagtgtgtttctttctggggttacaaacccatttctgattacaaagaaagctgcaaggggagttttgtttgtctgagctcaattctatagatgacagacgctaagattttaacatcaaaatatctaatcaccaaattttcttcattaacagtctcagcctgggataatctttcctttagcagaaacatgggcaactgggaagaagttctgtgagacaaaaaggtgaaagccagggagacttgtgtttaacagggcgccgccgtgcatggttctgtctctgttcactgcattactgagagtgagctttactgtagtaagtgtcctccaaggaacctcccttccagggcagttccaaggactcagatttcagggttttaaaaggcaacgtggcttgggggaaccaaaggcttaaattcaggtattagctcattgttaggagtttgttatttcttagccctagtttcctcattagacaatgaagagattaaaactagtttttccaagaagttgctgggagacttagccagctgggccatcaagagcaccgagacattgctagagctgaacagacatcatgtgttcttataactggcagtgcctgctcgactgtgttagatttctgatgctgctgtaatgaaacaccacaagcccaatggttttaacaacacaaagttgttcttttacagttgtagagggcaaaagtcaaaaagaggtgtgtcttctggaatgcccagggaaatttcatgtccttgccttcattttccttgccagcacagtaattattatgcacagtattattatacatggctatattccttatttttatgcaactagcagcacaaccttatattttcattgt

SEQ ID NO: 4500 - DNA, 1000 bp, mus musculus
taggacaggcgggagccacagatcctctaaggcagtgtccttttcgggccccagacatccagtcaccctcccggctagaggacaggtgtctgccctgtccaggaaccctttgcctcaagagcggcaggtgccatcttggttccgggactccgccaaacttaggaacttagtctgcacaggcgagagtgcacaccacagaagctgacagcttctgggacaggcaggagccacagctcctctgaggcagtgcccttttcaggctccagacatccggccatcctcccagccagaggacaggtgtccgcctggctcgggagccctttgcctcaggaggggtgggagccatcttggttctgggactccaccgaacataggaacttagtctgcacaggtaagagtgtgcaccacagaagctgacagcttctgtgacctgacaaagcaacacagcttctgggaaaggtcctgttttgggccttcatcttcggccaggaggaggtccaaacaccagatatctttgcaccttccctgtaagaggagagcttgccagcagagagtgctctgaccactgaaactcagaggaaaagagcctgtctcccaggtctgctgatagctggtaacagaatcaccagaagaacaatatctaaacagagacaactataacaactaactccagagattagcaaatggcgaaaggtaaatgtaagaatcttactaacagaaatcaagaccactcaccatcatcagaacccagcactcccaattcccctagtccagggcaccccaacacacctgaaaagctagacccggatttaaaagcatatctcatgatgatggtagaggacatcaagaaggactttaataacgcacttaaagaaatacaggagaacactgctaaagagttacaagtccttaaagaaaaacaggaaaacacatccaaacaggtgatggaaatgaacaaaaccatactaggcctaacaagggaagtagacacaataaagaa

SEQ ID NO: 4501 - DNA, 1200 bp, mus musculus
tgataaccgccagttgtgccagcaccatttgttgaaaatgctgtcttttctttaaggggtttttatgttttctctttaagggcttctacccgtttgcttgtgttttcctgtatttctttaagggagttatttatgtccttcttaaagtcttctatcatcatcatgagaagtgaagaagtgattttagattggattcttgctttttcagtgtgatggtgtatccagaacttgctatggggggagatttggattctgatgatgccaagtaaccttggtttctgttgcttatgttcttacgcttgcctctgccatctggttatttctagtgctacctgccctcaatatatctgactggagcctgtccttcctgtaatcccagttgtgtcagaactcctcagagttaagctgtctttgtgatcctgagatcctgggtgtatcagagttcctaggagtcaagctgcctctgggaccctgagatctatccgggtgtgaccaagtccctgggatcctgtattcctgtgttctgtgatcctgtgatcctgtgatcctgtgcgtgtcatctttgatgacacctgggagtggagattcctctgggtgatgtgggactagctgcatagtttgtgcccaaggtctgctcagggcaccggcccagaccagaacgaactcgtgtcactggtcaggcagagttcctatgtgcctaggttccgctgatcccatttacttccaatgttgggaaagatgttgtgtcctcctcctctttgatcctatgatcctgggcgtgttagagcgcctaggagtggagcttcctatggctgttatgggactggcttcaggagttcgcacccaaggtctgctcagggaagagcccagaccgcaaggcggctttttaaaattcaaaattcattactcataaagtgattaaggggatgatccatctaaagtgcttgatgctctttcagagggccagggttctgtttccagcacccacattagacagctgtaactacagctctgtgaggtccagtgccttctttcagcatccataggcatgcatgcacacaaataaagaagtgagagtaggtgggttggtaagttgggggagagaggaagagataggagttttcagaggagaaaccaggaaagggagataacatttgaaatgtaaataaagaaaataagctgggcatctttaatcccagc

SEQ ID NO: 4502 - DNA, 1000 bp, mus musculus
gttaacgagctcattctacttcagcccacttgaatagttccttaaaccctaagataattaagtgctgaaatacccataaactgttattttttggttgataaagataagttcttatttagtttcacagaatagtgaaaaacatccttcctaccaacttttcaaattaccatgccatagcttccctgtctctggttgagacaaggtctctcactccatagcccaggttagcctggacgtcagtaaatagcccaggctggtctcaaacgtgagtagtcctcccataaccttccaattgctctgattgcaagcatgagctgccacggtgatcttttctccttttgagacttcctgtccagatgagaagtgaagagaacagtatactgagcctctgtcccatggagcagatggtagtgataggtttttggtaatcttccttgctctctactatgttcccttcaaccaccttcaaaatcccactgttgggctggagagatggctcaggggttaagagcactgactgctcttccagaggtcctgagttcaaatcccgggaaccacatggtggctcaaaaccatctgtaatgggatcggatgcactcttctggtttgtctgaagaccagatagatgaaataaataaatcttaaaaaaaaaaaaaatcccactgtcactgggtgtgcacctttagtcaaagcccttgggaggcagaggccagctgatctctgtgagttcaaggccagcctggtctagagaacaagttccaggacagtcaggactgttacatagagaaaccctgttctcaaaaacaaagcaaagcaaaacaaagcaaaataaatgaacaagccaacaaaacccacaacaaaatgtaaacaagaatcccactgtcaaattattccctctgcttctcacttgaatcattaacactaagaacattttattatataaacttaaaacctatcaacagctaaattagcaatattaaatattgccaagttctcagtc

SEQ ID NO: 4503 - DNA, 1400 bp, mus musculus
aatattatagtattcttaagctatgtctttcatgggaagaagacctaaagatctgcttgaatttatccacccatttggcagtgaatcagtgaagtctaatttttaaaaatgtcttctcatagtatttttctttggtttctagaaaacgaagtccatcagtgtccagggatcaaaatcgaagatacgagcaaagtgaagaaagagaggactactcacagtatgttccttcagatggtacaatgccaagatctccttcggattatgctgatagacgatctcagcgtgagcctcaattttatgaagaacctggtcatttaaattacagggattctaacaggagaggccatagacattccaaagagtatattgtggatgatgaagatgtggagagcagagatgaatatgaaagacaaaggagagaggaggaataccaggcacgctacagaagtgatccaaatctggcccggtatcccgtaaagccacaaccctacgaagaacaaatgcgcatccacgctgaggtgtccagggcacgacatgagagaaggcacagtgatgtttctttggcaaacgctgaactagaagattccaggatttctctgctaaggatggatagaccatcaaggcaaagatctgtatctgaacgtagagctgcaatggaaaaccaacgatcgtattcaatggaaagaactcgagaggctcagggacaaagttcttatccacaaaggacctcaaatcatagtcctcccacccctcggcggagccctataccgcttgatagaccagacatgaggcgcgctgactccctacggaaacagcaccacttagatcccagctctgctgtgaggaaaacgaagcgagaaaaaatggaaaccatgttaaggaatgattctttgagttcagaccagtccgagtcagtgaggccgcccccaccaaggcctcataaatccaagaaaggaggtaaaatgcgccaggtttcactgagcagctcggaggaggagctggcatccacacctgagtatacaagctgtgatgatgtggagctggaaagcgagagtgtgagtgagaaaggtaagcgctcctgccgcaccgcccatggctgaccctgcctgccagggcttgctttccctcataaatggctcagcgaacacttaatagctgcttccgcttgtagttcaagaattctaaaagtgttggccatggtagaaaaattctatattgcaagacatttttatatccttgtataaaaacaaacaatgctttaaagattgcttttttgcttttttactgagggtttctacatccttagatgtcatagcatagttacacatacttaatagttctagttttgaaaataacaattttacatttctctgaaaaactaggaatgcgtttgaaataga

SEQ ID NO: 4504 - DNA, 1400 bp, mus musculus
gttagaaataaatacagaaacctttcactcttatgtttttctatctcctcttaaatatttttgtagttgtgttgaaaataaaaaaataaatattgtatatcttgaactttcaatatctaaactgatttagaaaacaaaatttgattgtatttatccatatttttacttaccatgtttcctattcctttctaatattaaggcttcttgtcttttcatttctctgtgtccttagctagtcttcctttagccattcttttagagttcgcctgctggttcacacctacttagcctccttttctttgagaatgttgttcactcttgagagataatttcatcgtatttataacctaggctaacttctttattattaattttattttcttacagtccagttgttacccgcctcctggtccaccctcccacagttcctcatcccattcttcctccccctgtctccaagaggtagtcctcaccctcaactacccagtaccccctccagacctccccactccctggggactctccagggttaggctcttctctcactgaggccagacctggcagtcctctgctatatgtatcggggcactcatatcagctgctgtatgctgcctggttggtggctcagtgtctgggagatctcaggggtccaggttagttgagatgctgatcttcctatggtcttcctcagctttttccaggctttttacaattcaaccacaggggtccccggcttctacccactggtttgacagtaaaaaacttctgttgtgtggctccctgtatcctcccaagttctgatgcaacatttgctgtcattcagtgtaattcttttctatttcctgtactttttggtgtgttataatatttagttttcatcttttagttttgttaagatatatatttgttgggttgtgcattcttctagtttaaacgtatgtaacatcttgactgtagacttccatctttttagcataagactttttctgctctaaccttctaggactttttcagcagggtcattcaagagttaatattaaatcgtgactactactgtctccatactgctaattgtgataagttaaacatctttctatgcttgatgatattttatttaattttcaaaatgacattagcttttactatgttaatcaatgcttttcagtgtcaggcacgttgtactctctcacccccttttttcatcaatagggtgtttttctttgttttcaaatagtttaaagtgctaactactaaatttagagagtacaggccttacttctggtaatcatgtagtttgaaatcagggaagagagaggctgtgaactgaatggattctcttaccttcatggtttttgatgtataggcttaactatttacgttctttagccaagaaacatata

SEQ ID NO: 4505 - DNA, 1000 bp, mus musculus
atttctttagtgacaagcgtaatgatcattattattggctacttatacgctgtgcagcagagctagtatttgtcacacctaagcttgcggagacattcagatgtaacatgggaatacacaaggagcacaggtcacgcaacaaaaatgtcgttgctttgatggaggtttgaggtgccttactcatgtttgccgattgcgtgtttgcttttggcaaaatggaggcagttcagaaaaggaggaagatatgggtgagcctctactgtgtatcagatgctctgagatacggccataccagatgctacattgggtttttatattctattaacatcagataggcacttctgggtaacaatcacaaatacctgattatccagactccagtttactctttatcctgcatagctgatcgtgaaatattgtacacaagagggcttggaagggcaagccactggaaacgataaaaccacatcccgagcgtatgcgttctggaggattacctgaaattcaaggtgactctgggtgactcttgtgtgacaaaacattttctgggacggcgctcacacatctactcacccaagacagggaacccaaacagagcaaactactgatcccaccgaagtccgacttgatgaaccaataaggtttactggggttgcttagcagagcatgggtgaaggattgtgtacaggaaggagcagaaaggactcaaagaaagctacatcacaatagtctaccccaggatggttgagagctcacagagttgggaacctagagcacactgcacagcctgcacgcggctcatgaggttggactttgccctttccaggttcctcagttgttctaaaatgttttcaagcaccatggctggttccagctttctctaggcaggcagcctggtcttagccgcccgcagcagctcattttctttgagactcttcttctttgcagctcagttcaagaaggactctcagcttctattgtttactctgacaggtagagg

SEQ ID NO: 4506 - DNA, 1000 bp, mus musculus
aatgggtacaagtctctgtccatttgactctgattgacacgatttcagaagcaatgtgtaggagcccccttttatattctctgtggccaacaaaacatgggcaatgtaaaaaaaaggcattgctctagtgactcagtacttgcaaggcctagacagtatccaggcagttacatccattcttctttcccaagaggcactgggacgggtgctgatgcaggggcatgggagctgcaggggaatactaaacaggagctaatactggtatcttcaagccatgagggaatcatcaaggaaaagtaggttttagcaggatagacacctggcctttctctcctgcactctgtcttctaatgtggtgttgtttccactggctgctcacaaccagaaatcagaagtgagtggccagatggcccaaagtacaggaggaaagaaaggaaagtttgttgagtccagcaagaaaggtcacatggaaaagatccagcttgtggaaacttctaagtttctctatcctaaccaacaggattctcgttataccagcctgctcacatatgtggcattagttcaatatttattcacatgaagacaatcatactggaaattgaataaaagggatggccagggtctgatctatccaagcagatagtgtgagcctcctgctttctaaactgtatcttttttttttttttttttgtctatattggcgtaacttggagatggcttgaacgggagggaacagaccagcagccaggctggcagactgagaggcaggttggttcaaggctatcagtatgtgtagggcatcaagcctacttgtatatgtagactggaaatcatccttctctgatctccagaggataattggttggtgtgtttattatggtcttgcatgccacctggaagtgaggcacagaagattgggacactgcttttgtaattgagcttctgaacacttctcttgtcaccttgaccttgtctcacaccttcatgcttcatgtgtgga

SEQ ID NO: 4507 - DNA, 1200 bp, mus musculus
ctaaaattctttagtaaaatacctctcagagtgggcgtctttactgctcagttgctaactgaaagaacttcaggttaagttaacatttgcttcaaccagattaaaagctttcagatagattccttatgccatttactcatctatctaaccccctctgcttctgctctgttgccatctgccaggtcatacttctgctcctaaaaggaaactcaccctgaccttgccttccaggcaaagctcacttcatttcagttggtgcctaagtatgtttatccatcccaggttgtcagtgcaaacctcatctccatctaaaccatgccaccaggttgaagacctactagatcatgggttactactagctaccagcaaaacagtatccagcaaatcaacagataggccattttagtaattaaaaatcatagtgaacttgtggtaagtcctaatgtaagtgaaataactaaatagaaactaatgacagtagcctaggggaaagcatgagggttgttgttttgttttgttttgttcttgacaaattgtatggtgactaaacaaaacaataagagtttattgtcctgactcatcagtcagccttgttgaccttcccctcttaactgctgcttaaaacatcttcctttctcactttacaccagacaggatctagggcggacctttttctccaaagtttcctctggactttctcctcctggagaagtcaggcttctgctagcagccctgacaagtcctgactcctgcgttccccctgcagcttctctgagactggtgctcccgaaggtttgctttctgtgtctaccaggcaagcttgctttactccctcaatgactccccttaagcacagaactctcaaagataacctcccactgtttctccagattcagaacaggaggtgctgttaggtcaggctgtgacatggagtgttgtctggcaggtcagagcaggttcctggtagcagagaagcccactgtggcaaatttctgagcaaaggactcttgccttccttccagcaactaaaaggattcaaaagaccgcagttcctctttccatccactttcccgaagttggtccagagcggggcacacaaggcacctgtttccaaaaacctgccatgggtattgtaccccttgtctttattcatgtgcatagaccatagagggaagagcaaagtaagatgatttctttttc

SEQ ID NO: 4508 - DNA, 1000 bp, mus musculus
tcccaagttcatatactctagttagtgctgcccacatgcacaggggtgtgaaccaactattgaggcacaagcaacccaccaatggaaagattaaacaatgccatgaatggaaacccagagagcaacaggagcatattacaaagggcagattccaaagatgaaaatgggcataagggaacccacaaggcatagtgaataccatgagaagggcatgccattcaatcaatagaagtgagcacctcaaggagtcacttctattccttgctcagaaaagaaagcagaagaagaaaggaaagagaggtgttgttgaaatgacacaaagacatgttgaaagaagggacattttagggagactattaaatgtggctaggactgggaggaaaagatacccactaaaagaaaaagataccttgttctctcttgtcatcctccagttttaaccaggacatccaatgacagagagtagagggcccacatggtgaatggtaaaaaattcaactttgaggagaaagccaacagaatctccactctaaatgctttgcccagattcacacagccagtgaaaggcagtgccaactgtttgtcaactgctctctcctgctctaaaaagcatatggcttccactgtgttttgtttgattttaaccaatgaagactcaagatccagatgctggggtgaaagcctggtagttcagagagtcagaaaagcacccagctgaccttcctcgacagtgtacttccccagaagaagctctccttctccacactgtctcaaaagccttcaaactagatgtcttcccctttacttcttgtgtgtctctttatccgttctcctgacttcctcttactcttgacgtgatttccccctacgttcactccctgacaacttgttgctgctctgccccttgacctatggttaattttatttaaccctgttttatttaattctgtttacaataaatagaaaactcttagattaaaggtgtatgcttggcctgagt

SEQ ID NO: 4509 - DNA, 1200 bp, mus musculus
cttccggtagtactatgtccagttttctgaggaaccgccagactgatttccagagtggttgtacaagcctgcactcccaccaacaatggaggagtgttcctctttctccacatcctcgtcagcatctgctgtcacctgaatttttgatcttagccattctgactggtgtgaggtggaatctcagggttgttttgatttgcatttccctgatgattaaggatgttgaacattttttcaagtgcttctctgccattcggtattcctcaggtgagaattctttgttcagttctgagccccattttttaatggggttatttgattttctgaagtccaccttcttgagttctttatatatgttggatattagtcccctatctgatgggtgcctctttcttaaaccatctcctgcaaaagggttcaagctggcatttactcgtaagattcatatcggatattcttagtgatttgctttcacagtgctgggaggtgttctgtatgctactggaggagaaaagtagccatcagtctgacccagatgtggaccccgagagctctattaatgcccatttgtggaatagccacatggctgtcatggaagcaatcagtcactttctggttgtgtttaatgtcatctccacaagttgcagctcatacctggcactgttatcagtgcagaggactgtaagcagacaaatcatgggctcttgggagaacctactgctattgttcttctaaatggttcaagtactaaattgactcctaatggtttactgttatacccacagaaccacacatttctcgtatcactctttattctctctgtttctatggattaaccttttctagattccccatgtattttgtttcctgcctgacttaatttaattaatatgttgcactgcgaatataatcatgttgtcactttccaaggttgaataatattctggtgtgtgtgtctgtgtgtgtgtgtaatttatgctttcacacattcattgatggacacttaggttgattctgtatcttgatttgtggatgctgctgcagtgaacaaggggcatagacatttttaataaactaattttatttcctttgagcactcaagtagtggtattaatatgatatgtatttctattcctgttcttaactgtttgagaaactttcatactgttttttttcatagactttgtgctgtttacattg

SEQ ID NO: 4510 - DNA, 1600 bp, mus musculus
gttgtgaaaatcaggcccctaaataattcttgatttcataaaaactgtaattaaaattatttccaaattcctatttttagcattgtatgaattatcctttggggtactggtatttaatacagtaaaaaagatagaatacatgctgtaacccaatcaatattacttataacatataatacagaaaatacagtacactaagcttagattttctgcataatttattcaagtgaaatttcttaatagaactgagttaatattgtcaaactctctgtataaggcatatgccccagaacaggggaacgccagggccaaaaagggggagtgggcgggtaggggagtgggggtgggtgggtatggggggcttttggtatagcattggaaatgtaaatgagctaaatacctaataaaaaatggaaaggaaaaaacaaacaaacaaacaaaaaaaaacttccataagtccttgatgacatttacatcatcaaaggatatctgtttctcttcctgtttctgtactgggttctctctcaaatggtcagaatcttttttttaaattaattaacattttttacactccatattttattccccacccccattcaccctgttccacattccatacctcctcctcaccctccaccctccacatgggtgtccccaacctccacctcatgtgacatctaaactcccttggggcctccagtctcttgagggttaggtacatcacctctgaatgaacacagacctggcagtcctctattgtatgtatgttggtgacctcatatcagctggtatatgctgcctatttggtggtccagtgtttgagaggtcttgggggtccagattaattgagactgctgcagtatcgcccttttcctcagcttctttcagccttccctgattcaacaacaggggtcagctgcttctgtccattagttgggtgcaaatatctgcatctgactctttcagctgcttgttgggtctttcagagggcagtcatgatagatccctttttgtgatggctccatagcctctgtaatagcgtcaggccttgggacctccccttgagctggataccactttaggtctgtcgttggaccttcttttcctcaggctcctctccatttccttccctgtacttctttcagacaggaacaattatgggtcagagttgtgactgtaggatggcaacccaacacctctctttttttttccattttttattaggtatttagctcatttacatttccaatgctataccaaaagtcccccgtagccacccacccccactcccctacccacccactccccctttttggccctggcgttcccctgtactggggcatataaagtttgcatgtccaatgggcctctctttccagtgatggcgactaggccatcttttgatacatatacagctagagtcaagagctccggggtactggttagttcataatgttgttccacctatagggttgcagatccctttagctccttgggtactttctctagctcctccattgggaaccctgtgatccatccattagctaactgtgagcatccacttctgtgtttgctaggccctggcatagtctcacaagag

SEQ ID NO: 4511 - DNA, 1000 bp, mus musculus
tacctccccacacttctccaggtctccccattccctggggcctcaagtatcttaagggttaagtgtgtcttctctcattgaggccaggctacagagtcctctgctgccttggacaagctagtgtatgctggctggttggtggttcagtgtctgagagatctcagcatggggtccaggcttgttgaaaatgctggccttcctatgatgtgacccttctcctcaacttcttccagcctttccttaattcaaccacaggagtccctgcttctgtctcagtcaactgcttgctaagcctctcagagggcagccacactaggctcttttctataagtacaatcaagccttggagcctccccttgagatgggtcccaatttgagtgtcactggacctcctttctgtcagtttcttctctattcttgtacctgcagttcttttagacagaaacaattctgagttatagtttttgactgttgcatggcaactccatcactccacttgatgctactggagaattctactggattctaaaagttccctcttcccactgttgggcatttcatctaaagtctctccctttacgttttaagattctctcacctcccaggtctctggtacattctagagggtccctcatctcccaccttctgaagttgcatatttccaatacttttgctggccctcagggcttcactcctgccccccaataccagatcatgttttactttttcccctgccccctctccctggtcacacccagttccctccctccctttaatcttaccagcatctgccccctacctgtctttgtaactggctttcagggctgcctcttacccagcttctaggcaagagtaaatttaggacctttgttttgtggctgttcctctttctcgggctcccaggaaagctttatagaaccgtaagttctcaggatagagcatgaccatgccatcagactcagagtgacaggaatattctactccacttctgaaccatcta

SEQ ID NO: 4512 - DNA, 1200 bp, mus musculus
atgaaatggctcccatatagtttatatagttgacttctttttttttttttttcccagttggtgaaacttttggggaggggtaatgtcttagttagggttttacagctgtgaacagacaccatgaccaaggcaagtcttataaaaaacaacatttaattggggctggcttacaggttcagaggttcagtacattatcatcaaggtgggagcatggcagtatccaggcaggcatggcgcaggaggagctgagagttctatgtcttcatccaaaggctgctagtggaattctgacttccaagcaactagggtaaggatcttatacccacagccacagtgacacacccattccaaccaggtcacacctattccaacaaggtcacaccttcagatggtgccactccctggtccaaggatatacaaatcatcacattccactacctggtcaccatagacttgttcaaaaacataagtctatgggggccatacttaaacatagcataatgcaaaatgcatttagtccaaagtcctcatagtctatagcagttgaaagaatgttaaaagtccaaagttcaaggtctcttctgagattcattcaacttaattaactttaatccccaaagcaaggcaggaaaccagctgggcagactccaaactctgcatctccatggctgttgtcaaagcggtcttcagatctccactcctttttcatctttgttgactgcaacaaactgctttctcctgggctgtttccactccctgttagcagctttcctcagcatgtatcccatggctctggcatctttaacatctttgagtctccaaggcatttttaatgttacaacttcttctttcagtgtctgggattccacttgatcttttggactccttctaagggctggcgtcacttttccagctctgcccttatagcactctaagctcagattgatccactccactatggctgctgttcttggtgatcatcccatggtacagacaactccaatacactggggtgttccactccaactaggcttcaccaatagcctctcataggctcttttcagggtgccaagcctcaaatcctttgcatgaccccttcaatactgggccatcaactacagctgaggcttcaccttctccaatgcccttccctggcctctcacagtgctaagcctcagcttctctccatgatcccttcat

SEQ ID NO: 4513 - DNA, 1200 bp, mus musculus
atacatgtcaaaaagaatcactactaaaaacaatagacaaaataacatgtgtgttttggaaatacagactttttgaagggggaactcataaatgcatttgcttatttgcaaaaagaatctctgggagcatggaatgcgctcgtataatggggctactttgctgtgcgtgggggtgcacacctttaatctcagtgctcaggagacagaggctggtggatctctgagtttgaggaaggcctggtccatagaatgagttttccaacagctagggctaaacgaagagaccctgtctcaaaagagatttccccatcttcccccaaaggttgtgttattatcttgttggagtgcttctttggagtaggatgactaataacagaaatcatcagacaacatgctatgtatcttttaataaaaaaatacattttgaaccatgtgtattgctgtttcaaatattaaaaatgacatgtaattacaataaaaagtaaacaatgaaaattacattcttattacataatcacttaagttttaattacttaagcaaagtgtaattgcacttctctcttttgtaatttaatgagctatatcatttcccatctaagtgaaaacttgatggaaactagggcagttacttattcattctttattgtagcacacacacacatcaaactaaatctaatagaacactacttaaactgtggaatgaatgaattatatttacattatagtttatgctggcaagcagcccctgaattcatttcacaaacatgattctatcaaattactttgctcttgaatcaacaacattaattcctcatcctgttgtgtgtgctgtttttatttatttattttaaagtttccactcattgctttgttctatttctgaggctgttgtttctttgatggcatagttttactggatagcatctccccactagttgttatacacagagctgtggaagtgagctctattccattggtttctgttcagtcatacattacagaatctgttacccattgtggtgccacattcagtgctcactaatatccttgtttgtgagttcacctttcctccacaaaacaaaatatctaaatacctttggctaaactcttgtgactagttaatgtgaccatttgagttggagccaatgaaatggtagagcaatattgaggcttttcaaagacccgctatagaaacatctt

SEQ ID NO: 4514 - DNA, 1200 bp, mus musculus
cacaatggagagaggcagaactggcgatttgaaggtagtgaggaacagcctgatgtgagtagccggtgataccacctgggatcatggtggggtcctagcttgtgatgcccctgggggccatgtctgatccatggcctgaaacaccagatctaccagataagccaggcagacatcgctggtctgacctgctgcttagagatagataaaagtctgagggatatgcagaactgacctcacctgggcatcgagggagagctggccctggggacgagagagcaggagggctgaccctgcccctccccagctacagtacttcggagaactgctcttctcattgtgggagatgctggtgagctccagccccatccccagatacaagaataggagaactggccctatgtggatgagggagagaagccctcctcccctcttgcccctcaccacctgtggcaagtgggagacctggtttggagagctggctttgccccttaccacctacacaacttgggaaagcagaccctgtaccttgcctaggcagcatagaggagaaggagagtgtgggagagctggcccatatcttgtctggtaagcagtggcatcactgagagaatgataccctcccctccctttggccctaaccaccaatgtccatcaagaaagttgtccctgacaggttaggagagcaggagagctggccctgcctttccctcaccttctacagcacttgggagagagagcaagccctgagattcacctaagcagcacaataggactgaccctgattagtggaggtatgggtgagccggtcctgaggatatgagaataggagagctggcccctgcaacttgtctgctatgtgctatgtagtgacatgggtgagagggggtggggggagagctcctcttttttgccccttgcaccaatggcagaaggtcatcagaactgaagagctggcactgcgtagcagggattgctggtgagccagccctgtgttccatgacagtgggaaaactggtgggctgagcagctcagatacctctcaggcccagatccagggtttgaaattggccaaccccaatatctaccccattgatgaacttctagagtacatgaagaggccggccctacagacccaaaacaacaggttctccatgacacaaggcaacaataggatcctagccgatttctagtgaggttcca

SEQ ID NO: 4515 - DNA, 1000 bp, mus musculus
ggattgtaattttacttaccatttttttagctttatttctagtggatattgttggtattctccagttcttccttgccaaacagtgcactcaacgtttaaaagctccaagtgttggttaataacagacattggccccctctttcacaattgtaactataaaaatcattacacattgttattatcactcttacaataaagggaaaataattgactgattctggagaatcaccttgaggtagtaagatctctgccatgtaattcactttccaagacttttcctgagttcagaatgaagcttatctgaaaacattaggcatgctctgcgttccttctctccctcagaagaacagaaggaaggtgtccttctgttgcgggaaatattttaaaaagagatccagctcgttcccgtgcttgtgcctgcctctctctgccccagtggtctggcccaccttctcttatctcgaggtgactttccacccagagccacccagctcattaggttcccactggcagatcattaccatgccaggcccatgcttcaaatcccccacagcctttgtggtgcacctcaggcagacccatgctttgccactgtacctttctctctttagcccagatgagctgctgtgtgaaggacaatacaacacagacttagttcagaaacaatggtaactcaatctctgggcacaacaactaaaacctaatcttgtaaacctatttttttattagatattaaatttgattcctcctgtagcaaattcttgcagatgcgtcatgataccgagaaactctagctgctacatcttacccttatgctatcccctttccagagggacctaattctctcctgcttcctctcttcctccatccaacctggaagtcccgcctacatgcccagtgattggatcctttattctctaggggattggttcataagaaaccacctgagcacatgactcattccttattccagacagcctctctcgggagtgcagaatta

SEQ ID NO: 4516 - DNA, 1000 bp, mus musculus
taagatctaggatgcagctcatgggttatctagctctgggtttgagctacagcatggcaatcgtccagctctggtgccgaaagtctgtgatactagcatccagaagttgggggcaggaggatcagaaagttaaggtcatacttgcctacacagcaagtctgagcccagcttagtgtacatggacactgactcaaacaataattgtccattaaaagaaaagaatcatcggatacattgactgcaaaaagcaagcaatatatgctgtatttcattcagtggatctgatctgaaagtcctttgcaaagtcctttttcttcttataaaagccttttggctaaggaaagtaggcagaataatagaaaaattacttttatgtaagttgtaatgaaagaattgagttaggcagtaagattaaggaatgaagtcatatacaaagagctaagatttatagtaagaacaggcattccccaaatgtatccacttggaatcaccaatactgtgctgacaatcagtatgcatcttctgaggacctgagagatgcaaggaggctggggacgtaacttgtctgccaagtacagggtcccccacactgcaaccaaagccaaaggaaaggactccctatgaaatcttcttactacacataaacaaacaaacaacccccccccaaaacccctgtccctacagctaatcaacattttaaagctaatgtttatcttccacaatacacagttaaatcagtggcaacttcagcctgcaggccaaatctagttctgagtgcttataaaaataaagtattattgaaacactttcaccctgctcatctgcatggagtggggtggcttactaggaacaacggcagggcggcagcaaaggctgtctgcccagcaaagttgaaaatattcactaattggtttttcacaaaatttgatgccatgaggaagtaaacagatgcttctgaaacaattggggatatttccatgttctataccattatgttaat

SEQ ID NO: 4517 - DNA, 1000 bp, mus musculus; identical to SEQ ID NO: 4516

SEQ ID NO: 4518 - DNA, 1000 bp, mus musculus
atgtcccagtcccacttgggaaggagaagaaagcaaccatgagtgtggaaggagggagggaggaaactgggatggaaagtggactgggggtgggctggggtggggtggggtgggggagatgggaacctgatctgttattgggtgagggaaaaggactgaagccccgagattcagcagcaagaatggaaatatgccaccttggaaaataggaagttgggagaatgcacaagcgaccttggagctgagagactttcaggactgaaatgaagagacattagatgaaatgtctgaaagtaggaagagggaacttatagagtccacttccagcaagaagacagggcatcaagtgagggagggtgttagtatcccacagtcacaactctgacccataattgttcctgtctgagagaactatagggatggaaatgaagaggagcctgaggaaaagaagtttcagtgacaggcccaaagtgggattcacttaaggggaggttccaagcctgacactattactgaggctatggagtgctcacaaaaagggacctagcatgacctcaatccagaagacccaacaagcagttgaaagaatcaggtatagatatttgcacccaaccaatgaacagaagcacctgacccctgttgttgaattagggaaggctgaaagaagctgaggagaagggtgatcctgtaggaggaccagcagtctcaattaatctggacccccaatatctctcaaacactggaccaccaaccaggcagcatacaccagctgttatgaggcccccccacatgtatactgcagaggactgcggggtctgggttcagtcagaaaagatgcacgtaaccctcaaaggactggaggtcccagggagtttagaggtctggttgggtgggtggtggggggagaagacatccttgtggagacaggggtatggggaagaggtatgtgatgtggaacagtccgagggtggatagggagtgttggagaataaaatctgga

SEQ ID NO: 4519 - DNA, 1200 bp, mus musculus
cctgataaacagcttcagtgcagtagctggatataaaattaactcaaacaaatctgtggcttttctctacacaaaggataaacatgctgagaaagaaattagtaaaacaatacccttcataatagtcacacatagtataaaatactttgttgtgactctgacttaggaagtgaaagatctgtatgataagaacttcaagtctctgaagaaagaaatcaaagaatatttcagaagatggaaatatctcccatgctcatggattggcaggattaatatagtaaattggctatctttccaaaaacaatctacagattcaatgcaatacctatcaaaatttcaactcaattcttcatagatttagaatgagcaaattaaaattcattgggaataacaaaaccccaggacagctaaaactattgtcaacaataaaagaacttctgggggaatcaccattcctgacctcaagctgtagtacagagcaattgtgataaaaactgcatggtagtggtacggtgacagacaggtagatcaatggaatagaattgaagatccggaaatgaacccaaacacctatggtcatttgatctttgacaagggagctaaaaccatccagtggaaaaaagacagcttttccaacaaatggtgctgtcacaactggcagtcatcatgtagaagaatgtgaattgatccattcttatctccttgtacaaatgctcacagctacctgttggacaaagcacagcttccccaatgaaggttctagagaaagtacccaaggagctgaaggggtttgcatgcccataggaggagcaacaccatgaactaaccagtatccccagaactccatgggaccaccaatcaaaggaaacacatgatgggactcatggctctagctgcatatgcagcagagagtggcctagttggtcatcagagggaggagaggcctatgatcctgtgaacgttctatgtcccagtatagaggaatgtcaaggccaagaagtgggattgtgtgggttcagaagcatggggaggcatggaggagattagggatatttggaggagaaactaggaaaagggacaatatttgaaatataaatagagaaaatatctaataaaaaaagaaattgtttaaaaaaaaaaaaaaggaaagactgtaaggaccagtaggtaccttactccagagaagcagccttttccaga

SEQ ID NO: 4520 - DNA, 1200 bp, mus musculus
gcatgcagatagccatacacattctaacaatagggtttcaagtttatggaaaacatgcccaggtaatgagagtgaatcattctttgtaatcttgcagaagttgctgatggtttgatgtggctgattcaaataatattttaatatttcagcttgggtctggatccatgataattgatggcaatggtagatcactgcaaataagctggcaaatttttcatgtacctattttctttttttatcttttcttttattggatattttctttatttacatttcaaatgttatcccatttccatgcctctcctcaggaaaccccctatcccatccctcctgcctgtatgagggtgctcccctacccaactacccacacccgccttcctgccctggcattcccctgcactggggcattgaatacccttaggctcaagggctgcttctcccactaatgtccaacaaggccatcgtctgccacaaatatggctggagccataggtctttccatgtgtattcttttttttttttttttttttttttttggtggtccagtccacggaagctccacagggtctggcctgttgacactgttgttccccccatgggcctgaaaaccccctcagctccttcagtcccttctccaactcctccatcagggaccccacattcagtccaatggtttgctgagagcatctgcctctgtatttgtcaggctctgacttagcctctcaggagacagctatatctggatcctgtcagcaagcactcctagcaaccacaataatgtctggattaagctactgtatgtaggatggatacccagctgggacagtctctagatggcctttccttcagtctctgctccacagtttgtttccatatttcctcctgtgagtattttgttctcccttctaagaagcactgaagtatccacactttggtcttccttcttcttgagcttaatatggtctgtgaactctatcttggatattccaaacttttgggctagtatagacttatcagtgagtgcataacctgtgtgttcttttgtgactgggttacctcactcaggatgatatttttaagttccatcaatttacctaagtatatcatgaagtcattatttttaatagctgagtagtattctattgtgtaaattaccacgtcttctgtaaccattcctctgttgagggacatctgggttgt

SEQ ID NO: 4521 - DNA, 1000 bp, mus musculus
cgaattactccacattttattacacctcaaaagatagaattatgtaaagatcatttgaaaacattgaatgatttccagaagttgttggtagatataaattggatttgtccatatatgaggctattaaattttgaattaatccctctttttgatatattgaagggtgatccacagctttcgtcacctcgtgctctcacccctgtgtcagagtccatcccgtgagaaagtgagccttcacaatctctctaacagtccaaatggcctcatgctaagagcttgttatcacccccttcctccctattcccttcctggcacttgaggctgtaaaagctgaattatagtcccctcttccctatctcttcctgaactcccatgccatccaaggacatgagttacacctgagaccagcctgacacccaaggctgtcaaggaggaatgatgttccagagataagatgcagagtgtccgctgcctggctcctgactttgtcccccatgtcagcagatgcccacttctttgttctttgtataattctccctcgacccctcccatattccccatgatgtatgctttaaaaaaaaggcacctcagcataataaacgagacctcgataggtacccttcctggtctcctcttcctctttttcttccttccatctccttccaggtttgcggtccccctcacacccacgaataactgaattccacgggatgggataagtggcacccgacatgagggcgaggtccagatcataattcctaattggtggaggttccagagaagttcgttgcgaccccaagaatttagaagtagtgaaggacaccttctgctgctcacggaagagcgagaagtccttgttgagttgagtcatctccacttcagcttatgggaaataagctatctaaagaggcagccttcatcaaaggcttaaagatagctctcagggaaagaggagtacaagttaaaaagaaagattagatagactttttattttcataga

SEQ ID NO: 4522 - DNA, 1200 bp, mus musculus
ggttttgatgtcttcttggatttggtttgcaagtattttattgagtatctttgcattgatattcataagtaagtttggtctgtagttctcttttttggttgggtccttgtgtagtttagctttcaaagtaattggggatccataaaatgagttaaatagtattctttatggttctactttatggaatagtttgtggaatattggtatcatgtcttcttgaaagtctggtataattctacactaagtccacctggccatgggctcttttggttgatccctcagttggaatgtcccacacatggtctgctacagcaagggcctcagtcctaccacccagtcacaaaagaggcagaatccagagagagtcacccacaccatcaaactccagggatatccagatggtaaatggcaagcacaagaccataagcaacagaagccaatataaataggcatcgtcagaatctacttctcctgccacagcaagccctgaataaacaaacacacctgaaaatcaggaatctatcctaaaatcctatatcatgaaggtaatagtaatattgatatccttgatatcaataactcactgaaagaaatacaagaaaacaaaggtaaacaggtgaagaaattgaataaagtattacaagccctaaaaatggaagtagaaacaataaagaaaacacaaatggaggcaaacctggaaatgaaaacctagaaaaggggtcaggaattacaaatgtaagtaacaccaacagaatacatgagatagaagagagaatctcaggaatagagattattatagaagagattaacacaacagtcaaagaaaattcaaaatatagaaaacaagcatcaggaaattcaggacacaataaggagaccaaatctaagaacaatcagaacagaggagaaggaagatgcccagctcaaagaaccagaaaatgtcttcatcaaaattatagaagaaaacttccccaacctaaagaaagagatagccataaaggtacaagaaacctatagaacaccaaataaatgggactagaaaagaaaatcttctgtcacaaaataataaaaaaaaaaaaaccactgaatgcacaggacaaaagaatattaaaagctgcaagggaaaggtctaagtaacatatatagccagacctatcagaattacatgagacttctccctagagacaatgaaagccagaa

SEQ ID NO: 4523 - DNA, 1000 bp, mus musculus
aatatccaatatatgtaaaaaaacctcaagaaattagacatcaataactcaaatggaccaattaaaaatggtttacagagaaatctctagtggctgagaagcacctaaagaaatcttcaaagtatgcaatggtgtcagcgtttggaggctgattatgggatggatccccgggtatggcggtcctaggtggtccatcctttcatctcagctccaaactttgtctctgtaactccttccatcagtgttttgttcccaattctaagagagagcaaagtatccacactttggtcttcattcttcatgagtttcatgagttttgcaaattgtatcttgtatcttgggtattctaagtttctgtgctaatatccacttatcagtgagtacatatcatgtgagttctttgtgattgggttacctcactcaggatgatgccctccaggtccatccatttgcctaggaatttcatgaattcattgttactaatagttgagtagtactccatcatgtaaaagtactacattttctgtatccattcctctgttgaggggcatctgggttctttccagcttctggctattataaataaggctgctatgaacatagtggagcatgtgtccttcttatcggttggaacatcttctggatatgtgcccagagttgtcttttgtgaggctatacagaggcctagcaaacacagaagtggatactcacagtcagctattgggtggatcacagggcccccaatggaggagctagagaaagtaccaaagaagctaaaggggtctgcaaccctataggtggaacaaccatatgaactaaccagtaccccctagagcttgtgtctctagctgcatatgtatcagaagatggcctagttggccatcatttgaaagagaggcccattggtcttgcaaactttatatgcctcagtacaggggaatgtcagggccaagaaatgggagtgggtgggtaggggagcagggtagggggagggtatagg

SEQ ID NO: 4524 - DNA, 1400 bp, mus musculus
gctgtacatagtacctgccaatgatgagggtttgctgccccgaccagtcaacaatctggtgggtgatgcaagagtctgtgatgtcatagatggctctgatacacagagatttgtcccaggatacattcccaccaaaactcctgatgatgaaggccaatgcttcagggggcacctctcggttcaggaagaaattcaggccttcaaagagtttcttgtgcttttcttgtgcctccagctctttcctccgatctccctcctgtgctgtcacctccccatcagtagagaattcatcagcctcagcctcctctatagtaggcaccactactcgggccaggctggcactgagggcagccagtttctccatagagctctcagagtccaatgcatatgtgttctcgctgatctttgtctctgcttggacttgatattcaagctttggtgggtagtgaaggttgagtgactggtagagacagaagttgacaaagcccagaagtgtggtataaaactcagtgaaggtggccaggaccctgtagtccacatcttttggatgatcatgggagaaagcatagggtgcaatccatacaatgggctgacccagcacctcagcctgataataaatgcctttaatggacaggaagaccttgcgcagggctcgggcagtgatgacgtagtgcaggaactccacagtgagccgggggcggcacaactgaaaggtctgcacgtgacacttgccagtccgaaggaaggtggagaagaggaagcacattgacagggcatcatcgaggtcctgcagagcatcgataaatgtcaggtaccgctccttgacaatgtggtcaagtttgcagcagggtttattgtccttcaggcgctccatagcattccattcgctctttccatgggctttgctgagcttcggaacaaacaccttgtactctcggaacttgttgacgatgggctcatggaggaggaatttaatgtctttgataaggtaaaatgtccaggctgctgtggaacccttgttaactttcttcttatgcttgggttcgtgaggataaatacctttcaggatgcacagccacctgaagtcaggcaggctcagctgcagcttcttcctggccttgtttcgggtgatataattgttggcagagcctagttcatacttcttcttttccagacctcccatagctccaggttgagaaactcaaggcagcgcaggacagccgatgtcattgttctaactgctgataaatactccattgtgtaaatgtacccttcaattgagggacatctaggttgtttacagtttctgactattatgaataaagctccaaggaacatgggtgaaaaactgtagctgtggtaggataagtttggtatatgcctaagagatatatagctga

SEQ ID NO: 4525 - DNA, 1400 bp, mus musculus
ttttttttttacattttgaattttctttaacagttgtcaatgtcttttatggcatcttgtacacctgagattctctcttgtatctcttgtattctgttggtaatgcttacaactgtaattcctgacctctttcctagattttccatttccaggtttgcctccatttgtgttttctttattgtttctacttccatttttcagttttggatcattttattcaatttctttacctgtttacctgtgttttcacatatttcttccagtgagttagtgatatacaccttaaaggactctattatattcttgagatagggttttaggatcgatttctgagtttcaggtttgttggtgtattcaggttttgctgtggtggcagaactatattctgatgatgcccatgcattttgacttctgttgctttcggacttgtgcttgcctttggccatctggatatccctcatgtttgttgatctgagtgagtttctggagtctgagtcttttgaccctgggttacttcaggtctcctggtaggcctgtgaccctggctttagcagacactggtggacccttacaattgggttctcttcacaggggcagagaagctgctgatctgttgccctggctgcagtagatctcctttgaggtcttcagacttttcgttctttaatggaacagtcaagctgttgtccaactgctctgaatggagtggattctcaactactcaacttctctgagtgcagtactcctctatgatggttctggatgtggtgtcctcataggagcagacctactaggagtctgccccagcaatgaagactgggatgaagtggtagaaggtacaaaagggaagcagtactctgaaggtaagggttttggtgtgtgttgtgtcccaagtataccaggttcccagcagtagctccaggattggaggctgggggtggtgctttttaccaaatgctctgagtgcagtgggtcctctaggatgggtctggaaatgatatcttcatgggagcagaccaactaggagtcttccccaacagaagggaccaggtggacaatggtcattgttaaaatgacccaaacctccacatttacaacattctttattccctcatttctgtcaaagcaatgcttgcactgtggtcccttgtaaagcagcagccatagccataccttgattgtatgggggtccgaattctgtacaaagatcaatttattcagttaagtctgtctttgctttgtatggccggataaccattcagctggctgcataggcattctcataagccaattgtataacaaaaggagctcctgcctggggttctcaaaaattctgtcagctgcttttagcagtgtatccacaaattctggaaatggttcattgagaccttatttgatcc

SEQ ID NO: 4526 - DNA, 1200 bp, mus musculus
agtcactgatatttgtataagatctatatgtgaaaccctataaaagctcacaaactacactttagtgacctttgctatgaaattatgggaattattgtgacagatgtggttatcacaaccactagttaaagtactacacaattttataactttatagatcatctcttttgcatgatacaatcttgcattataatttatagaatacacatacacacatatacaccacacacacatacacacacatgtatatatacacacacacacacatatatatacacacacacacacacacacacacacatataataacctttatgaagacattagttacctagttaacctagtgttcatacatcatatgaaaaatttgagagacaaccggccaccttcctggtgagagcacaggggtccacccagcccgagaggtttctgcctcaggctccagcgggagccaccttggttcaaggactccgcagagggcaggctgcacaggagagggtgtggaatacagaggccagcagtttcttgcacaggcgagagccagagagcttctgaggcggcaccatttcggctccagacaaccggccaccttcctggccaaagcaacacagcttctgggaaaaaatctgttttgggccttcatcttcagccaggaggaggtccaaacaccagataactgtgcaccttccctgaaagaggagagcttgcctgcagagactgctctgaccactggaactcagaggagagagctagtctcctacgtctgctgctagagggtaacaaaatcaccagaggaacaatatctaaacaaagacaaccataacaactaactccagagattgccagatggcgaaaggtaaacttaagaatcctactaacagaaaccaggaccactcaccatcatcagaacccagaacacccacttcgcccagtccagggcaccctaacacacctgaaaaggtagaactggatttaaaagcttatctcatgatgatggtagaggacataaagaaggaatttaattactcacttaaagaaatacaggagaacactgctaaagagttacaagcccttaaagaaaaacaggaaaacacaaccaatcagatagaagtccttatagaaaaacaggaaaacacatccaaacaggtgatggaaatgaacaaaaccatactagacctaaaaagggaagtagacacaata

SEQ ID NO: 4527 - DNA, 1000 bp, mus musculus
ccgcatttagagtttttttgtgtcactaatgtatattatcacatcttttttaatattgatactttgcctgggagaaagaacaaaaatccctggtacatgggaggcactgagtaccctatgtagttgaccttagctgagttagtgaagattcctatcagtggagaatacagaaactgaagtggctacctcctatagccaggtggaacttgcagtggagagggggagcataaacaccccctcaaaaccgtcaactcaatatgtgtccttgcctacaagatgcatagacataaagatgaggcagatattgaaggaagagccaaacaatgagacccatcccatatgacataatgatctcagctatgctagcagacagaaacttagcataactgtctccagagaggcttcatccagcagcataaccaaatatcagggaatgttatggggtgggcgacagaagttcgtcaactggagggggtcaaatacatcacaagaagacttttagattcaatgaacctgaacccatgatggctcacagagattgaacttctaaccaaagagcatgcaagggatgagcctacaccccaaacaagcatatgtgtagtttggccttcgtgcgaatcccctagaaattgaagagggggcctctgacaccacctatttggacctcagtgggagaggttgtacttatacctgctagaaataaatggctcaggatttcttaggaccaaggtggagctttcccttccctaaggagaagggaaaggtataatgggggatggatttgtaagagtttgactaagaggataggagtgagagggactgtgatgggaatgtaaattaaaaataaattgttgaaaaaagtgatttaggtgaatcctaaatatttaaaccagtatgttaaatggaaagcaagaaattaatagtctgattcattataaaacctttttttttcagctttgataaattttacagtacaagttagcaatctcgttggactgat

SEQ ID NO: 4528 - DNA, 1000 bp, mus musculus
ggacgaattgggggtcaggatcaggtatgggaggagatgaggcagatggacagcgggtcaggaatataatcagtgttgtttaggaatgggggatgtggaactgaggctagccatcataaagtctcagactccaggaaaacatgaggctcccaggacccactgggactgacattagctgaaatacccaacaaaggggagagagaatctgcaaagaccatgtttagaggttaggcatggcccaaaggggctacacacccatttctaaaaatttaacccgtaattgctcctgtctaaaggaaatacagagacaaagagtggagcagagactgaaggaaaggtcatgcagtgactgccccacctggggatccatcccatatgcagacaccaaactcagacactattgctgatgccaagaagtacttgctgacaagaacctgatatagatgtctcctgagagaccctgccagagccttaccaatacagaggtggatgcttgcagccaaccattatactgaacacaggggccttaatggaggagttaggggaaggaataaagaagctggaggagtttgcaaccccataggaagaacagcaatatcaaccaaccagaaccccccatcccccagagattccagagactaaaccactaagcaaagggcacacatggaaggactgatggatctggctgcatatgtagcagaggatgcccttgttggacatcaatgagagaagtggcccttggtcctgagaaggctcaaagccccagtgtaggggatgccagcacagggaatcaggactcggtgggttggtgagcatggggaaaggagatgggataggggtttttcagaggggaaaccaggaaagggaatacaatttgaaatgaggtggggaggaggtatgggatgtggagcagtaggagagtggatgggggggggtgaagagaatagaatatagagtgtaagaaataaattaaaaataaaatacaatttaaaaattgaaa

SEQ ID NO: 4529 - DNA, 1000 bp, mus musculus
attcattggctttttaaaattaatatatttttgcactctatattccatttcttacccctgccccatccaccctctgactgctccactgactgctcccttctccccaacacccttatttccacttcaatgcccccacccccaccccacctgacctctaatttcctcttgagggttaggtgcatcatctctgaatgaacatagacctcaactctatgtgtgttaggggcctcatatcagctggtgtatgttgtctgcttagtccagatcttgggggtccagattaactgagactgctgctcctcctacagaatcacccctctcctcagcttctttctgccttccctaattcaacaacagaggtcagctgcttctgtctgctggttgggtgcaaatatctgcatctgactttttcagctgcttgttgggtattttcaaaagatagtcatgatagctccctttttgtcagtactccatagcctcattaatagtgtgaggcttttggaactccccttgagctggattcaactttgggcctgtcgctgtaacatcttttccttaggctcctctctatttccatccctcatagaagcaggtggaagggggataggataggagggttccaggaggtgggaaaaaccaggaaaagggatagcacttgaaatgtaaataaagaaaatatctatctatcttccccctggaccttgagaagggggtttttgttgtttgtttgtttgtttgttttaagacatcccttttatggcttagtgttacaagactcaacatagtgaccatacatattagccacagatataaagtagaaagtaagctgttatgtaggagggttagataccagtagaaaggggaaagaatacacatattaatggatggagagtgaagtgagatttaaatgggagaataaaacagggaaggggtgagatgagaggggcaagggaggtcatatagggaggagcagttaaaactaaggactatttaaaatcca

SEQ ID NO: 4530 - DNA, 1000 bp, mus musculus
aaaagacaattttacaaataataattaattttcttctctaatagcatgtattatatctcccaagactatgaacacttgtaagtagcggtgaagcttctagccaagtaaaaccaaacctttgtttaaaattcctaattttaaattttgtattattccaaaaatgctattttattttccaaaaattgttggaggagagagacagtaggaaagccctgaggtccaagagaatgaatggaggtatgcagcttcagggagtgggagatggggctgaccctctagaaagccacagaaacctgagagtgagagttattaaccaacagtcaaaaatgtttgacccagaattattactgtctaaaagaactaccgtgacaaaaatgaaagagactgaagaaaagttgatcaagttacaagcctgacttgggatccaagtcatggtgggaagaggcactccaaggcctgaaactattactgatgccatgatgtgcttacagatgggaatctagcatggctgtcctctaagaggcagtaccagcatctgctgagagaaacacagatacttagacccaaccattggattgatgtcagggactcctagggttaaaataggtgagggactgaagaagttgattgggagggtgacctcataagaaaaccagcagtctcaactaacctccctggatactcccagagactgatccactaaccaagcaacttacataggctgctccgaggctgctgcacatacacaacagaagactgcctggtctagccccagtgggataagattcacctaatcctgaagagacttgagtccttagggaaggggaggcctgctaggggaggggaggaggtgaccatcctatgggaagcaaggaagagaaggaatgtgatgaaaaactgtggtaatgggaaccaggatgggagcaatggctgaaatgtaaatacatataataattttaaatattaaacagtaatgtttttactaagatgattaaattaa

SEQ ID NO: 4531 - DNA, 1200 bp, mus musculus
ctgagttcaataagtttcattagaagctataaatagaagttggaaggaggagaataaaacattaaagaaattagatattagactattaaaatattcagttcatagaataaaaagatgctcagttgaagcatcttctgagtatatgcctaggagtggtatagctgggtcctctggtagtactatgtccaattttctgaggaactaacaaactgattttcagagtggttgtaccagcttgcaatcccaccagcaatggaggggtgctcttcattctccacattctcaccagcatctgctataacctgagcttttgatcttagtcattctgactggtgtgaggtaaagtctcacagttgttttgatttgcatttctttaatgactatagaatgtcttagaaaggggaataaactacccatgggaagagatagggagataaagtgtggaacagagactgaaggaaagaccattcagagactgccccacttggggatacatcccatatacagtcaccaaatccagacactagtgtgcataccaataagtgattgctgacaggaacctgatatagctgccccctgagaagctctgccagtgcctgacaaatactgaaatggatgctttcaaccaaccattggactgagcacagggtccccaatggaggagttagagaaagggtctgaaggagctgaaggagctgaaggagcttccagccccatagaaggaacaacaatatgaaccaaccagtaccccagagctcccagagactaaactaccaaccaaagagcacacatggagggacctatgactccagttgcatatgtcgcagaggatggatttgttggacatcaatgggaggagagacccttggtcctgaggagactcgatgccccagtgtagggaagtgccaggacagggaagcaggagtggttgtgttggtgagcagagttaggggtgtaagataggcatttttgatggaaaatctggaaagcagataatatacaaaacttacataaagaaaatatctaataggaaaaaaaggaaggcagagggaaaggaataaattagttttcaaaggtaattgctaacatcttcaataattgcatgggcacatataatcacatattatttcaaggagacagtggccagaaaggatttgccaaaagaaaaatggaagaagggaaaaattgatgtacagtatg

SEQ ID NO: 4532 - DNA, 1000 bp, mus musculus
tggatgttttgagttaggatctttttgctgttttgtattttctttgattgttgtggtgatgttctctatggaatcttctgcacctgagattctcccttccatctcctgcattctgttgctgatgttcgtatctatggttccagatttctttcctaggttttctatctccagagttgcctcactttgggttttcattattgtgtctacttcccttttcatgtcttggatggttttattcaattccatcacctgtttggtcgtgttttcctgcaattctttaaggaatttttgtgtttcctctttaaggtcttctacctgtttagctgtgttctcctgtatttctttaagtgagttattaaagcttttcttgatgtcctctaccatcatcatgagatatgcttttaaatccgggtcttgctttttggggtgtgttggggtgcccaggactaggtggggtgggagtgctgtgttctgatgatggtgagtggtcttgatttctgttagtaggatacttacgtttgcctttagccatctggtaaactctgaatctagttgttatagttgtctctggttagagcttgttcctcaggtgactctgttagcctctatcagcagacctgggagactagctctctcctcagcttcagtggtcagagtattctcagcaggccagctctcctcttgaagggaaggtgcccatatatctggtgtttgaacctgtctcctggcagaggttgtgttccactcatcagatttcttaagatcccgtggagggtcctgtgaggaccttgggggtgtgtggaaactctgcatggaaggaacccccccggtgctggagtgtaccagaagggacttgtgcccctgatcaggctgggttatctgcatccctagttaatgcagtctcaggtcccgcaagattggattagagcagacgctgtgttccactcaccagaggtgttagtatcaaagctttctattgttaatgctattgtggacatct

SEQ ID NO: 4533 - DNA, 1000 bp, mus musculus
aacaaaagtctatattttctagccagatatgaaataccaaatttaaataaaaatcaggtaaactttctaaacaatcctataccctgtaaggtggagcaatggcctatgcacagacagcctgttctccagggggttcttaggccttgaatccccatgggacctggtgggtagtaatttccacctacatgggacagaaggcatttgaacatgtctgctggacccctggctcccgtcgaagttaccacccccacttcccccacaggagacgtatgtagctatgtagcatagacaatgtcccaatcttcttgaattctggctagactcctccccacagttacttagcaacagcaagatagcctagtccactataagaggggttgcttggctccaccttgctctctctgaccttttacctctattactctctagccttccttccctctctctcttcccccttctcttcacgtggccatggccagtctctgcctctctctttctaccttctctctttcttcctgcctttctacaataaagctctaaaactatagatcatctctgatcatgaaggcccaccatacttgaatgatgggatagacttactcctaatgagctgtgtctaacctcacgccagaaggccttcctaagctgcatcagcggactggattaaggacttttgcctgcatggaaccacccagtgactcccacccccaacctcccttctgttctgctctgtggccaagtgccacaccggggcccctattctgttctcagctcctccgccagcatgggatgccagaggctgaaaccttgtacctggggctgctccttgtccactacccaccctatgaggtcagtggcctaacacagcgagatgcccacctggggcctcctggaaagcatccagatgtccttcagagtctgccctcccagaatacctgaatgctggctggacacaggttctctcccactgccctctttccccaacagccatgcatggccc

SEQ ID NO: 4534 - DNA, 1200 bp, mus musculus
acctaaaaaggcatgcatacactgatactagccaaaaagtacagaacaccaatacaaggtaaataagaaggaagatcaagtgaggatgcttcagtcccacttaaaatagagaataaaataattatgggaggcagagagaaggaggaacctgagtgggagagggtaaagggtgggagaattgagggagagtatcaggtttggggagagacagtagggagaaccagaggttccagaaaaggaatagaaatacacagatgtaaggggtggtggggtatccggaaagtgggaatctctaagaagtcccagagacctgggacagaggaggatctaaggagtcaaaccgggtgaccaggtagacaaaacaaccagatgtggggatctggaacttgaagagacaacatcctatagctagaaaggttcctcagtagagtgatggaaatagcataccttctacagagcttttgacagaaaattggtcctatctaaaggaaatgcacggacaaagatggagcaaagactgaaggagtggcagatgagtgacctacccaactggacatccatttcaaggtcaggcactaatccatggcagtattagtaatactatgttgaccttgcaggaaggagcctagcatagctgtcctctgagagactctacctagaagctgactgatacagatgcagattcccacagggaaacactggaaagaggtcaggaatccatatgaaagagttaggaaaagggttgaaagctctcgggagatgatcgcaattcacaggaagaccaactgtgtcaactaacctggaacactgggagcttcaagagactgacttaacaaccaaagaacatacaatggctgatctgaagccctggccatttacactgccaggagctgccttgtctagcctcagttggagagaaaacacctagtcctgcaaagactgatacatctgggtaggggataggaagtggggcactatctcagaaatgaagggaagaggaaaggaaccatatgaggggacacagtgaaggggtcagcatttggaatgtaattacataaatgaatttaacaaaagaaaagacaccattcttttggaatatttttctaatacaaattcaagtaaaagagaacagcagtagaaatttatcacacagatctcacaccatggagtctgaaagcctcagaggactctgtgaataga

SEQ ID NO: 4535 - DNA, 1000 bp, mus musculus
aaatttaaatgtgttacctagttactttctttcctcctttctctctttctgtcttccttccttccttccttccttccttccttccttccttccttccttccctccctccctccctccctccctccctccctccctttctcctttctctctctctctctctctctttctttctttctttctttctttctttctttctttctttctttctttctcttccttccttctttccttccttccttcctccctccccccctctccccctctctctctctctagcttttttttaattcttggtgaattttaaatcatgcaacccagtcccaatcatctaacaatgtctttgtttttgcatcctgcctttgcaacctcccttccaaaagaaaatcaaaaacaaaaacaaaaaataaacaaaatatgaataacattttatcataaaagctataatgtttcactgtgtatctcactgtatatacttttgtccacacacctttagcagaaaaagttcattgtcatgagtcattgttctggattgagggttctggattatattctggtacactaatgatactggatcctcatggtgatctctataggatttcttgttgtaacactatatcatggaaatcatccagatttggatctgcaagaatactcctttcactcattccagcagttcacagatgaggtggatgttggggtaggccaactcagaaccctggatttctgcttaggtgatagcgggcttggtcatcctgccagcttccctgtaccaagaccatgaggatgatctctctagcactgacctggataactcaatcagtgccatagccaccaaggctcagggacagctttccctctcaaatacccctggagtagcttagctgcaaccacacctccagagccagcactactgtgctatccaggcaaggttcaggacactttctcctgagagtttcctctaataaggaacagagccagttctcctgctatcatgactctg

SEQ ID NO: 4536 - DNA, 1200 bp, mus musculus
tttcagtttctgtatactgaaacaagatttaataaataaagaacaagaagagagtgccaatagtgaagtacttcatggaatgaaaagaatcaaaggttgggaaggattcttccttctggccaatatcaagaaattcatacttcttgacttatatattgcaaagacagaccttatttctctttcctgtcttgtaagttcaagggtgaaaacgccaagaagctttgcacaaaaaagaaaaagcatgtagccaaaaaggatgacagtgctgatactggagctagtgccccgagcggcctaataaagccaaaaaaggtgactggacttttaaaagcccaaggaagagcccccattgcagccaaaaccctggcctggttagagaaattggcagatactatgtattccagaaaagccttgtactaaagggaatacttagctgttaatccaagtttgaaaagaataagaaaaagaaggttctcattactgtcataaaactagttggtggcatcaagaatggtggtgcccagttggtgaagattcaaaaaatgcctaggcattaccctactgaagacgtgcctcggaagctgctgagccatggcaaaaaaccttgggtcaatatgagagagggcttcatggcagtataactcctgagactgtactgatcatcttcacctggtgccacaggggcaagacagtagtttttctgaagcagctgggcagtggtttgctacttgagactggatctcttgccatcaaccaagttcctctgggcagaacacaccagatatttgccattgccacctctacaaaagttgataccagcaaggttaaaatccccaaacacttcaagaagaagtagctgttcaagcccaggcaccaggatggtaatatctttaacctggaggagaaataatgagattacagagcagcacaaggctgatcaaagaatactgtgggttggcagattttaagttccagggcttcccaagatctcagttctcctgacaaacaggatgtatcctcacaaactgattattctaaatcggtaacaacctaattaaacaacttcataagttcaaatgattttcacttgagaaaattaagtgtattttttgaaacatattttaattgtttttattttttctttttaattgttgtaacaacatttgttttcttaccatatcttatatttggtttgaaaat

SEQ ID NO: 4537 - DNA, 1000 bp, mus musculus
acttcacatttcatgtttaaattgctagcataaatctattcaaaaatatattgctggtcaaaaaaagatacaatgacaggtaaaataaggtcttttttaaaattttatttaatgtatttttttacactccagattttatttccctccaagtccaccctctggctgttcccaataccatacttccttcccaacccccttctccatgaggaagttcctaactccccacacccccatccccaccccaccagacctgcccactccctgaggcctccagtcttttgagggttaagtgcatcttctctagctgatccccgacctggcagtcctctgccatatatgtcttgggaacctcatatcagctggcgtgtgctgcctggttggtggttcaaggtctgagagatctccatgtacatgttaattgagactgctggtcctcttcctcagcttcttccagcttttccctaactcagccacaagggtcagctgcttctgtccattggttgggtgcaaatatttgcatctgactctttcagctgtttgttgcatctttcagagggaaatcatgataggtcactttttgtgagcatcctatagcctcagtaatagtgtcaggtcttggggcctccccttgagctggattcaactttaggcctgtcactggacctctttttcctcaggcaactctccatttccattcctgcagtactttgggacaggaactattacggatcagatttttgacttttttttttttttttttttgagactgtgttgtttgctgaggatgctcacaactttagaacctagtatgatgtcctctgttatagtatgtgagaacacataaagcaaaacaggaggtccccctgtgataaccttaaaaatgctgggcttaaggtacttggttcttcctgaggaagaccctgaaaaaggagacctgaagaaaatcattacaggcaacagtcatactaggcatactttaatgagatataaaactcattac

SEQ ID NO: 4538 - DNA, 1000 bp, mus musculus
agatcaagaaagcagccaactccacatattaaatggagtacatcaaatagggatgtacaccacctcattagttggtggtgggattgaaaatgatatacccactgtgcaaattcttaaaattgtgcatataattcctaaaatctactaatctactatgtaatccaactgaaccagtccttgggatatgactaaaggacttaacatcctatttccaaaacacttgttcagccatgttcattgctgaacccatactcctcaaaggcaaccaagaagtcatctcaattctgaagccctattccccaaatgcaagggcacccacattcataagagaagcattactataatttaagccacacatcaaaccccacacattaatactgaaagaattcaacaccccaccctcactaatgaacagatgatgtagaaaaatctaaaaataagaaataatgaaactagctgaattatgattcaaatggacctaacaaaaatctacagaagattctaccctagcacaaaagattataactacttctcggcacttcatgacaagttcttcaaaactgatgatgcacaagctcacaaagcaagcctcaacacatataagaagattgaaatagccacttgcaccttaacagattaccacaaattaaagctggacttcaacaacagaaacagcagaaagcctacaatctcgtagaaacagaaaaactctatactcaatcaccattgaagtaaaaaaaaaagtaaagatatcaaaaatattctgaaattcagtgaaaacgaaaacacaacatttgggttggagagatggctctgtcgttaagagcactgactgattttacagaggtcattagttcaattcctagcaaccacatggtggctcacaaccatctgtaatggggatctgacaccctcttctggtgtgcctgaagacaaaagtgtgcacacatacatgaaataaataaatcttaaaacaacaacaacaacaaaactactctaa

SEQ ID NO: 4539 - DNA, 1400 bp, mus musculus
atagtgtaatgactataggatttgaaaggtatatttaagagtttgaggatactgatgggagcaatgtaattgatagtgaagattctccattaatattacaatataaacatttaggcaaccacagatcaaaagaattgaaaactaagataagtattcaccttgctggcttcacagtacttaatttttactcttattattttatttttattaagaaattttatgcataatgaacattacagattgggttacatcataattttctcatttggttgatctgtagcataacttctataaagagtatatttgtaagctgtccacccagaaagccattgccggaacatctgcaggagacatcttgtttcccagatcctgctaagactagtctgcacaagtgagagtgtggactacagaagctagcagcttctgggtgaggcaggagccacagagcttctaaagcagaccccattactggctccagacatccaggcaccttccctgccagagaagaggggtccaccccgcccaggaaggctttgtcagagtatgcatgggagccatctcccttcccggatcccgccaagactagtctgcacaggtgagagtgtggactacagaagctaacagcttctgggaccggcccagtttcgggccttcatcttctgccaggaggcaaatcagaacaacagatattggtgcactttctctgcaagaggagagcttgcctgcagagagtgctccaaccactgaaactcaggagagagctagtctcccagatctgctggtagaggctaacagaatcatgaaaggaaaatctctaaccagagacaactataaaaagtgactccagtggttaccagatggtgaaaggcagacatagaatcttactaatagaaaccaagaccattcaccatcatcagagcccagcactcccacctcagatagtcctgggcacctcaacacgcccaaaaggctagacctgcatttaaaggcatatttcatgatgatggtagaggagatcaagaatgactttaataaatcacttaaagaaatacaggagaacattgctaaagagttacaagtccttaaagaaaaagaggaaaacacatccaaacagatgatggaaatgaacaaaaacatactagatctaaaaagggtaatggacacaataaagaaaaaccaaagtgagacagagctggatatagaaacactaggaaaaaaatctggaaccctagataagagcattagcaacagaatgcaagggatggaagagagaacatcaggtatagaagattccatagagaacatcggaaaaacaatcaaagacaaggaaaatgcaaaaagatcctaactcaaaacaaccagcaaatccaggacacaatgagaagaccaaacctatgaat

SEQ ID NO: 4540 - DNA, 1200 bp, mus musculus
ttgtgtccatgttccctatggaatctcttgcacctgagattctctcttccatctcttgtattctgttgctgatggtcgtatctatggttccttatttctttcctagggttactttcctcgggttactagagtttggttctgatggtgccaagtaaccttggtttctgttgcttctgttcttatgcttgcctcctgccatatgattatctcatgtgcttgatgccctcagtatatctgattggagcctatccttcctgtgatcctgtgcttccatgatcctgtgatgctgagattctgggtgtgtcagagttcttggcagtcaagcttcctctgagaccctgagatcttggtgtgaccaagctcctgggatgctggtatcctggaatcctaagatcctgggagtgttacagcccctagaagtggtacctccctggggactgacaggctgtctgctgtgtttgaaaccaaggtagaccaccaaaggccagaagtaaccagagcctctggttgggcaggtttcctgtgtccctgttcctgctgggaaaggcccctcatggttgttttgtaacagatgttgtgtctgactccccagtgatcttaaaatcctgggcatgctagagtgcttgcagtgtgaagaatcctctggggaccatgggacctcccactgagtttgtgcccaaggtggcccagggctagagccaactagaacaaaccccaggtgttggtcaggcaggtttcctgtgtctctgttcctgctggcacaggcccctcctggttgtttgggaacagatgtttacattctactcaccagtgatcttgagatcctgggtgtactagggcgcctgaggcatggagagtcctctggggactgtgggactgtctactgagctcctgcccaaggtagccaggggctggcctacaagatcttgtatatttgttttttaatggctcaaagaaaataaattcttgaatatttaattagaactaaactcctagttgtataatttatattgtgttaatagggcaagctcagttccttcagttttagaagtatatttttgcagatatatttttaaagagcacacatttccacaataatttaattggagtcaacttttgtaactcagtaccatctggaaataaaatataatggagatactttctgttttatcaccatggcactttctaccagaaaatagc

SEQ ID NO: 4541 - DNA, 1400 bp, mus musculus
agagtaagtcaaatttgcaaattttcaattacttcttttcacccaagtattctaatgttcagtttaagtatgattaccggtagaattacagatgcaaatatggtacacacaaagataatgatgatacaatattgcaaatacatgcatttaaaactcccatataaatgttgcttttatttaaagatgtaattgtctcctccgaggattactgctaaataaacatactctttctagctctttctgaactctatctggttggttcaattcagctgttctggcacaaactcctctccaagctgactgattcagtatggtttccctcagcttctcactgaattgctctgcttggccttaaactaactctaccaatttgttctaatcttctggctcccgcttattctactagtctgcactgaacttcaggaattcactaatgaattcaactctactgcactgtactcactgactgactcccaactcacttaactcccaatcaattctctcttcttattctgcttttaaatagttcctgcgagagatgggcctatcctatctctgtctcattttgccatatttttctctgatttgtcactttgcccctcaactatgagtttggacttatggctccaactgcatatttaacagaggatggccctgtcaggcatcaatgggaggagaggcccttgatcctatgaaagctcaatgtcatagtgtaggagaatgccagtgtggggaggcaggagtgagtgggtgagtgggtaggtggatggctgagtgggtgggtgggtgtgggaataccaccatagaagcagggggaacaggatgggatgggggtttatggtggggctgggaaagtgtataacatttgaaatgaaaataaagaaaatatcccccccaaaaagaaagaaaattttgcaattaaagatgtatacaaagggactctctgtattccagctagtggaatttaaggtgtgtagtgtgtctgtattgcagctggataacacagacttagctctttggatgtgattctttgccagagaagccatgctgttggattaaaattcctctacctgccagccaacaaaaaattttctgcctttatagtttctttccttatgcagaggtagactaccaagagaatattttacatatcacaaaaagttacagcacacaatgaatagaacacaaagaggctcttcttaaatcattctgatgagcagtgcagttctgtattttactttttatttcacaatgagtatgatttggtatttgaataaggttcaataatctcctaaaatttattcattaatttattttttgaatcaggtagttttgtatataagaatactcttatcttaactttgatgagtttgatcacagtatttaagaaaaataaaaac

SEQ ID NO: 4542 - DNA, 1000 bp, mus musculus
ttactaggcctacatacttcattcatattttgcagtaatggactcccacttcaacaagaaagagatggaaagcaagtagttaaaagaacacacatggtttgtactcactgataagtagatattagccccaaacctcataatacccacaatacaccccacaaactatatgaagcttaagaagaaggaagaccaaaatgtagattctttgatcttacataaaagggggaacaaaataatcacaggagatagagggaagggaggacctgagagaaaatgaagagggggagttataaaggagaggagtaagatcagatatggaaagggacaggagagaaggacagagggtcaggaaattggatagaaatatgtagcagtcgggaaaggggaactgggggtaaccactagaaagtcccaggtgctagggaagcaagggactcccaggacctaagggaatgatattagttgacatatccaagaaatgggagagccccacccatctcaaaaattttaacacagagctgttcctgtctaaggtaaatgcagggccaaaaataattacgcagagactgaaggaaaagccatccacagactgccttcctagggatccatcctatctgaagacaccaaaactccaccctattgctgattctaagaggtgcttgctgacaagagcctggtatggctgtccactgagatgtcctgccagcactcgcctgactaatagagatgcaggtacagccaaccatctgactgagcccagggaccctaaaggaagagctaggggaaggactgaaggagctgaagggaattgtaaccccatagaaagaacaatataaactaaccagaccgaccagagctcccagggactaaaccaccaaccaaagagtatatatagagggatctatggctccagaaacatatgaccttatctagaatcagtgggagggagggtccttggtcatgtggtggcttgatgccccagcataggttgatgctacaa

SEQ ID NO: 4543 - DNA, 1200 bp, mus musculus
gatttctggctttaaaattttcaggatagcaatgtgacaatcaatagacctccctctcaccccaccccccataaaaacgtgaataataaaaatatcccaagaaagaatataggaatctcattcagagggggaaactagtcattggaggtggatggaaagagggcactaggttagagaggaagcaatcatttgtagggagagagggtacaggagagggctgggagtgagtatagaaattggtgagagcatctctcctgtctagctggaggcctgggttgggggttttatacacaaagtctatggggttgaaagtagctgagattacttccagaggtggatatagaaactatctcctgtagccaggcaggacttccagaggaaggaggggataccaatccactcacaatacctttaacacaaacttgtcctgtctataatctgtgcagggataaagaaagactgagcaaagactgagggaaaaatccaaccaatgactgcctcaacttgagacccattcctagtgagagagccaacccctgacactattaatgttactctgctattcatacagacaggagcctagcataactgtgtcctgagaggcttcatccagcaacagatggaggcagatgcagagacacacagccaaacattagggaaatcttgtggaagagttggggatagaaatgaacaagctggaatggtcaagagcactacaagaagacctacagtcaactaacctgggaccatggaggctcacagagcctgggccaccaaccagggagcatgtagttgttggacctagtccctgcacatttgtagcaaatgtgccatttggtcttcatatgggttccctaaggagtggagtgtggtttgtctagatttctgtttgttgccattgtccttgactagactgtctggttgagcctcagtgggaaaggatttacctattcttgttgatactaaatgtcccagagggtggtaccaaaggggggggggtattcccttctctgaggagagcaggaggagacagtggggagagagaagagtgatgatgggacttgaaagaggaaggaggaggaaatggaataaaaatggaatgaattattgtaaacaaagtttctgtcagatagtcaatttttattctgaagttctgcctttctaagtgacctgctcttttactctttaaatttcttatac

SEQ ID NO: 4544 - DNA, 1000 bp, mus musculus
gctcctcccctataccactctaactgccaaaactacatttcccgcctttgtaactgtcacataggttgtctccagaccctcaataggaccctctccatattacactaattttaggcaaaatgtctgaatcaaatgccactaatctatgagcagagaaacccatcattttttccccacaaaactcctgagcataaaaactcaccaattctgaacaggaacatgtacacacacacacatacacacacacacacacacacacacacacacacacacacacacacacacacacacacactggaaatttctactctggaatcctcggccctcacaagaattgctattataaaggctggacctgctcagttcctggctgttatcttgtagcagaggcagccatctctgaatttgtcccccttattctggaccctcccaataaatcctttttatgagtttgttgcctggtgtgactcattagacaaaggcaagaacagaagaatggaagaagcaaaggagtggagcaggactcctcagctcagcctgggatatcttctcatgggagctaaaacacctctgttgaggaggtttccctctcagagctgcgtggttcctgggcatccatgtcttaggatacccttcaaatgcagtatgctcttccttcagagctatatgactgaacttcctagtctctagatacatttccatccaagtaggaagtccaacagcatgtgtatacacttgtagtagtcttgtattcatcctacccgtaagacatgtttaggttcaggttgtccaatatattttcagacttgtaaatcttctaaaattttttttcatttcaggatgtagccataactttgaattcttctctttccatgtaagctggatctcataagttatataataagcgattctggaaaaaaaataagtttgtggggtgcatgtttatgtgtgtggggggggtaagtggtatatgtgcatcacgagaatatgtttgagaatg

SEQ ID NO: 4545 - DNA, 1200 bp, mus musculus
ttaaaattttctgtttgtgattgttttctttccaaatttacatggaaaataagacgttaagttatcaggaaatggcgatgacacttaaaactgtcatagttttacaccctacctggggttcttgacatctacataaagaaagtgaagaaggattttgtagttcaacttggaaaataagcaatcctcccaaagaggaattactaaagtgccattgcttctattccagcagtatgtaatacgttaattctaaaaaaaattataagcaacaaaaggcaacatcctgaacccccattcttagttgaaaaagtttagtttttgtggccttggatgatgcttggtcacctgaagccctgaatttgtctttgtcctctcttttctgaattagcaagctttagtagtgtttataaaaagtgcattagttctattgacttaaaaatgaaggagaaatgaaggccaatttcagcatttctttcagtattgcccatttgttatatgcatcactgattttgttgttgttgttctgtttgtttttttttgttttgtatttgtttttgtttttgtttttgttttggggttttggtttttggttttttgtttttgggttttgggttttgggtttggggtttttttgtttcttgttttttgttttttgtttttgttttttttttgttttttgttttttttttttgtttgtttttgttttgttttgttttgttttttgttttcgagacagggtttctgtgtagccctggctgtcctggaactcactctgtagaccaggctagccttgaactcagaaatttgcctggcgctgcctcccaagagctgggattaagggcgtgtgtcatcactatctggctacatcactggttttaagctgaaaaaaaaggtcatgtagaatataaatatggtatggagctaaataaaaatgtttattaattttagttcttttgttttctttagaatcctggaaggtattagcaaggtgaagtttctttatatcatcatctcatttgaagatttaatataagttatacatattctattacaggagaacatgcaattgaattacattaaatacaaatcactagattgtctcctttaaggtgaataaaaactctcccttaaagaacaaatttaaaaatataataggctccttagaggagacacagaacacaattgagttttaaaaatggagaa

SEQ ID NO: 4546 - DNA, 1000 bp, mus musculus
ggaaaaggtagacgggatcaggtgtagagagagctgagcagagtaaatggaaatcagcagttggggacaaaggaaacatcgctctaagacctggcatggggaggctccagagagtctatgatggtgagtctagttgagacccctagcagtgggggatatggaacctgaagtggccagctcctgtagtcaggcatgggtaagaacaacacatccatgagaccttcaacctcaaatttgttctgcctacaaaaagtgcaaggacaaagatgtcctagatatctttgtgagaatagccaaccaatgactggcccaacatgatgcatatcctattggcaagaatcaataaatgacactatgaaagacactgttatacatgcagacaagcacctatcataactgtcttctgagaggttccaccctgcagctgaagtaaacaaaaggagatagccatagctaaacaatagatggagcttggagaattttgtggaagagttgggggaaggttttaagtacatggaggtgtgtgtgtgtgtgtggggggggggagataggaattctataagatgactaacagaatcaaataacctgaatcctttgaggttcccagagatggtaccactagccaaagagcataaatgggctggacctaagtaagtcccaacacacatgcaccagatggatagcttggttttcatgtgggtaccccaacaactagagcaagagctaaccttgactcagttgccttcctgtgcattctgttctgctaactgggcttccttgtcagtgggtcagtgggacaggatgtgcctagtcctgcagtgactaagtgtgccagagtaggttgagaaaggggtctggtaagggctgagtgaggaggggaaaagatcagggtgtaaaatgaataaataaatgaataaatagatagatagatagatagatagatagatagatagatagatagatagatagatagatagatagacagatagacagacagata

SEQ ID NO: 4547 - DNA, 1400 bp, mus musculus
ttggattagaggaaaatgaatgaccacaaaatcaatcaatcaggtatgaatgatatgttaatgctgcactgggcacatgtgcaagagaaagttcatattaaagccaagatatttatgtattgtactacaatcataatgataaatccaccatattaattataaatcaaaatactgtttgtaacacatgcccaagaatcccttgatacattatcattattcttactgctaaatagtttattttctcctttcttcatgatactgccttgagatcatcatcatcactattctgtattcccaagggaacagtttcttttcttctaaatcttgtttctaaaatccccaatggcaattttgtagagaatcatttaaatgaagttgtgtaggagtgggggatagggaactgggggtagccactaaaaagtcccagatgccaaggcccgaagaggttcccaggatccaaaagggatgacattagctgaaatacccaacaaggatacagaacctctagagacaatatgccgtggataggcacagctgccggttgagtgatgggccacccacccatctcaaaaatattaatctagaattgctcccatcaaaagaaaatgcaggggacaaagagtggagcagagacttaaggaaagggcatccagagactgccccacctagggatccatcccatctgcagacaccaaacacagacactattgctgatccctagaagtgcttgctgataggactctggtctaggtgtctcctgagagactctgccagaacctaaccaattcaaatgcagatgctcatagacaaccatcagactgagcatgcagacaccaatggaagagttaggggaaggactaaaggggctgaaggggtttgcaaccctataagaagaataacaatatcaatcaaccagaccaacttcccccaaagctcccaggaactaaaccatcaaccaaagagtatacatggagggactcatggctccacctgcatatggaacacaggattgctttatctggcatcaattcgaggggagtcccttggtcctttggaggctcaatcactcagtgtagggtaatgctagggcactgagatgggagtgggtgagtggttggggagcactctcataggggcagagtgcggaggaataaaggtttaggaggggaaattgagaaaaggataacatttgaaatgtaaataaataaaataagcaagaaaaaaactgaaaataaataaaggcattaaagcattaaatataacgaggtttcacagatatatcttttgatgaatgttgtggattcttgataagtttttcttttttttttctttttttttaattaggtattttcctcatttacattttcaatgctatcccaaaggtcgcccatacccacccc

SEQ ID NO: 4548 - DNA, 1200 bp, mus musculus
ttgattggttttctctatggtgccagttttgagagcattgagtaattcctgatgcccttccttaaatacaactttaaacttggctaacatggcatgtctttcagctttgcacactaaataggaatatacaattagcacctattttatttgtctatattaaaagaaacacctgcatcatgtttacaacactgcctacaaattaggcataggataaaaaataaaaataaaagtgaaatgaaatagagagagtagatatttcattgttcataattttcacattttaaagctcaaatcaatttatttatttatttttattattttatttatttacattctagtcattgccctcagcccccatcccacacttcctcatcccattcctccttcctcttgcctctgagatggtgctcccctaaccaggcctccatcatccttaggacattaagtctctcaaggattaagcacatctcccactgaagcctgaccaagcagacctctgctacatttgtgccaggggattcaaaccagccattgtatgctcctggttggtgcctcagtctctgggagctccctggggtctaggttagttgacactgttggtcttcctgtggggtagctctccccttcagcttcttcaattctttccctaactcaacagtaggaatctgcaacttcagttcaatggttgggtgcaaatatctgcttctgtcttagtcagctgctggtagggcccactgagtacagccatgccaagctcctgtctgtaagcacatcgtagtaccagtaaaagcatcagtccttagtgtcccaccccccatatagatcccaagttggtctgatcattggaagcctttctttcagtctcctctccatttttgtccctgctgttcctttagacatcaacagttctgagtcagaaattttgactgtgggatagtaaccctgtccttccacttgaggccctatctatctactacaggtggactcttccagtgcctgctccctaacatgggcaattttggctcggtcaccctcattgagtccttagagtctctcaccttcagggtctctgatttaaaagcattaactcttcaatagagtccttgagagaaaccatcttctttgggtggtctatgacactcacttcaacaatgtgtatttattttctcctatatgtttgattatctctcttctctgggt

SEQ ID NO: 4549 - DNA, 1600 bp, mus musculus
ttttagaattgaaaactctactgtgttttatatgagaagtaagaaagcacttgctgagatgcatatttcattcactttttttcttttgtaacatcatttcattctttgtactagacaaagcattctattttctatttttagttaaaatgcacagttattatttttcattattttaaactggcataaataaaagctacattttctcagaacataactgaaaaacttatccgtggcttttcattcactcctgtgagtgagaaaaagcaattcataaaaattttgcagaagtaccacaaggagatatttcactttcttagaaatattttaaataatgtttctgttcatgtcttcctcatttttaaaggagttctaatttttgttaatcatacatttaataaaagtagaatttcatcacttctttccttctttcttcccccagcctcatgattactcttattttgataatcacatacctatatacttatatgtgcacaaatatataaatacaaccttctgagtcagatttgtttgtgtgaatatagtttgggtgctgatcctttgaattagacaacaaataatggcttaaccatcatgtggggcccaaaaattggaacaggaacaatcccaaaagttgttgcataaacatggtgtatgctcttctagctgggctgccttgtctggactcattgatagaggtgcctaacctcacagcgacttgaaacgccagggtggggagatatgcaggggggacctctcccaactcagaagtgggaggggtgaccaggaggaagataatgattgggatgtaaagtggataattaaaaaataaatattaaataagaaattaaactatgagcactattgtttactattgctttatcaagatggaataagatatacacatacacacacaatcatgtgcatgcatacatgaataaacaaatgcacatgcacttatctgcacacacacattcatgtgcacatagtcactcaggcacaatcaaagacacatatgcaatacactcattgtacccacaaattaatgtaaaatacatatatggacatgcacacgtacatatacatacataggccctcctttgaacaaagagaggtcttgattattgactttcatgaccattggatactttcacataatatttttaaccaaggaaatgctaactgaaaatcttatctccggagttctgaagatactatagtttttctttacatactagcctttatcccagaaagtttcaggatattttacatctggcaaaattgcttagcttagttccatttacctttctgactaccaatcctgccgttttttcctattacattatatatcaggattgctccacaaatattagtggatgactcctatgaggctcaaaatcatcctgaatggcaattaaaataattctgcaccattagcaaaaagctggattataagaattcttttacaggacaatgaaaatagtcctacttggtgaattttatagaacaagggtgcagccagcacaaattcttaataatactatcaaaaccatgtctgctaagagattctgaatccagtcaatttgattatgtagatcagttc

SEQ ID NO: 4550 - DNA, 1000 bp, mus musculus
gtcttggtttctgtcagtaagcttcttacatctgcctttcaccatctggtaatctctggagtcagttgttatagttgtctctggttagtgtttgttcctctggtgattctgttatcctctatcagcagacctgggagactagctccctcctgagtttcagtggttagagcactgtctgcaggcaagctctcctcttgcagggaagctgcacagatatctggccttcagaccttcctggtggcctgtcccagaagttgttagcctctgtagtccacactctcacctgtgcagaccagtctcagagggatctgggaaccaagatggctcccccaggtgctttggcaaagtcctcccgggcgaggtggacacctctcctctgtcagggaaggtgcctggatgtctgatgcctgaaacagggtctgactcagaagttctgtggctcttgcctgtcccagaagctgttagcttctgtactccacactctcacctgtgcagactagtcttggcgggatccgggaaacaagatgactcccccaggtgctccagccaggatggccgtttttactatgttaattctgccaatccatgagcatgagagatctctccagctgacccctgttgttgaattggagaaggatgaaagaagctgaggagaagggtgatcctataggaggaccagcagtctcaattaatctggatgcctgagatctctcaaagatggaaccactaaacagacagcatacaccagattatatgaggcccccaacacacatatagtagagggctgctgggtcagtgttcattcagagatgatgcacctaaccttcaaaatactggaggccccaggtagtttagaggtcaggtggcataggggactagggacatccacatggagacagggcagttgggaagaggtataggatatggaatttaaatttttaattaaaatttattaagcaaatttcttttcttgatagtatcagatgaatattgatagact

SEQ ID NO: 4551 - DNA, 1200 bp, mus musculus
gctttaaaattctcaacagagagtcttatcatacctaatttaatatatgaaccttttagcatgaaatattcttacaccacatagagaaaatttcacaaaagtgacagtgaggaaagaggctatccaacaaggacagagcagtatatccttaatgggttgctactctttttttgaaaaactcaacacaataaaccaaacctctcatttgattgcaagaatttgagcagtgcctaagctttcagcacaaagagcaactggaagaggaaaatagacgttttggcactgattgtgtgtcagtattttaaccatattggatatgggccaagagagtatatttccgttataattcagtaaggtaaaatgtcaggtccactgcaacccttcctgatctgactcatcttcagataaaatagtataaaaaagtcaagtggatattttgcactttaaagtttaactcatagtcatatgcattccaatgacaagaatcgtaactatggagtagtaaaatgtaacttcaacaacaggatttctattttgacaaaatcacatttgaaaatcccccaatcttatgtccttccctatatacaatttttatcctatttctcagaggcagaattcttgagaagatgacttccattgttatttctatattcccacttgtcatttattacacccaattacacttgcgtcattatgcattgagtaagctctcacaaattcaccatcaggaagaaatactgccttctgttccactcgagccccagggtaccttgccagctgagtcgccctacacccgcaagggcccacacaggattccccacgggatcctaagacctctggtgagcagaacacagcattccaatccaatcacgcggaacctgagactgcagtaaatagggaagcagactaccgaggcctgacctggggcacagccccttccgctccactcgagccccggggtaccttgccagtggagtcgcccgacacccgcaagagcccacacaggattccacaagggatcctaagacctctagtgagtggaacacaacttctgccaggagtccggttcgaacaccagatatctgggtaccttccctgcaagaagagagcttgcctgcagagaatactctgcccactgaaactaaggagagagctaccctctcaggtctgcttatagaggctaacagagtcacctgaaga

SEQ ID NO: 4552 - DNA, 1200 bp, mus musculus
gaagacactggtcatgcttttatatgagaatgaaccatactatcaagccagaaagaatcacaggaaaccacttgcaatataacaagactgttgaaagtagtatgttgcaataaatctgagattagaggcagttgcttaggagcaaaggctaccatgtacaattctatcactatgcctgcactaacaagttataaatgttagtaaattggaaatataaatgcaactgctatacagagaaccatgcatgctatctagtctattgttttcgcatatgtgtcttagtgagggtttctattcctgcacaaatatcatgaccacaaagcaaattggggagacaacttttctacactgctgtttaccaccaaacggaatcaggactagaactcaagcaggtcaggaatcaggagctgatgcagaggccatggagggatgtttcttactggcttgcttcccctggcttgctcagcttgctttcttatagaacccaagactaccagcctagagatggtaccacccacaaggggccctaccccttggtcactaattgagaaaatgccttacagctggatctcatagaggcatttccccaactgaagctcctttctctgtgataactccagtctgcatcaagttgacacacaaaaccagccagtacaatatttttgctttttttgttgttgttttatttttgttttgtttttcaagtcaggatttctctgtacagccctggctgtcctggaactcactctgtagtccaggctgaccttgaactcaaaaatctgcctacctctgcctcccaagtcctggctgaccttatagtattttgttgaaaagtctgcaagaacactgtgatctgtccttctttcttgtcctcattgtttgcttgatccgtctctttagctttattgtatgcatgtattatggcctgagttatattttgtcacaatgcattcacttacgtattcatgtgatatgcattcaatgtgatggtagctgatttcaaaacatgtcaaaagtatgcccttcactgtatagattatatagtgagttctagatgaatttcagacatttgcaatttttctccagaaaaaaaaatataattataataataaaataaagccttgtattttatgaggagacaaatttcattgattaggattttcactctaatgaataacctaataacttttgaagagccca

SEQ ID NO: 4553 - DNA, 1000 bp, mus musculus
tgatcaccaagattgattaacaagccttcatcacagctgagagcaaagacaaataggtagttgcctaccttggactgcatatgtgaactgcacaagcccctaagagctactttctgctcctttggccttcatacatacaaaatatcactgcatcaatacagattatttaatttcaccacacaatacattaggctaagtttacaaaatatatgtttggaattaattattttaaataaggaaaccttcctacccgtaacagcgactgggattcatccttggtcttgctctctccggaggcaggatactgctgggtaagagatgcagacttctcgctgccagcaggagccccttgcaggaagcccttggtatctactgccaagccatacataggtcgtgccaggtgggcagcttcaacattggggctgtccctcagagtctttgtctgctcttgggagctggacacaggcgtcaagacccctaagcttgcttgagtgtaggatggactaccccgtaggatgtctgcccctctccaagccacaccacgaaggtcatcagttgaactctcagtccagattttatctttcagcccttccttgtcatcaagtttctctctcttgactatgctctcgggaactgtttctcccattttagagtctgggtttagcagactgtagaccttgaggtcaattttgggctcttctttgatggtgggtatggcatggccaccctcttcgccattagcagtagtgatttcctgttcctggcagtgaactgtgttgaagtgctccaatagtgactgagtgtcagcagctgtgaaactgcactgacgacatttatagcagctgtgtgctctcctggaaggaagaaaagagtcaatgggaagtcagaattttgaaaggaatgctctgtgctcaaatagtcctcatgcacctgacttctctcatgcaatgaggtagaagttgaaagaaatgcaatattgtcaacactcggaaattaaaat

SEQ ID NO: 4554 - DNA, 1400 bp, mus musculus
tagagtggagtagcaatgagatacatccatcttttctatagggcctaaaagctatgtgtctggccttgggagctgacactgaacatgaaaatatgaattcacatttcatcacgaatcactttttttctcctcctggaaatcacaagagaaaacacaaacctgtacatcataggttccgtttagtaaagcaggccgtgaagagctgatatcctgcagcacgccagaaagcacagaacggttgaccttctggaagtctttggaatggctgaactgcaccatgttatgaagggccaagattttgctgtccagctcagcatcctgcctggtgcgattatgcagtcctaagtgatactttcggaagtgcttaatcagatctgtggggtcattgccatagtaaccgtatccacagatattgcatttaaagtcctgaagctctggagacagaggtgccgggtctgggttgtcattcaccagtaagtcacctttgggtttactcagtctgacacccccatctgaaggcacttgtgggttttttgaggccacggaaactggactcaaaccttgacaattggcttgaccactctgcactggccctgtttcctcagtggcctttggtgacattttatgctcttcctttgtctccaatgaatcccctgatggggtgcaggccatatcttgagggtcatctgcctctgctctttgaggagacttcaagggctcgcagactcccccagcagctggagatgagaaagccaacatatttctgtctgttacctcatcatgtgggaaggagacaaggctccctcccttactggggctttcataattgaagccagccttctcactcaggcctgagatttgcaagtccttcttaccgctggaagatggctcttggccatgcgtgctgtgttcctccttcgagttcaactctgcaacatcactctgatctgtattttctgacatctgatctgcagacaattctttgttcttcccagataccttgctctctgtagctgttggctccagggtttgaccctcgccttcactagcaacgtttctcagaggggggttctttttccggaccatatctgtgaacacatagggaaaataaaggcacatggttattggaagattatgcacaggtaacccaatctaggatatattacagtctattcaaggtcttccaaggtgcacaataaaatagttcctctgggggcagggagggagattgcttcaaatacgaaaacaaaaggaggcaatcagacaaaagcaaatctttgatatttgaaacagtttaatgtaaaagctggctggtatatttttttaaggtaggctatgaatattaaaaatctcatagccataatcttaatcattgccacccatgttatttttgactaatt

SEQ ID NO: 4555 - DNA, 1200 bp, mus musculus
aaatagaacatacatctggcctgtctacagtaagggccttgtgttgtcttacacggtacaattctgcttttctccaggagaaaaatctagtcaactagttcaaaggagtgagaaaatatgtttgtaaattgtgcttgtgactgacattgtgaacccctggcatgctaaaacctctgaaagttcagtgacaaaattccaagatgtgtgatggctgctgaggcaaacagggtgaaattatgcaggggaaaatgcacttcgtttcttccaaaatgcatggtgcaaagaggaagggagcacagatcgtgagaaacctgtatcaggccttttcagttgaggtaagtgctaagtcattatcaatattctagggatttactgcaggtgggaaaatgtgcatcagtttgcaaagaacatgttaggatctgctgaccagttccacaataactcaatgtgctaggtcaaagcaatggagggaagggagttgccggatttcagcagattttgaggccctgggctctgtattgtttttttttttttttttttaaagcttgctgaagcaggaatatcctaaacagcatcctgtgtgagtcaggtccccggctacaagtgatgccgccacgttaccacatagttgtggttctccatgctgtttgcttgagtgggcaatattttcttttccattctgtttgtggtctccatacttgtgactatcagtctcttgtctgccttctttgagcttggggttttctattttctgtagtttgtagtaccttaaccttctttaactggttggtagccactgtttagctttagttctacccatctgttggagctttctagcttttctaacccactgttgccttggggccaggttgtagctctttcccgtaatgattagatgctgtaggtatcaattttaaaaagttttaagtaagcaatctctccaacaaaatgcactttaatcttctaagaacctgtaagaaatggagctcaaccctaaggacaacttacagtgaagttgtgcattaagatttatggaaaacatgtgctgactttctcagtaagtgcttcttgcatgcctcgagttaagtcccatgctagctcacgaaagaagtgtagtcaagagttcttactgatctcaagcaatgtcttacactagaattaacacaacatgtgctttctttctctagtccagtttactag

SEQ ID NO: 4556 - DNA, 1200 bp, mus musculus
tgagttctcctagtatgctttcattctcttgatttcactgtgcttttattctctgtctaatttccagagtctttgttaggttccaactgagaatgcaaaacacaaaggggataggtttggcattaaacaagaaaggttctgttatctcagaagcatttgccatatggactcttaatagaggcagacacgggaatgctttcttagaagactccagaatgtttccagagacacaggcatgcaaattaaaacttctgcagccaccggattgatttactgtatgcatttgccagaggttttaccagaatactctgcaatatgaattataaagtgttttttaatagctagaacaagtaggacattatgagcctcgttgttttgtgttatatacaccaaaaagagtaaaatagaggcaaatagatgtgttttttatgtacagtaatttatgtcccttgtacccccttgcattgatttaattgcacaacatagttggaaacaggagagagggctttaaactaaagaacataattccaaaaagagatggagactagtgacactccctccccccaaccccggcctgaggtacttcagtagcattctgggttggcacaatgatgcaaaaggtcagagattcatagagctctcacggttgattctgaatctggtgtgtctgaggctggcaggtttcctatgcactgtgagatggcagtgcggcatcctgagttgccaaagtcagcagtggcttctggactggtattacagacaagaagaggagcaaggcatccgtggatgctccaaagtatgtcgaggctttaatggaacattgccgtgtgatgagtcccaggaagttaattgaatcacagttcgaaaaatgtctaccccagcatctgttgggcctgagaaccaagcagatagtcagctgatcagaggggaaagggtgacttctcttgctgttctcacccacctgcctggcatcccctattgatatctcatactccaagctgtcacctgcacgatcacttatacacaaggatttggagtttgccatgtaacttgcttattccctgagtattcatgggatatcataaactaacatttgttgatcggcaaaaatgttgggtagtgaattatggattttgcaagtttgaataagcaattaatttataactcaatgtacttgaaaatctgtgtatacatcatatc

SEQ ID NO: 4557 - DNA, 1200 bp, mus musculus
tgtacttctttgttgcagggggcatagttttgtctattccatcttctccagaaacaagtggaaaattagagcccattctgagtccactgggggaacatattacatgttttcatatctgtatgtagggttatggaatcctgcatccactctgccacagggttcagcctctcagggaggcaggatgtcttgggatgttgaccgtggttaccctacgctgttgctgggagagtgttgtgtcataaggaagccctgggacaccactccagggttggggaagtgcagtctgaggtgcaggatcactggagctgattcggggtccctaggcctttgtcaaagccagggccatctggttctcaggttctccgacacccaggctccaatgggagcctcagaacagctaagaatggagtagggggccccgcaggctgtatctaccctgtggctaggggtaaaggggaagctctggctgttcccaagtggggagttcttggctcagtgaggggtagtcttggtatcagccatgtctggaagcacagagaggccttctaccagagattagatggcagctctacaggtgaaggccttctccatggctccccgcatcggatcccattgaaaagaggcagttcatggttttaaggcatttattgtcatggtgaaaagtggatgaataaaactgtaccccacttctcaggatggacctgagattaaatacccttttcagagaggagtatctgggaaggagagtttattggctaagtcctccaggcctttaggtacctcattaaaatggagatctgtcttgagcctatgtgaccacaggtcacatcctctacctgtggagtggcttgggggcattgccctttaaggactggaggccacaaatctggggtctggtgccctacctacctcccttcagggtcaccgtggtttctagccttagctcaactgagaacaagtctacctttcacagtcccacatctgtatataacaatgataaagaaaacaaactgtaacaagtctggttatttgaaatgtgacaagaaggaaattctagcactgtgtatgtaggcattcttttttcctttcttttccctttggtgtggaccaggattctgatcccagagttttaggactgaagaattaacatctaagtctctactttgatgactctgaagaattagtctcatcaggagacaa

SEQ ID NO: 4558 - DNA, 1200 bp, mus musculus
agttgtatgctgctcaagggagctgaagctatgaactgccaaatattctcaacataccgtcagttcatgggtctcaatgtgatgtcctctccccagggctaaaagcctgttcttccaacctcattatcctgcacatgcgtgctattggaaaattcaggttcttgtggctggattaaaaactgaagagaagaaaggggcgtggcgtatgtgggaaacatgctccctgccaagtcttccagcccagcctgccctatgggaccattaccacacacaacgtaggcactgaggacgtagctccaaagtagtaagaagtctacactagaatacttagcacaactcactcagcttaagatatctggccactgatgtgagttagctttgcttcccaaccacagagtggactgctgtcatgtcagacccacctactgtcgcatcaggtggggaagacacttagcagtgaggcatgaacaggcatttagggatacaggcagagagccctctatggcataccagagaaaaacccttccttccagactgatagtcacgaatgccattttcttgttcgttgagtgtaaatctttttctttctacccagaagctccagcgcccagctgaacatccctactttcccatgagcggagcaagccgaaaagattgacgtagcttttgcaaacatgatcagcttaggcgctcaccaccatcagcaaatggaacatgaagttaattgcttcaccagtggaagagtcgcttcgctggcgttcttcatgggcagaccttggtctgcttcatgcactgtgaggctcagcagaaattaccggcacttacatgtcaggaggacttgtttctgggagaaatttttctcggtgtgccattaataatttatgaataggccaatacataaaaccacactgtacaaggcactatgtaagcagcataaacagaacgaaactggtcaataaaaggaaaaggaaaagaaaatattgaaatcaaagtaggtaatatgtgaaatatagacattatcttgtatgtattataaataatcagaaaataaagaaaaatcatgtaggattacgcaaccacaagtagcacgtgaactctttttttttgttttgttttgttttgttatctgcttgctgtatagcagatgggacctggggatgttaatctagctaaaaagatttttaaaattagtgtttatgg

SEQ ID NO: 4559 - DNA, 1400 bp, mus musculus
gtatgtacatgtgatgcaattttgaatgatttaaagtgcatgatattttcaaaagtttatacttaatactgagcgcaaaattctaagtgaattacactgtagtccgtgagaccactctctatactactgaattttctgccatccttgagatttaccccattaataaataaaagcagccatcaaacgatgtagtcaaatttgatggtaagtttggaagtaggaaagagaccaggaatgaagattcatagcagcagcagaggacatgaaacacgttagcatagaaaggctctgagattagagttcggtgttaattacagagctttgttactttgccttagaaaagaacatgagagtttagtttaagcttcatgacaatatttgtgtttgggtaaaactaatagaacagatttcagtagagtcctaagtggactaattttgataaagtaccaggaccagccactgttagcatatgcacaatgtacgtatacagacagaagcaaagtcaatagataattttatattatagacgtttgtactatgtccatgcaaggcttcacaacaagcaaaacattgagggtcattagagcctctctcaacagaacatggagaattgttttagaaagtctcattgtatttcaagggcaggagctctgttagtgtgatggcaaatcgtgtccaggcatcgaaccacatccatgctgtgggaaactttgcatctacaaacaagaattaagtgaggttcgcttaggtaggcagtagtacagtgttttcatttctgaggccagtgatttcggagactgaccttagctcgcatatgccatgccagatttgtgtgggacgacttcggtttgattctccgagtttctttccctgatcaccaaacacagtgtagtgacctgatgaattgtgagcggctttctaatgcaagatttctgatttgtctctgctctagaattctaaagagtcttgtcttctgtgacgacaaagcagtattgcaaaagcctggattttgactcatagtaaggccaagttcaagtgtgcagaacacggtcttgtagcctgctcatctgtcataagaggttacgttattgtttatcacaagtttacattctgttttcaaagagctatttcctgcatggagattgggtttcttattccttttgaatctaaggatggctatgcggtcttaccttttaagacttaatgtggataaaaagaatatatgtgcctttaaaaatgaacattctatatttgtcatatctctttcctattatgttaaccatagatatgacttaccatcagcttttgtcctggatgtaacaaaattttaagattgttaatggtcacatatatcatggcaagaattaaatctgttctgagtcaatgtaaatttgttacca

SEQ ID NO: 4560 - DNA, 1000 bp, mus musculus
attccacagctgccacaacttgggactttctatcagtccatgctggtagttttatgccaagttgacacaagctagagttgttttggaagaggagacctctattgaaactatatcttcagtaaactgagtacattttcttaatgggagactgatctgggatggcccagttcactgtgggtgatgccacccctggtctggtgatgctgagtgctatgagaaagcaagctgagaaatccatatggagcaagccagttaatagcagtcctccatggcctctgcatcagctcctccctccatgttccttccctgcttgagttctggccctgaattcctttgatgatgtactgtgctttgaattgcacactgaaataaagccgttccaccccaaattgtttggggctgttgtgttttaccaaggcaatagaaacccaaactaagacacagactatgataaataaatgtttccagtatctcataacagtgccctaaataacaatcagttacctaataaaaacacaaactctcatttaactcaaatgatagtaaacgagactgtcagaaatttttaaagagaatgaagctaaggaatattgacttgaggaaattttctattagaatgatcacctaagacacaaatggtagcacaagccagcaattcctgcactcaagaaactaagaaaagaaggtcacatgttcaaggtcagcctgggctatgtatcaagtttatgatcaatttggagttaaatagtgagtcccctgcctcataaaaccagagctggcgatggaattcagtggcaaagcacttgcctagcatgtgtaatgccctgcaagccatctccagctgtaaaggtagcttttatttgcctgatttaattgtctccaagacttactgcctccatctgataacctaagactagtcctggaagcttctagctttcatacaatctaatctaagcctagaatgtttttcagcctctgaaagttgctgctcaatacactc

SEQ ID NO: 4561 - DNA, 1200 bp, mus musculus
cccttccccatccttccctcctctacatctctgacaagggtaaggtcccctctgggtactacccagacagctcaagtccctgcagaactaggtacattctctcccactaaggccagccaagacagcccagtttggggaacaggatccacagactgtcaaaagatctaagataagcccctgctccagttgtttgggacccacatggaaaccaagctgcacatctgctccatatgagcacaggacctgggtccagcccttgtaagttctttggttggtggttcagtctctgggagcacccaaaggtgcaggttagttgactctgttggtcttcttgtggagtccctatcccatctgagttcatcagtccttccaactcttccacaagacttcccaagttctgtctaatgtttggctttgggtctctgcatctgtttcagtcatctgtgtggagcctctcagaggacagttacactaggctcctgtctgcaagcataataagagtatcattaagagtatcagggattggctcttgcttatgggatgaatctcaagttgggccagtaatttgtgggccattccctcagtccctacaacatctttgtccctatacttcttgtaggcaggacaaactttgggttgaaggttctgtggttgggttggtgtttttatccctccattgcaagtcttcctgactacaggaggtagccacttcaggttccaaatcctccactgctaggagcctcaactagagtcaccctcataaattccctagagcccccatcccagatctctggcatgtcctagagatgccagccccccttcccccttatgatttctattctctcttggccctctctccctacctctggtcctcccccttccacttcccatcccttttcccacccaggtcttcctccatccaactctgatgacaatttgattcccattctgagtgaggttcaagcatcctctctgggcccctccttgttacttagcttctttgggtctgtatattgtagcactggtgggaaggcaaacttatccaaccactctggaaatcaatttgacaatttttcagaaaactggggatagttctacctcaagacccagctatatcaactcctgcatatataaccaaaagatgctccatcagaccacaaggacacttgctcaactttgttcatagcagttttattcata

SEQ ID NO: 4562 - DNA, 1000 bp, mus musculus
gaggtgggacacgggagttttggctgcacttactcaatgccaggcaggttggctatgtgaaactgtgggacaccgttccggggttagaggagtgcaatcccggggaccactggagttggctcaggcatccctgggccttcagggaggctgggaccatctggttctcaggctcttgaggacccaggtatcgctgggagccttgaaagagctgagattggagtgcccccccgcccccactcctggagggctggatctagcctggtgccaaagggaaaaagaagggagagctctggctgggtcccttggggagggtccttggcttattcagcgggtcttggcttgatggaggccatggctaggagtgccgagaggccttctgtgggagactaggtggccagctctttaggcaaaggcctgttccattgctccccatggcggatccctatgaaaaaagacactccgtgtttttaaggcatttattgtcatggtggagagagtggcaatgagtaaaatcgtaccccactttctcagggtgggcctgaggttaaataccttttgcagggatgagtttctgggaaggggagtttattggctaagcctccaggcctttaggtgcctcattattaaaatggagatatgtcttgaggctacgtgatctgtggtcatgtcctccacctgtggaggggattggggtgttgcccttatgtgactgatggctacaaacctatggaaagctgtggcctggtgtcaggagcctagtgtccaagagagtggaaaaatacctaccatccctgaagggttgctgggatttcaagcctgtgctcggccagaaccaagcttcctttcacagccctccagtctctcattagcctggagctccttatatagtctagagagttatccctatctctgccacaccaggtcaagcattacaataaatactaaatccccaagcctaacttttatgcatgtgttctgggtctgtcactgaggttctccc

SEQ ID NO: 4563 - DNA, 1000 bp, mus musculus
tatctggtgtttgaacctgcctcctggcagaagttgtgatcccctcacagaggtcttaagatcctgtggagggtcctgtgtataccttacaaatgtctgcagactccatgcccaaggtactcctgtgctggtgtggacaggaagggacttgtgcccgtgatcaagcagggttttctgcttccctaattaatgcagtctcaggtccctcgtgattggattggagcagcagctgtgttccactcaccagaggccttaagatccagtggcagctgggtagctggcgggtgtcagctgactccaccccctagctacccaggtgatggccagacaccggaagggccctttgtgatttctttattgtttctacttccatttttagaccatggatggttttgttcaattccttctcctttttggttgtgttttcctgtaattctttaagggatttttctgtttcctctttaagggcttctagctgtttatctttttctcctgtatttatttaagggagttatttatgcccttcttaaatttctctatcatcatcatgatatgtgattttaaatccaaatcttgctttctggtgtgttggggtatccaggacttgctgttgtggtagaaccgggttctgatgatgccatgtagccttggtttctgttggtaaagttctttcacttgccttttgccatctggttatttctggtgttagttggtcttgctgtctctggcttgagcttttccctcctgtggacctgtaagcctgtgtcagcactcctgggagaccagctctcccatggcaggacccatgcacagagggctgatgaacagccccagctcctgggtgtagacggacgccagaaggaccctgtcccagctgctcctgagccctgtgttctcctggctggtcccaccttagacagtcaccggatttaaaaaaaaaaaaaaaaacaaaaacctgcatctccttatctggcttccttaatttgccctcatgagtctt

SEQ ID NO: 4564 - DNA, 1200 bp, mus musculus
gactaattacatggtcaattttggagaagctaccatgagctgctaagaagaaagtatattcttttgctttaggataaaatgttctataaatagctgttagattcatttggttcataacttctgttagtttcactacatggctcacgtgtttacaacacatccaggattgttgctgtccatacctgagaacagagaagcccatgtagatatagttaggtgattgcattctcaaggaaaaatttacatgaaatatttgagtatgagatccaacacagaataaagttctcgatgcaaggtctcaatgaaaaacattcttcagctgagccaagaacaggggcaagaggtgttcgatgatgttgtctttgcccagaatgggagagaggcccatgatgactgaaaccagtgctgacttgacatgttggttggcatctgacacaagctccttgatgcagggcaagatttgggtcatgatcacattctcccggcagtcagctgagagattttcacagacctctttgaccttgtgggaggctgtggccctcacctcagcctcattgtccttcatcaccaagcacatgctgctcacagttcttcgtatggctggggagccagtcgtcaatgtctgcttcaatgtggccaaatcactacagaagataggacccattcttgataacagcaccctacagagtgaagtcaagcccatcctggagcagctgactcaggaccaggatgtggatgtcaagtactttgtccagaaggctctgactgttctctctcttgcctgatgcaagaagaagcagcattgccggcctctggtgtctaccctccaacacctacaaagttactggggggggggggcaaatgactgtcacttcctgtgcatactctgaacccaggctcctcccccagcatggttccattcctcctctctgtagcttgggaagacttctctgtccagttcccaaggggctagagcagtacaagttgttgcaggacagcagcctgaaaagaagggctggttgttcctgcccatattggaagagatgggagcatcctaggtcactggcttttgctgctgtaatagagacccctcccccatctatttaccaccacccttttctaaccccaaccatgtttttttgtgtgtcaattgtgtcatccatttttatattattcccttccctactctacatggagaaa

SEQ ID NO: 4565 - DNA, 1200 bp, mus musculus
tgtaattacatcttttatatgtccatttaacttgtcttgtatatttgcacagtgcaaaaacttttggactgtatggttgttatgatagccctcctatcagctgtggtgggtcctgaacattcaggttagtataatgtcaaattaaagaaaagtgacccttcctttgcctgatgctatcaagctccaactttatttttgaatagctgctaatatttcacctgtgtgacagtgttacttatcatatggacagagtctaaaatcatctggagggtagaactctagccatgcctgtcaggaactgttgattagctaaattgatgtagaaatagccatattaattgcaggtggggctgagccctgggcagaggagcctggacgatatgaaatgaacaagcaagctcagcagaagtttttattctttgttctcttctttctgactgtagatgcatgtggccagggacttctctgcagttacagactacaccaagatctgagagtcagaaacaacatgcacatctgcatctcctttaagatcttctaccagggcatttcatcacactaggataagcagctaagaccacccagatactgaagttcagcaaaagatgatacttagagagctggaactttatgtacttcatttgggctgtgtgtatactttaaaaattactaaatgacatttacccccatttgaaaatagaaggagactaccagggatctgcttcatggatactttaagagttaactaaggaatctcattaggaatagtcagtcttcagaaaatactcactccattactgctgtttctggacgatttatacgtaatgcttggcttgctcaagaaaggctatatgggtaagcttgtgttctgttcagaaacatattttagtcacagattccaacaccctgtccaatactgaatcacagaaagatagttttgtttggttttagcttaaacccccgtgagtcaccataatattttttgagaaacagtaagaattctactttcagagaaagcattagccccttgagaaggctgaaaaattatattgtgacgtttgtgttttaactatttttaatggttccaattatctttctaaaatttagctatggcatattatgaaaataatttcatccaactttgctaaggtattttataataaaagttctttctagaaaatttttcgtgctgaaaaaaac

SEQ ID NO: 4566 - DNA, 1000 bp, mus musculus
tacttccctttttaggtctagtattgttttgttcatttccatcacctgtttggatgtgttttcctctttttctctaaggacttctacctgtttgattgtgttttcctgtttttctttaaggacttgtaactctttagcagtgttctcctgtatttctttaagtgagttattaaattccttcttgatgtcctctaccatcatcatgcgatatgcttttaaatgtgggtctagtttttcgggtgtgttggggtgccctggactgggcaaagtgggagtgctgggttctgatgatggtgagtggtcttggttcctgttagtaagattcctatgtttaccttttgccatctgttaatctctgtagttagttgttatagttgactctgtttagagattgttcttctggtgattctgttactgtctatcagcagacctgggagacagactctctcctctgagtttcagtgctcagagcactctctgctggcaagctctcctcttacagggaaggtgtgcagatatcttgtgtttggacctcctcctggccgaagatgaaggcccaaaacaggaccttttgcagaagctgtgttgctttggcaggtaccagaagctgtcagcttctgttgtgcactctctcatctgtgcagactaagttcctaagttcggtggaatcctggaaccaaggtggtgcccgctgctcctgaggctgtgggcttccgagccttattaactcgataatatctcaataagaactgaatgtatcatcaaagatatagttcaatatcagtgtcaaagtagagagatccttggaatgtgtacatcaaatgtaaaccataacaatgtcactgttagcaggactaagtggtgacaatgagctggcctttattccatcccaattatctttattcttgatctaatgaccaaccatactttttcttcccattgaagattttccttatatctacaataatattaaaaatgtttttgtttaaaaatatttttc

SEQ ID NO: 4567 - DNA, 1000 bp, mus musculus
tggagcttaacaactggaaattgtttcagctaagtatgacttctggtgtcactaaggttcatttgtgactctgcttaagcctctaggccacaaacagtaagtctagattatgatacatttttattcttgatatccctcatgttgcaacatgctggccttaaccactttggcttggtaggattttggaagagcaagcaaaagtgggcaaagctgctgaagcctgggctggcacaccttcatgctttctgtcgtgggctggatccaagagtagggctcttaagtcctaaagcctactattaaggatatggatagagggaaatgcaactaagactgcttaagtaatcagtcttcagcaaagaaaggaataagtgaagcaggtgagactgatttaggatctttcttttatctaatgaatgatgtgtactctattatagatttctatcctggagggggtttaccaacatgaggatatactccaacctttatatttggtagagtcatcatgaataaaatgaacaaggatcctttaagcaaagagatgcgtccacagccagacaccatcaggtgaggcgttcagagaccagagccatgactaagaagaaagaggccatgactttaagtgagtcaggaggggcagggagggaaatccagtgacctaagtggatgaataggccaagctctttccttaactgtgactaatgatttgatagatgaagaaatgtgcttcagttggcaggtcaccacctcacccttgtgtgccaggtttcactccatgaagccagaaaggaggttccctgggatttttgcaaatggaaaggaatgatttatgttctcacatgagcacttgcaaacaaggactggggaactactttccaagtcgtattcttcctgtatgagaaactcagtgggtgtttccagtgcagtgtgtgccttgatccattctcttccttggatattgctgctctagtcattcggtaacattatttatcgtaccagaaat

SEQ ID NO: 4568 - DNA, 1000 bp, mus musculus
gtttttgtaaattaatttatttttttatacttcacattccattccccatccccccatctaccctccaactgttccacatcccatactccctacccaccccctgtttccacgtggatgcccccaaactctgccccacctaacctctaaactccctggggcctccagtcccttgagggttaggtgcatcatctctgaatgaatacagacccagaagtcctctactgtatgtgtgttgagggcctcatatcagctggtgcatgctgcctggttggtggtccagtgtttcagagatctcaggggtccagattaattgagactgctagtcctcctacaggattgcccttctcctcagcttctttcagccttccctaattcaacaacagacgtcagctgcttctgtccattagttgggtgcaagcacccactctttcagctgcttgttgggtctgtcagagggcagtcatgataggtcccttttggtgagcactccagcaggaagacaaggcatcaagtgaggaatggggttgacctgtaattgttcctgtctgaaaaaattacagggattgaaatggagaggagccttaggaaaaaaagttccaaggacaggcccaaagtgggatccagctcaaggggaggtcccaaggcttgacattattactgaggctataagttccctcaccctactgttgggcgtttcatctaaggtttctccctatgattcctgagagtctctttccttccaggtctctggtgcatcctgtttcctgaggttatttgtttccactctttctgttggccttcggggcttcagtcctttttctacacccaataccagatcagtttcccctcttccccatactcccagctccccactatgattgctttcttctctctccaaagtgggactgaggaatccttgcttgggcactttagcttgttgaccgttttgagttctgtggactatatcttggatattctgtactttttttggggggggggc

SEQ ID NO: 4569 - DNA, 1200 bp, mus musculus
aatttataaattacctgatttataaatcctgattgctgccccccataattccctcacacacagtcccttgcataattctcttcggcctctaccctgagaggatcgaggctccacctgggtatccccatattctgtcacaccaaagtctctgcaggtctaggcaaatcctctcccactgaggccagaaaaagcaccccaattaggggaacatattccagatagacaacagctttagggatagccccacttcagttgttggggactaacatgtaaaccaagctgcatatctgctatatgtgtgcaggaaggctatatatgggctgcatatgtgcaggaagtccagactgtgtaagttccttggttggtggttcagtctcagagaggccccaagggtccaggacagttcacccttctggtcttcctgtgaagttctcatccattttggggcccacaattcgtcccccaaatcttccatgagtctcttagcactattgaatgtttggctgtgggtctctgcatttgtttcagtcagctaatgggtggagcctctcagaggacagtaattctaggctcctgtatgcaaacataacagggtatccttaatagtgtcatggattgatgcttgcccatggaatgggtctcaggttgggccatttattggttggccattctctcagtctctgctccattccccatccctgcatttcctgtagattggataaatttagggtcaaaaattttgtgggtgggtggtgtccttattgtaacattgaagttcctgtcaggctacaggaggtggcctcttcatcttccatatccccacttctgtaagtctcaggtaaggccacccccattgattcctgtgagcctttcccatcccaggtctctggaaagcccctgagatgccaccttcccccaatacccaccattctcctggccctctggccctatctcctgtctctccacacacctgatcctgaaacccctattcccttccccatcacttcttctacccagtttcattcctccatgtgtatcctatgacaattctattcccccttctaagtgagattcaagaatcctcatttgggccttccttcttgtttagtttccctgggtctgtggagtgtagcctaggtatcttgtactttatgtctaatattcacttataagtgagtacatactgtggatgtgctttgg

SEQ ID NO: 4570 - DNA, 1000 bp, mus musculus
ctggttgagtttcagagaaaagatatacacaccacagctaatgagactctttccctcactgacagtcatgcccccgagcacatagacgctccggtgcaaggtgacagctgaggccttgtacaaccgtatgggaagcttggctaggctctgccactggccagtctgtccactgtagagcaagacatccctggtggtctgctggttgtccttccgtcccccaaggaggaggaggaagtcttggtaggagctccttgggggcatgcgccataggagtttacaatcctgggcactgggaccatacaaagagaagatctgtttcctggccatctccaggatggcctggcaagcaggcgaggactggaggagggcgtcattggcaatgaagtgatggaagaaggctgggtggatgtactgcaggcggacctgctgcagcagttcctgcatgtgcctccaccgggcttgaaggtcatgcttcacccaagccatgagggcctcgaacaccttttcctcctcaccacagagcctgtcatctcccaggtagtccctcagctccatggcgcagagctccttcaggtcagctgatgctgccacctctgggaagtaagtcagggccacctccttcgctttcttcttaaggctgtcacagcttaagatttctgcgagtctgactaggcccaggcaattgctgggggccagctggctctggaggtatgaggagcaggcctcaaacacccggggatactgcagcatggcagcagcctccatcagtgggaggacgttggcagctgagatatgaacctctcccgtatacacatacgtaatgacctgctccagagttgtggaactgatgcctttcatctgcactttggcctctctgctctcccggaagtggctgcagaacatggccttgaagtaggggctgctggaggccagcacactgcggtgacaagggacctcccaggccccggagcagatgctcacatcagtcaggatcttgctt

SEQ ID NO: 4571 - DNA, 1400 bp, mus musculus
gccttcattctcatcgtctcggtctcttatgcctatagtatggttctaggcatcttattgcagtgtctgacaccttagtacaggactgggcatctgatgtatgcttgggaatgtttgatgaatcatgataacagctttgtgaggtctcctaagaaacagattgtaaccaaagctggatgtgtggtcatgatatggacacagagatgccttcgctctggtgggtggcagaacatgggggtgggggttcatgtgttgcttctgtctgtctgatctcacatctaggtggcaagcctttgtggtaaaggcatccttctcagaacgctgctttgcagctcattctcttttgtgttttgaaaatggatctgaagctaattgtatcagcaggtcacacaccaatgattgtacagcaccatttccctgagctgtttttgtcactaactgagggctgccagctcattccttcgcctctctagggagcttctgccagggctaaacattgggaaggagaagaggcagagagaggcaatttgtagctgggcgacttcagagttgaaggcagtctggctcctgaagggtggtgggcttttcggttttgagttgtgcttttctttgccccatctcagcatggacttgcgtggggaggttgttacggaagtcctgtctgaggacacagtaataagtgggccaagaagtatgacaatgtcatcaggcacggagacgggctatacagagacctgcctggttggagggtacaatctgatcgtcactgaaggaaggggcatggccagagctgagtgcaaggccgttggccagcctggggtgcagtcacagttagtctgttcagcatttcctccaaggtgctattgcacagcatcagttgcgacactgtgctggtgtcctctatagatgttttctgctcatgtggcatggactggcatccatatcagactcagaggtctcattctgcaaaaaaaaaaaggaacttaaattgtagcaggcgggacttcagtttcagatggaaatggtttggggcccctgggtccgtggggctctaacaagagataccaggctgattccatgcttcctgttgattttccagttctccctgagggacccgctctgttgaaccagcatcagatcacacattcctgtgaaacgccacaaagggaggctgggtgtccacaggctcaggctcctgagtcacatgcctccagatcaaagccagcctctcagtggctcagttttgccatctgtacactgggcacaatggcagcatcagctgcagttgggagtagaataatacttaattgacagctagctggccaaaagaagagtactcactattgggtgacaatgacgaccacgacgacgacaatgatgataaattttatatagtatat

SEQ ID NO: 4572 - DNA, 1000 bp, mus musculus
acttgggcagatgccaagaggacaaatgagccctattagtgaaagtgttggagatccagagtgagagagtgatagcgggacagagtgcttagggaggagccctgagtggtggagaagaaggtggcttgggaaattccctacatgccacacagcagcccttgttgactgctatagagttggaaacatacagtgatttccaggaccttggagccttcctgtcacttttttttttttttttcctgtaacactgggaattctccaagctatctcggccccttcatcttctagtgacttccagaaagtctatcctcattagggaatctgctgtggaatttggaggctgtttctctgggtaatgtgagttatctagacagtggaagtcacaaagggccgtggaacagagggcccgttcccacccgcagggttaatgctcactggggatgctgcttgtttgtcttggaccaatgccttttgaagaaataaatgaaagagaacctaaggctgtgagaagctgtgctgctcacgttcaatagaagctctactcttggacttgggtccaggaggtcaagccctgcccttctatttcagatctctgtggaggcctctctgggcactatatttcagcagttcttaggcaggtggcacagtgcagatggttcctgcaaaacctgttactcagcattagggcttccctgtggtgttcattccaggctatatttttggggtggggatgggggaggggatcacttctagaatcctgcaacaagtatctatatacacagtagaatgtgtccccaggagtctggcatgcagaggacacatttgcggtcttcctaggtgtggccacgtggctttccacgtagggtcatcagctgagtttcttctctctgagatcagggaacttcttgggtgggcaggaatgggtggaacacatctgtgtacctgtgaccatcagcagggtctgctacctgatcctggtcaggatatgactacgtggact

SEQ ID NO: 4573 - DNA, 1000 bp, mus musculus
agaggggaggcagaaatatggaggtcttcctagcaggctgctcagggcagctcagcttgccccagagggtttatagaagaaggaagataggtgagggaatgggagcttacctgcatgattcaggagtctgttggaggtggagggtaggaagtgggaggatggggtccccctgggatggcaggctattcagggcagcctggcttggcccagacagttcatcaagcaggcctcaatcataaaaaagcctcttttttgctttttttttaccataattttcagactataatactcataaccctgtgacaataaaatgttacaacctctccaaagctttctcctaatcacccagatgataagaattttatccttgaaccttatgctttgtttatacctgtaatttgaaataattctattgtaaccatataaacactatatgacatatagttgtctttacccactaataccttcctgaatgggaaagagaaacaggaaggaagtgacaattttccctggaagattgtggagtgctgcaattaaatataaccagcagagcctgcatctgttagggactccaatataaatttcagcttattcatttgtacaaggcctatgcatcagctctggatgtggctcctgccattttctacttctttcttttcttttttttttgaaaatgataaatcagactcatcacagtattcaattaatttcacacagttggttcctcagggggtttgttcccaatgtcctctagctgatgatcaatcatgctcctttggccgtccctaaggccagaggcagcaggtccatgacatgctccaggttgtcgaacagaatgtgttcccttctaagcaggaaaggttccagtgacctttgatggcatttgagagaagtcatttgctctggcttttctgaggccatattgatctctgcccaggattcaattttagacaaacaggcgacataatttatgtaaactgggcaggtaattaaactctcc

SEQ ID NO: 4574 - DNA, 1200 bp, mus musculus
aagattgagacaaggttggaagtgtcatccaagtccttgtttgaagtatgtctaagtctctctattttagcctggacttttatgcaagtcaatatatattcttctttgtctttgtcagagttaagattttctgtcaattgcaagtgttaagagtttaaactgatgatttgaaaaggtaatagtgggaatatgattaacaataagacatgagcatgggagagctggccctgaaacttgtatgttctgcagtggcatgggtgaggaagagatgccatccccttatcccttatcacccacagcaggcacaagagctgtccctgatgtcaagaaaattggaaatctggtcctgctcctcaccagctgcagcatttgggagtgtgagtccggtaccttgcatgggtatcagagtagagctagctatgctggtatgggcataaaagaaagaacaggagagctggctctttccctttttgactgtggtattaggtgacctagcttgagttgtactgaagagtttgccatgggggtgtgggtgcagaggagctgtcaggctgaccagcttagataccacccaggtcaagatccagggatttgatttaggctactccaacatgtgcccatctataaactgctggaccacataaaggggccagttttacaaatcttcatgaacactgcaacaacagcatatctgagaatagtccaggtgagggtgatattgttagtgcagtagaagctagaggcctagaaccagacaatgattcagtgcaaggaatatttgccaattaagtcgtgtggacaaaaccaagtccttgtttgaagtatgtctaagtctctctattttagcctggatttttatgcaagtcaataaatactcttccttgtctttgtcagagttagattttctgtctatagtgtgacacaccatgacacactatagcttctatgaggagattttttttttctttttcttttgggagggaaggttgcaaaggaggaaattgggtatggaggaacagggagatgagtcggattggggtacatgatgtgaaatttacaatgaatcaataacaggttaaataaaacataattctgagtacaactaatcccactaggctctcattaagcagcagccactacggtggttttgttttttgagcttttctgaattctattctctttcatcataatgtttgatct

SEQ ID NO: 4575 - DNA, 1000 bp, mus musculus
cagccttaaaggaaaagaaattctacaacatgcaataatttgataaatcttgaggatgccgaacttatatgtcagtcaagacctcacacacacatgattctacctatgaattatctcaaacactccgtgacccagagagtgaacagtgctctcccagagaaagctctgtagagagggagagagaagggcatttttaggcaatcaccttagtgtttcctgtgcacagaggagggaactacagatctgcaaggaaggtttggatctattctctgttgagggcagagcacatgctatgtattttacctcaatattaaatattatagataacattttccacacatatagtcatacatctatttagttcggtgttccaggctctgaatagatataaaaatctgtatatgaccactcctggtaacatttaagctgtctctagaataattaaaatgctattgtgttagtaactgtttttaagttgctacgaaaaaagtacctgacataaatgacttaatggaggagagactaattttgacacaggggttcagaagggcagtcgcttgagccctgtgcattctgacagcatcatctgtgctgggaactgaactggggtcctttggaggagcatcaagtgctcttggctgctgaaccatctctccagcccctattttccttttttaccatacatatatgtgtgttgtgtgtgcatgtatgcatgtatgtaggcacatttgggtgttcaagggcacatatttctatgaatgctcatccacatgtgagcatgtggagcctttggttggcactgagtgacttggtcaatcactctccaccttctatattgaggcaaagtctcttgctgaccctggagctccccactgctgctagtctggctaatcagcttgccccagaggtctcctatctatacctcctgcatactgagattacaggctggcacctttcccactgggttctatatgggttcctaggaatagaagtctgatcc

SEQ ID NO: 4576 - DNA, 1400 bp, mus musculus
atgcttcctgatttctttcttaatgtttctatctccagagttgtctcactttgggttttcttcattgtttctacttccatttttagatcttgtatggttttgttcaattccatcacctgtttggttgtgttttcctgtaaatccttaagggatttttgtgtttcctctttaaggacttttacttgtttagcagtgttttcttgtaattctttaaggacttctacctgtttagtcatgttctcctgtatttctttaagtgagttattaatgcccttcctaaaatcttctaccagtatcacgagatacgattttaaatctgaatcttgttttctggtctcttggggtatccaggacttgctgtggtgggcatactgggttctgatgatgctgagtggtcttggtttttgttagtaagattcttacatttgcctttcaccatctggtactctctggtcttagatgttctagctgtctctgggtggagcttgttccccctgtgaatttgttagcctttgtcagcactcccaggagtccaactttctcctgagtcccaatgttcagaatgctctcttcaggcaagctttcctcttgcagggaaggtgcacagaagtctagagttcagatccacatcctggctcaagatgaaggcccaaagttaccctgtccaagaagctctgttgcttctgcggcctgagtgctgtcctgtgcagtcaggtctctgagagtctcaggatacaaggtgggactctcacctgagttccagtgtcagagccctgtctggaggccaactctccttagtgatcctaagttcctgggtgtgctagggtgcctgaggtgtggagagtcctctgggtaccttgggaccatctgctgagttcttgtccaaagtggtgtgggttggtgcctacctgaacgaaccccagcttctggtcgggtgagtttcctgagtctctcttcctgctggcacaagcccctcccagttgttttggaacagatgttgtgttccactcaccagtgatcccaagatcctgggtgtgatagggtacctgaggtgtggagagtcctctggggaccttgggactgtcctccaagttcgcacccaagatggagttgggggctaacacagactggaacaaaccccaactgctccacattttccttattcattgaaaaattgatggagagccaggttggtttcatatccttgctgttgtgaatataagagcaataagccgttttatctttgaggtaggatgcatagtcttttggacatgtgaccacgagtagttgggtcatgtggtagtcatattttcagttaattaaaaaactaaaaataacagttaatcaaattgaatgtaggacccccccacaggaataatttacatagaatgacatggctg

SEQ ID NO: 4577 - DNA, 1000 bp, mus musculus
cttcctgctgcccgaagattcagatgtagaactctcagttacctctccagtaccatgtctgcctgtatgctgtcatgtttccctcatgatgatagtggaccaaacctctgaactgtatggcaacttcaattaaatgttttactcatgagactgtgggacaatggaccatgcaaggaaacttgatatagttgagtgggtccagagtccttggcacccaggtacccatctgagatggcaggcggcttcctgctccttactagattcctggcctggaacacgtgccacacttccctcaaaggaaacatgacctgtggtcacctagcccagatcagagttctccatgctaacctagaggccctgagggtttaggaaataagcttcccttcctggaaattctttcctgcaaaagttatttaatatctggtccaccctgagaaggtggtttgcacccatttcccatgatgagcagtcaataaacagtttagaactaaggactgtctctttcatcaagaaccaccatggggagcatggagaaagacttcaataccaagctgtagcctaagtttcctgcagaaagcttccctccattcccagacaactgcaaccaagctaaggacttttgctgatgagctgaggcagagttctcatcttctctgaccctgggctttttgccatcctcagcccctgtggctttcagctccacttccaactcttcacggcccaggggtgcctagatacccaagggtttgggagcccctgacctgacttcatagttcttgactccttggtgaggtaactcagtggtgactgggtatccagaagcttgggaacctcagcttcagcatcccacatcttagactgtgtttacccagcccctgggaagacttggggcttccctaaagcccagcacccaatggcagcagtgcagggtaaacactgtcaatttttgcttctccagcgggtcctctgcaccccagcagcagggtggaatgcaggccct

SEQ ID NO: 4578 - DNA, 1000 bp, mus musculus
tacacatgatatatatccttacatgtgttccttccgtttcattacatctttctttttcttcctttttgcccataatttatttttcttattcactttacatcacaaccacagccctcattccctcctttcctcccagtcctgcccttacaaatcacctccattacccattctccttctcctcagagaaggggaaggcccccttggataccatttgaccctgggacatctagtcctagcaagactaagcaacttctctaccactgaagcccaaccaggcagtccaggtaggggaaggggatccaatggcagacaagcaagtcagagacagcccctgttccaattgttagatgactcacatgaagaccaagctgtgcatctgttccaaatatgtagaacagcctctgcatgttcttttgttggtggttttgtctctgtgaaccaccataggcccaggttcattgactctgtaggtattcttgtagtgtccttgacccctctagcttgctcattctatccccaactctttcacaagattccacagtctcctcctgatatttggctgtcgatctctgcatctgtttttatccactgctagatgaagcctctcagaaaacagttatgctaggttcctgcctgcaggcatagcagagtatcattaatagtgtcatgggttggctctctgccacgggacaggtctcaagttgggccaatcattggttggctgctccatcaatctctgttccatctttatccctgcacatcttgtaggaagaacaaattttgggttgaaggttttgtgggtgggttaatcctcccctccttccactgtgtcctttctgactacagggggtggccacttcagtctctatatcccccactggtaggaatctcagctaggacaacccctataggctcctcccttgtagcctcatcccaggactccaggtagttttagacatggcccccttgattttcattctcattcctggacctctgtcat

SEQ ID NO: 4579 - DNA, 1000 bp, mus musculus
ctgtgattcatagtggactctaacacaaatgtgtttaccagctccctgtctgcatctctaactttttatttaagtaaacatccgtggagcaaacatcacctgccaggattattgttggtaattttacatgaatttcctcatgagtcacttgaacaaaagcttaattctgagaacttgcttgtaagaggtctctcttagcaacagattgttggagtgagcattttactcaaattgctctagcagcgcttttcctttcaatgttgatcttagtttattattctcacatcaacttacctcttagaaagtaaagatattaatgggaggagtgtggctgtggtcatcaagaccaaggagtagttgtatccgccttcagaaagagtcctcgacagcttctgggacgggcagaagcacagagccgctgaggcagcaccctgtgcgggccgcagacagccggccaccgtccggaccagaggacaggtgtccgcctggcttgggaggcggcctcagcctcagcagcagcggtcgccatcttggttccggagctcagcggaacttaggaaattagtctgaacaggttagagggtgcgccagagaaccggacagcttctgggaagggcagaagcacagagccgctgaggcagcacccttggcgggccgcagacagccagccaccgtccagaccagaggacaggtgtccgcctggcttgggaggcggcctcagcctcaggagcagcggtcgccatttggttccaggactccctggaacttaggaattttgtctgcacaggtgagagtctgcaccacagaagctgacagcttctgggaactgccaaagcaacacagcttctgagagaggccctgttttgggccttcttcttcgaccaggaggaggtccaaaaacaagatatctgtgcaccttccctgtaagagagcttaccagcagagagtgctctgagcactgaaactcagaggagagaatctgtctcccaggtctgccgag

SEQ ID NO: 4580 - DNA, 1000 bp, mus musculus
gcttcattttaccaccagatttttaaaactcatagttaaatgctttaatgtaaaagcaaagcaagtcgggtagggttgaatatactttcacttcgaaataagcctggtacccagcaagcactgactgagagctatgaaatgtggactcctgtgggtaggaattcactcatctactgacggccatcaagtatatcagctcttgtacatctctcaggctcctcttgcttcaacaggacctcagcaggatgtgctttctcccttcagcctccacaggacaaggctttctgtggtctgggtcaccagtgactattaccctcagcccagttctgtgagtgctgccttgtgagatctgagtggcaagatcatcttgagggtgcgctctggggaaagagggagagtctagaagagcacacagcaggactggcttcttagaaatgtgtagggagaaaggaaggaagggacagtactagaaggcatgagtagagaaattggtgtggggatggtatatgtctcttgcccctgagctcaggtggcagtgacatccagtcatggaccctgtgaatatacatgagctcgtttgaacaaaggtaagccaacattaggtaatttggacaagggtagaagatacctaaggaagaggttttgtttttttttttttttctgtctttcaaactctgctcagtttggcttcttttctcatcccttccacctaaactcagtagcttacaccctggaaacttgatgtttccaaactgcactagcctgttttccagctttgttcaccctgcagctcctgtcagtgccccatgcccagaatctgttcagcgggaccatttcataccccagggctgatgtgtgattgctagtctgattccatgtacttcctcctgtgacgttagtgaactaccgtctctcttactcacagtctcctacccacctccgcattgtattcttttggaaaactcaacttaaataaaacacaattgctcctctactgtca

SEQ ID NO: 4581 - DNA, 1200 bp, mus musculus
attgacccatactcagtcacaaaacaagtctcaagacatccaagaaaattcaaataaccccctgtatcttatcagactaccatggactaaagctggacttaaaaaacaacagaaacaaaagagtgcctacaaacttatggaactgaacagctttgttcttatgaccactgggtcagggaagaaataaggagagaaattaatgattttgtaaaattcaatgaaagtgagtacataccatacccaaacctatagaaaacaagggcagcagtgctaagagttcatagcactaagtgcctttgtaacaggacagttatatatataaagcatagttggaaaagtgtttctctctgccttccttctctgattttaaacaaagttaatagatcactaattaaactatataattaactttaaagttcagccttcaattcatatctgctattataattattaatattaaaattgatattaatattagatatcctgagttccagtctagttagctgtttgaagtgcagtaagtcttcctcattatagaaaacaattctattgtattaaattttaatttggagcccacttcctcctttaatatcatagtgactaaaaacaaatgaacatttgagcagcactgtggctggagctgagacaccccataagaggtcataatagcagtgagaactatttacttctctctgtctctgaaatgaaggactggtaatgcagagttcagggattttcctcataaacacagccagtaaagtaaggactaggatatgttgtcctgctcttcgtgactccaaggccctccatcctcccttgactttggagatacttcccatcttcggtgatgctaactaagctatgagcccaggataaatgctctggtgcaagataatatttctgcctttgtcctgctctatttagaaggttgagaatccaccagccagaatcagaagtgtgatagccatgtctcacaatgctgctcatgccaatttatgggtttttgtcaacttagctagcagttatcatacttaacagggatagtgtagagatttagtttgcttctcatgaatcaaatgtctcctattgatccatgtcttaactattgctaccatcctgaattggccaaatgtttgtgagaacctttaggacatcctttgaattttgtttatggaactaaattagattagctagaaatgt

SEQ ID NO: 4582 - DNA, 1200 bp, mus musculus
tattagtcacaggtttgagttcctgtccagctattctatttgttattttaaaatattcaagatatgctgagaattaaataagaaattcacagactcacttagctcctggaaatagctagctagagagcccaaagtaagtagagggatgtttccactgtgaaatgatgatgaatgggaaatccttagaaatgttgtctacctctgtggccagagtaaagtgtatctggggatattctgaggtcaagagcctcctttatgtggtattgggcaaatttctttggtttgttcctccctaactaaataagagagtgataggttcacagagtttcataagaaggagagcagcacctgcttgtaaagaatttatcccagttttcagctcaaggcaatggcagtgtctggatccaaaattatttcataagcaccaatttcatttgctcccattacttctcgatgctgaaagtgacatcacaccgtctcactggtgaagctatgaagccccacctcctcatcaggggccaggaaaggcagatggcttcttgacacctgcagagatttcagagtagctgtcagtgaactcaggcagtggcacttgcaaacggggtccacatctcttcagaagggagagcttcttctctgcccttcagtgctgtcatcttgtggtagcatgcatctgggtacagcatcaactggattatctagatgaactaaaaacaattaagatgtattagggcaggtgcaaagagatacttctgcacttggatgtcccttcaacatggccactggggacaccgagctgcccagttgactttctgcttgagttcatggactttactctcaccacacctgctcactctctgtcttgacactggcccctttggctcttcctaagatggttcttgccatgtcatagctcaagtcaacaacttcccatcattcaggcagtgatgaaactgggaaccttaaggtaatgaaactgaagcaatattatgtaccatgtttcacccaaaggttttaaattcctatagaatcttctttcctcttctcaccatctgtagtcttctagatgaatctactttccctctctttgatgtacaatctagttacacacaattcttaaatcctcaacaaaggtaagcatgttcttgccttagggcctttatacttgttcttttttttttaaatatacttacaatataa

SEQ ID NO: 4583 - DNA, 1000 bp, mus musculus
aagactgccatatccagggatccatcccataatcagcttccaaatgctgacaccattgcatacactagcaagattttgctgaaaggaccctggtatagctgtctcttgtgagactatgctggggcctagcaaacccagaagtggatgctcagtcaactattggatggatcacagggcccccagtggaggagctagagaaagtacccaaggagctaaagggatctgcaaccctataggtggaacaacattatgaactaaccagtaccctagagctcttgactctagatgcatatgtatcaaaagatggcctagttggccatcactagaaagagaggcccattggacttgcaaaatttatatgccccagtacaggggcacacaagggccaaaaagtgggagtgggtgggtaggggagtggggggggagtgtattggggacttttgcgatagcattggaaatgtaaatgaggaaaatacctaataaaaaattaataataaaaaaaactgtatggtacaggtatagtgacagacaagtagaccagtggaatagaattgaatacccagaaatgaacccacacacctatggtcacttgatctttgacaaggcggctaaaaccaaccagtggaaaaaagacagcattttcatcaaatggtgctggcacaactggcagttaacatgtagaagaacgcaaattgatccattcctatctccttgtactaaggtcaaatctaagtggatcaaggaactccacataaaaccagagacactgaaacttatagaggagaaagtgggtaaaacccttgaagttatgggcacaggggaaaacttcctgaatagaacaaatagcttgtgctgtaagattgagaattgacaaatcggacctcataaaattgcaaagcttctgtaagccaaaggacaccatcaataagacaaaaaggccaccaacagactgggaaaggatctttacctaccctaaatcagataggggactaatatctat

SEQ ID NO: 4584 - DNA, 1000 bp, mus musculus
tgatattgaccttaggctagaaaaaaataacttctaaatcaagttcgtaagtattctaaaagtaaagaaataagctaacaacctccattgctgtaaattatatataatacctaacctaaaataaaataaaatggagaacacatagacgtcttgctttcattactgttcctgtgataaactcctctatccaaggcatacaatgaaaagaaggtttagcttggtacaggataaaatccatcacaaaagacacattagggcaagaggcctgaaatagccatatcacacccatagcttcttcatggtactgctcaggtgatttttttttaactcttttgcagttcagaacccagcaaatggtgacttacacatgcaggctgagtcttcctgaataaattaaagtatgtaagagaaagacttagaacacatgacaacaggcctcagccttctcaactactgtgtgtgtgtgtgtgtgtgtgtgtgtgtgtgtgtgcgcgcgcgcacgtgcatctgtgtctgtctgtgtctgtgtgatctcttggaagtgtcctttttctcttatgagagaagaagggagaatgaatcagaggagaaagaaggtagagagtgatgtgaggaacagagagaggccactgaattaaggatgtatcacatgatgtaagaacctattttcaataataaaacaaaaaggaaatctcaagcactagtaaactatatcaagtaaataattaggaagtcattgtataggtgaataatgaaaagatagttttttataattggataatttcacacctaaaatgtgtaaacaatgaacttaactttaaaagaatgaacaatgcatgaacaggcaaatctatgccttcacatagggaacttcctacatgacaataggtgtttaaaaatatgattaactttgattgatattattaagttaaatttgatctgtgagctgatgaaataaatcatacttggggagcagtcttctcctatcctatgtgataaa

SEQ ID NO: 4585 - DNA, 1200 bp, mus musculus
aataaaattaaaattgtaaaaactattacaactatttgagttctgtggactgtatcttgggtatactctaccttttttgcaactaatatccacttattattgagcacataccatgcatgtcctttggggtctgagttacctcactcaggatgatattttctagttctgtacatttgcctgcaaaactcaggatgtcctcattcttaatagctcaatagtattccttgaaccacattttccgtatctattattctgtcatgggacatctaggttgtttccagcttctggctatcacaaataaggccactatgagcagagtgaaaatcttttgggtatattcccatgtgtggtattgctgggtcttcaggaagatctatttccaattttctgaggaacttccagattgatttccagagtggttataccagtttgcaaccccaccagcaatggaggagtattcctttttctccacatcctctccaacatgtgttgtcacctgactcaaaaagctcaacaagctgaagtgcccaagtgaggacacctcagtcccacttgggagaaagaagaaagcaatcacaagtggggatggagggagggacctgggaacaaaagtggatagggtggggcagagtttgagggtagagaagaggggaacctgatctggtattgggtgagggaaaagtactgaagccctgaggatcagcagaaagaatgtaaacaggcaacatcagaaaataggaggttggagccccacaacccccacgagaggttgcaccagaggcatggaagttgagggaatatcaggactcaaagagaggcaacttatagggaattggttgggggtctagtccctgggtgcactgggttgtccagtcagcctatgctgttcttcctatgggtgtgcagtgcaggcagatgtcattgtgactatgccacaccacccagtactgttgcagtgccagatttccacactccctcccactatttataggctcattaacgttctgtggcagatatcacttccactgtcattagcactaacttgaggctacccctctttctgagctgtgatattggaaaacacaaccctaatagaatcattgtaaaaatatcttggtcactcacaaagaaaattagcagtacacttaaaatcaagggggttaaaatacagacaatggctcactcagtatcacagtatac

SEQ ID NO: 4586 - DNA, 1000 bp, mus musculus
tgttctgctctgtggctggcttctctgttttctgtttccccctattctggcgtaagatccatgcagtagggcctctgcctggtccatactcacagtctgtgcctgacccacagtgggtgcacaaagaacatttgtggaccagacttgtgttgctcccgcctgttttaaatgacaggcttgtttgctaatgcccagggcctcccttgggcagatttcatgtccttgaaatgctgaggactgagcctatatcaccaagcttttctcaaaacatgggcttgaatgctgataggaaggccagggcctaggcctgtgtggtggctttggctttgggtaagttcctctgtgcctgaggacctgcagatgagccaatggccgctctatgccagaccactgaatggtggcactcaggatcagagtagcttctggtcctgcctgggcaaaggatgttgctgggtcgctgatgggtcactgttgggaaccacgggaaccatgggaactcctggcagccctgacacagaaatgtcttgtgtcctggaaggaggcctgattgggtctgaagcgaggccttcatgtggtaacatttggaattgggaattaacttttgtagccctgggcccttaatgccctccctcactgatgacgggcatcagagcatcttgaactgtctacctggtctctgcccacgtcacaccaggtactcagcttagcctgcttttcctcagagtccagagtctccagctgcacccggatttgcaccttgcccacctgagtgccagcacagacttgaacgagggccgagcccgccgccgagcctggcagcagactctcaactgcaagattcagcacatcactctacagctgctcgttggcatcttcaggtatcacagatctgggagtggctactgagttcatttcccagcctttcctcatgacaagtgcagcagggtctgctctgaccctgcccaacaccctcccagtcttcaatatctctctctcctat

SEQ ID NO: 4587 - DNA, 1000 bp, mus musculus
aaccactggctgggacactgtgcggggctggctctgctctcttccaggggcccctgcctactagtcaccacagccctccctggtctcctgactgaagcccccacaccttcccaaacagagcatgagcacacgctggactggtggggaggagtcaggtgcagctgccctcccaatggtgtctggcatgtgaggtcactacacactgtcccaagaacaaagaaatactagccctgctctctggagtgaccatacccctaccaccacaacatcgcctggatgtaggctgggcaggagtcagtactcagtactcaagaagagactcagccaacagtcacccagccacctgtgagttcaggggctggaagataaaaacctaggccaaggtaggagttgcctcaccacatggttcctgaagcagaacagacagggcttgcctctgggatccaaagtgacaggcagacccctccaaagttagctaggcaagggtggagggagcacatccacaagaccaacacaaaggcaatgcagccggcactgctgagttgtggagactggactccgagagctcctacttccccctgagagaagcccaggacctaagagaaactccagagctcgaagactctgtcctcaagttcacgtgctgaaactcttgctaaaagtcttgggtgagagtgagagactaaagacgtagagggattgacagttcttttgtatgtgaacagtttgtgatgggaacaggaggacctgagaatcgaggaatgggaaggtgacagggtcaggacagaaggagtccctaggcactaagggctcggggagaacctaaaggcctcaatatttaaggcaaggctcctgaataccaatagtccccataccttttcctttgatgagaccataagctggctggaaggaagatgccccaatttaggagagccacgcctaacagtcagagcaaacacataggtcttccaccaaaatggcttgggcacaacatgtggac

SEQ ID NO: 4588 - DNA, 1600 bp, mus musculus
ttttttttttcgtttttttctgagatatggtttctctagccctagctgacttgtaagccagggtgaccttgaacgcagaaatctgcctgaggttaaaggtgtgttccacaagtgccccagctctactctaattctcttttaaaaaatgtgtgtgtgtatgtatgtatatatgtatatatagtagtaatattaatccattaatatctctttttcctaaaattcatgtctgtctgtctctgtctctttctctctctctctttccttctttattaaatttattcttttcatacatagtttcttagtgtaagcatccctgactgtcttgaagacactttgtaggcctcaatcctgtaagagccttcctctgcttttcaaatgctggcatgaatgttgtacctcactatgaccggctgagattctcaccttttcttttctccccccccccctttctttttatgattctagctttggccaggcagtggtggtggttgtggtggcagagggaggtggatcactgtaactttgcagctagcttagtcttcagtctgagttacaggaaaggagttccaagaatactggttatatttttcatttattatgcattttaattaaaatttaattacaccaaaagaatttagactgaccaattcagagtctgctatttcaaagcataaggaaaaagtaggagaaaaacgtgaggctgtttgtggatggtcgaggctgctttagggagcctcctcaccattctgcacttgcaaaccgggccactagaacccggtgaagggagaaaccaaagcgacctgaaacaataggtcacatgaaggccagccacctccatcttgttgtgcaggagttcagttagcagacaagatggctgccatccacatgtcacctttcatcttggtgaggtcaatgtgcagccgagtgacaggacaaggaagtagacatgcagacaacagacatgcaggcgaaccacctcccttctgtgtttggataaaagacatacaacaatttttattttttacagtaagccttaaaaagcactctgacagccactcagatatctaccttctatgtcctgttttattttgttaagaacacatctgtctttcttccagttttgttgacatcagttggtttttaagttgagatactaaaaggatactcccaagggacattgccccattgtaaatttacaaatgcatttgcaatcctatgaggactagttatatcatgtttggcgtattcacgaccttgttattgtttcaagtggacgtgagatattatttgtgtcaacttgacaaagggtggattgtagtggctattcctggttgtcaacttgactatatcgggaatgaactaccatccacaattggaagactcacatgtgaccctgatcttgaggagatataagtttctgacctggattttggcatggagatcttgaggcatagtgacttgaatcccaggactgaggcaaggagatctctgagttcaaggtcatctgggacaaaaaaaagtcccagatccaggcatggtggcccacatctttaaccaggaccacaccatgtgttggagacctatataaggacattggaag

SEQ ID NO: 4589 - DNA, 1200 bp, mus musculus
cacatgtgaagactgcaagatcccagatacttatgtgtgaatgatgatggcataataagttggaattctgactcttccctgtgttggctacatgcctccattggcgggattagcaagccacaacaaaataacattccaggaagtacagatctgaaaaccatagagagggcacctacccagcaggggctataaagttgaaacaaggatttccacacaaccctcacctggcagcttctataactgataaatcatcatgaaaagtctccagtaagcagtggttgcaactgaggataaaggacaaatgtggaggttgatggaaggaccatcacagcaaggtctgcaggagaactgaatccaggctgaacatgaccagtgcatgacatggtccaggtgctgcctcctgtgagcactgctgcattgcagacatcttccttgcaaaagaaaataaacactttgaaactgaaagcagtacacagaaacttggtattttcaaaattagtagggcagatggaaaggtagagattcttctttactttgcttctgtgagaatcttcaagacattagggagtgactcacttctaaggcatggacaaaagagcatccagatgtctgggctacatgccacctggcatggatggcccaaacttgtctctaaggcatgttgaatccagacatgatagctcagaattgtaatcacagaacttggaagactgaggcaggaggatttttatgggttcaatcccaatctgggctacatggggatttctagtctatcctggggttagagtgagaccctgtctcaaataacaaacaaaatgaaaatcaaaactgtgggctggaaactaggcttggtggataaagtgcttgtgtgcaaaatcatgaaagacccagttccccttgctagagtgcatcaaacatgggcatgggtggtggcctaattgtatttctgtgattaggagacaaagatggagatccctcaggtaagcgccctggctagaccagttcaacctgcaaggttggggttcagcatgtgaccttcctcagtaaataaaatacttgtcacagagatgcccatcaacttctgggtcccaaacacttgtacctcttgagtgcatgtacatccacacatgtgtacacatgtgcccttacacacagtgagctggggaagcagctcagtcagtaaagtgctggccacatgga

SEQ ID NO: 4590 - DNA, 1200 bp, mus musculus
tacccgctaagatagaaagcaggaacttacagtgtctttcagttcttagctccacttaacactgattggtagacccgcctttgacagcataggaccagagctcgggggtgcccatggagtcctctctgctcagaggaggcggtgggtctgaagaagtagggagttactgaaacacactctgatgttttgattgtgattgtgctaaatcctgctatcaagggaaaatgaaaagctggatgtggtggcactaacctgtaatcccagtagtcaggaggctaaggcccgaggatcgcaagttcagttagcctgggacaggtagtaaacttgaggtcagctttggctgtacagcagactatgtctgggaaagcctgggacaggtagtaaatttgtcagcctaggctaaacaattgcctgtgtctggaagaaacaaacaaagcaaaacaaacccctcaaatgacacagggttagttcattcattacagtagaaaatgtgtcagacattacactcatagcagggaatgtgccagaatgcttccatgaagctatagcctagtggtgtcacaggttggttgggagtcctgtggattgattctcccagcagtaagctctggattcacattttcctgacatgtaagttactctgggctagttatcgacatgcacctcagtttctttatctttaagatgaagataacagccaggtatggtgatacatacctgtaatcataccacttgagaggagacaggaggatcggggaattcaaggccagtgttggctatgtaggtagtttgaggtcagcttgggtgacatggttctggggagggactaatggttcgtaacttgtgtggaacactcagaataaggcccaatcaggatgagtcacccgttttctgcttaggttcagtaattggacagctgtgtactagagacctgggcatgtcgcataaataatgatggattgagatggaggctcagcgaggcctgcctgtcttctcaggtcttattttgatccctaagtaaagtcattttctctgttaggtgttgagtagatccctttctcgaacagaagtcttaagaaagacctgtagtcagccagggtggctacagacttacacagaaaggtagggagaagtagagttaaaacaaagtgcttttcttctttttttggtggggggaggacggggctggtgacgctggga

SEQ ID NO: 4591 - DNA, 1000 bp, mus musculus
ctttaagatttatttataggagtattcttgctgtcttcacaccttaagagggcatcagatcccattacagatggttgtgagccaccatgtggttgctgggaattgaactcaggacctctggaagatcagtcagtgctcttaaccactgagccatctctccagcccactacttcatttcagatcttggtttcattcacagatgtgaaaaaggaaggctgaggatataaattgtttgcttagctgcacaggataagtgacagtggtggtgctgagcctgggttgatctgcagtcaccaccattgctgggacactccttaagtataccgttcatggaccacacagcaagcttgctgggcttcatgcagagtgccagaacacagtgtggcctggcctccctccaggcactggtgctagggaacagccctggagtgccatcatctgtctgccccgggggttatggataatgaccttggctcagagtatgaactctgagttgcctagtccagtccgcacatacttgggaggggtgcattgaatgggtaaaggtactctgcatgaagctgagtacctaagtttgatccctggaaccctcataggaggtggagaaaacgactcccttgggctatgctcagaccttctcacgcacaccaatgacacatgcaccggtaaatgtgaaaaatatatgtaaatacaaagagcaaaggtgtgccacagccaccacctggcccgaaggaggatttgtatcctgtagcttagagatcttttcttgtgtgcgcatgcattcatccatgtgtgtgaacatacgtgtgtgggaatcagagaacagcacgggtgctagttcctgccttctaccttaagactgtctctgcctgtctcaccaccacctcacctctgtctctcacacagctctacctctcctgtgagtgctggtggaagccaaagctgttaagtcccctgaagctggggttacaagcatttgtgagccacctgccctacatgg

SEQ ID NO: 4592 - DNA, 1000 bp, mus musculus
tgggagacgacaatcagaaatggcgcctcgcaaggggaaggaaaagaaggaagagcaggtcatcagcctgggacctcaggtggctgagggagagaatgtgtttggtgtctgccacatctttgcatccttcaatgacacctttgtccatgttaccgatctttctggcaagaaaaccatctgccgagtgactggcagaatgaaggtaaaggctgacagagatgagtcctctctgtatgcagccatgttggctgcccaggatgtggcccagaggtgcaaggagctgggcatcaccgccgtgcacatcaaactccgggccacaggaggaaacaggaccaagacccctggacctggagcccagtcagccctcagagctcttgcttgctctgggatgaagattgggcggattgaggatgtcacccccattccctctgatagcactcgaagaaaggggggtcgtcgtggtcgccgtctgtgaacaggacttctcattattttctgttaataaattgctttgtgtaagctaaaaataaaaaataaaaaataaataaaatgatggtatgtaataggtcaattatcaatatttggtaataaccaaataaattgctgtattgaacaaggaacatacacttagtcaggtttttaagacacaatttttgttataggttttctaaaaatatacgaatatattttacaattctttattaataccacagtggttctaataggacattgaaactgtgttttgaggtgaaagccacctcaaccttggccgtctaccctcggcttttctctcaggtagaagaggctgaaggcagcccaatttattgtaggccagaaaacctactccgggtcttagtgagaacaatatggctactctggtcgggacatgtggaggctcatggggcaaaggtgaacgcggccctctcctgagtttgctgtaaagctgcccgccttttggtggcttcttgtaccactatagctcagggaaactgtgtgtctc

SEQ ID NO: 4593 - DNA, 1000 bp, mus musculus
agctgatttctctaaacgcttttcttacatgattttgctcttattcaacaagctttaaatgttggggattgactccagcaccggggatccttgcccggggagtctccggacacccccaaagacatccacaggatcccccacgggatcttaagacccctggtgagtggaacacagtgtctgctccaatccaatcgtgtgggacctgagactgaattaactagggaagcagataagccggcctgatcaggggcacaaatcccttccagtccagtctagcaccggggttccttgcactcagagtttctgaacactcccaaggttctcacaggaccctccacgggatcttaagacctctagtgagtggaaaaaaacttctaccaggaggcaggttcgaacaccaaatatctgggcaccttccctgcaagaggagagcttgccagcagagagtactcgaaccactgaaactaaggagggaactagtctcccaggtctgctgatagaggctaacataatcacctaaggaacaagctctaaccagagaaaactatggtaatggatcacagtcctgaagtggccttgcaccatgaggggtacagtaacctcccagggatgaaagtctaaccaacactagccaacctctgcccacaagattctcagatcatttctcagcttcccaggctgagtttgagaaatcttgtgttttatgtcttgctgcctgatcaactggatgaccacagacctgtagtgaagatggcacatgctccagctgccttccccactgcccctcactaatcaacagagcctttagctgccttcgcaccactacctttcacttttcaatagtggctttacctgccttcccaccactggcccacactcgtcctcaaggattccagcttccctccctgactggccttcttttgcccttaggggcttcatcctctttccctcaactgcaggagacagtcttccactgatctctcacacacagaagccattg

SEQ ID NO: 4594 - DNA, 1600 bp, mus musculus
tgctctgctattgcaatagaaacataaaaattatagttaagcttgtaatggaccattagctcaagtttacaatttaatcacaagttcaagattttaagtcactcacatttgtaaatgaaatcaagaaaaaaaatcaaggaagtggagattattgcaagatttacaaacgattaatgaaactatggaaccgcagttgccattccaaaaaataggtataaagttattgtagatttaaaagattatttttatactattcttttgcatcttcaagattgtaaaaggtttgtatttaatgtacttgtaactgtaggtgacccacgaagcaatacatattattggaaaatttttacctcaaggaatggctaagagtcctatattaggttaaaattttggtgctgcttcattacaagaagttaggactttgtatccttctgtgtatattattccttatatggatgatattttgttagctggttttctaaaggagttcttcatgattttgctcttatacaacaagctttaaaatcttggggattagttgttgctacagaaaagattcataaacaatatccatttcaatatttgggacattagctatatcctaaatgtttgtattttttcctcagaatgctgaaggagcatgggaactgcccgagcgattgttgagacatgctgatgctgggaaaaagaatgatgctgactgtgtatgagcttgccaaatcccctgacaatggtgatagggaagctatattagacgtatgtccctgacccacctttacctgcccatatccatgactggacaacctgcctcaagctttcagaccttttggacagagaacatgagactgtagaaactgccttcaaaaagttaatcgaatagagaagttataatgaccccctctctttcctttaatgtgaccagttattctgactcaatcacggcctagtctggaaatcaattccatatttggggaaaaaaaagtaacagtcttcatttggaaggctttttctgatcatttgcaaagacatatttgaaaactgacagctgccttgtatgaagtgacatttgtagtagataaaattgggacattatcttgattttgagcaaatattactgggtgtgttaaggctcctaattcttttttttttttttttttttggttagtcatgttaaatttacattagtttctgctatggtagttaatgtaagttgcatttaatgtacactttctaattgtgttagtgtattgaaatctagtgttgctgtcatggtgggctctcaacgagcctctgttctatttcctataagtatgacaagaccttggtattctgaaaaaaaaaaaaagcttacagatactggaagaagaagtcaggctttaagcagaagcaagagtttagtgggtttgattgttgccagtataacagttttgattatattgatagctagcatcattacttctgcaatctctttgacacaagaagtgaaggcagctaaatttttaaatgatttagcaaaccatgttactaatgctctgagtattcaaaaagatttagatagacctttggaacaacggattgatgctccttatgatcctattca

SEQ ID NO: 4595 - DNA, 1000 bp, mus musculus
ctatgcacagggggtacagacagatggcacggcctataggcctgccacttagagcaggaacccactgatgggttggggaaggagcgaatgcagagaccctgtgtcaagagtggtctttctccatccctttctctggccagcaggtccccagagagcacagaattcctcccaccagggtcccagtggccactgagtctccgtgtggcacgctgaccctcggagcctaacattcgtgttggtttctacaggagcagaggagggttaggcactcaggccactagacaatgggtgctgggttctttgctacaatatgcaaacaaagaaatcaacgtgtttgatggaggcaaactgtttgaaaaagggaaacaacgagttcccgtctgcctcagggcctccccgccttcatagacaacacatggagaccccacacctcacacacagacacatgtcctcatccttatgctcacccacatgctagcacatgtacagtctcacaaagcagcacacctcctccccaccagcatctgtacagtcccgcatcagcgcccaggctctcacactccccgaagctggcgtgtcacacgtgaccgcatgccgggacccccccaggccagcattcattcacacttacccacacacccaaaaagggcagggagaacaaaggaggtggaagaaaagtgttacccatgaggagccgccgtttcacccgcttgtccacatcagctactgacgtggcattgaactgagagcgctcaattgcagcctcatccttctctagaacacaagtaagggacaaacacggagccagtggttaatgagagcccacttcccgcggcccaagacagtcagcctcttggcgtggcgcacacaaagccaacacagcatgccgggccagcgcggtgccctcgccaagggctcatcccaggaacttccaggcaggtgtgctcagggtaaaacagagtagcagcaagggtgggaggggcggcatgcagacgaagaa

SEQ ID NO: 4596 - DNA, 1000 bp, mus musculus
cctggcctctcatgggcccctctcttgtgcctttatcccagacagatcaattcccacgggccacaaggccagatgccaccttgccttgtggtagggcctggaataggttacatagctactctggctctgttttcctgtgcagagactagaaggctttgacagacagctctgagctttcaggggaaatgttgcatgtccgagcggccctcccgctctgcttttgtgtggtctgactatggtgtctgtcactcccatactgctgtgttgtactggcccactgttcttgtctctcagtgtcttctgtccaccacgcctgctgcctacagtctgacctgccacagttgctgattgcacagtgcagtgaggagaggagggctgggccctggtgcgcagcaggtgccttctcagcctgggttagctctgtgcagcctaccatgtaggtggagctgaagcggagctgtggccagctgccttcacatactgtgttggggccaggtcacaggggtgtggtgggctccagtgccaaccacagctgcagcagctctctgagcagctcacctcttgtggcccatgctgctgtaatactgacagcagccacagggtggcagtgtgcaccaagcagttccttcgctcttgagcttcttgctaattggccctttagcgagtgttctttacagctcaggacccctcagctgcaatgagttaaatccaagaagcatgtttcaaagataaattgagaacatacccttcaggaagaagaagtctgctgtgctgaagtggggaagaccctggcccgggtttgcctggcagctgtttgccattgtgatggtggcaggcaggtgttggctgtgggtagtgaaggctgtccagggtcagccttgaacatagagataccttccctagtgtggtttgccttgcagctttgttggcaagagtggaatttgaaaacatttgagggaaatgacctcaattttatcatgtttctaaaattaggcagttg

SEQ ID NO: 4597 - DNA, 1000 bp, mus musculus
ccccagtgatgttgtgttcagaatctgagtactacagctatcacccaggccccaggccctgaccacccatgaccccaagccaaagccatgcttatctctgttgtggggctagctgacctcatgagacacctgctctgaaagtcctcaggcctgggcagcagtgctgccacaccccaccgccaacatcctaccggagtagggcagagatgacagctgctcagctgggaccagacccggccacccccaaagccaagcctttgttatgtcacctcccttgccaccatccttctctctcctgatgggacagcctgcctgagtcacctccaggtatgtaagacaaaggaactaaaggatagatttagattcatttcctgacctcaggctgaaagctcttctccccatcaccgataagctttctttcctttgaccagaccacagaaacttgaaaagccatccaactttccccttttgccttggccactaggaaactcaagcgacgacctgtcttttctggcttctcctctagacacatatgtgctaccacacgccatatgtggcttttaagtcctccttggcgaacaggaaggacagcaaatagccaggtcaccagtggtcggaccgcagcagcagtgataaagagtacagtccacccaggctgctctcgcaaacacttaccaggcggatgagctctggaaggtcatcaggggtgggctgtgcgtgtctccccgcagtgtgtgcacagcctggggggcttgcggcagggtaccagggggaggctgcggctgtggggccggctgtcctggccgaggggctcgagcagggttcccccaccgccgggggtcctgtttcatccaccgtccctggatcccccaccgagtgaggtaaaccttgcaaatatcgtagttcatggcggaataatagagcagatccaggaccagcagcgtgagcacgaagaagccgtaaatccacactcccagaagcgccgtgtagttgctgggga

SEQ ID NO: 4598 - DNA, 1200 bp, mus musculus
tatatatatgaaattaagtttctttgtatatatgcatgagagttcagaagaggttttgtaccccctggagctagagttatatagtgttgtgagccattcagtgtaggtgctaggaatcgaacatggatccctcttaaccactgagccatctctccagtccccatgaaattatattgaaatactgcttaataggaacaaagcaggatccgatcagagcttgaagacattcatcataccactgtcctgtagcagatcacaggctcattggcctctcagggtccctttgagcagcagctttttagccatgggccaaatggtgtgaacacccttgctctcccatggctaatgtcccagtggctggcagacaccctgtgggcctggagcctacagggagaaaaagtatgcatggattcaaaggaactttatgaatattacaggcccagccagcattgtgaccccacccaacctggcaggctgacctagcccggggaggggcccagcggtaagcaaagggtgacaagcctttcagaagccatatttgcatataggcctttggagggacatggttgcaatgctgtggctgccgtggggatgagagtgaggtgctgactgcctgtggaggtctgtaatgtccccttcccaagttaaaaacaggttcgcttagggagaagtctgtgggtgatgtgttgacagatggcatgcacgggtatctggattctatgttgcaggatgtccaaggacccgacttgaagggacttggggctgctactcctggagagggggacctacccttgtaatcttcaaatgtcccaggaataaaccattgctttttttctccctagggtccccgtcagggatctaagaaggaaggatggaaggagagaaggctcaattttatttcaggccttttctagggcctttgagcccttgttagacaaatggtagtagaagaggaaacccaagctccccacaaggaccgcagctggccttgtcccagacctgccaatccccaaagctacactggctgcttccctccccttccaagctgtgtgtgacagaagggatgtagtgagctcactgtcaccttatccctagtgactggaagcaacccagagtgaccaggtggaaggggatggttaccttggtgattaaagcgtctgcctcgggctaccactgtagccttgacattcccaaggaccc

SEQ ID NO: 4599 - DNA, 1000 bp, mus musculus
cctttctccccatttctcatcctgggactctaaagatcagattccgcctgtccgtccacctccccacgaactcccgggactcggggaacaagctgtgcgatctagaccagctcaacgagggcacccggaggaaagctcaacccagacccgcagccttgaacttcagtcctggccggtgcgcggggctgggagcaggagggagtgcgcgccaaggcgcacccttcccaccgactgttctcccccgtcgggtgaccttgggcagtcccttcacctaacccgcctcagtttaccaacggatgcccgggccccgaggcactaaatgggcatcgaggagagctgccccgggcctcttaggccccgccctcccccgcagcagccaatcagacactgccgtccagggggtgtgtctcgccctgagccggggcccgggcctagggggcggagtttccggggcggtcacctcgccgcgggaccccgcaggggacgtccgaggggcggcgcgtgtcgtgggggcgcggctggcacgggcgcgcgtaggcggtgccgggccggggccccggacgctacggtcccacgacaggggtgacgggggcggaggcagccgcttacgcccctcctggcgcctcctcctgggcgcgcttggccctgcggacccgcaggcggagtgcagcctcaggtgcccaggggctggagggcacgcgcgagggcggggagccaggcgtcccctgtcccgggacagtgaggtgggtggacagggaggggaggggctcggtggcgcatgcgcgcggactaggggcgcgggtctggagacccacagccactggagagggcacacgctaggaagggcacacgcgtgcgagttttcagggcccgcggaactgtccgccacttcgagtcccctggagcgccgtgcgccggctccgaacattggtgttcgcagctgttttgggggctggagggttcgtggagtcctggaactggagcgacgctgggtcctctg

SEQ ID NO: 4600 - DNA, 1000 bp, mus musculus; identical to SEQ ID NO: 4599

SEQ ID NO: 4601 - DNA, 1200 bp, mus musculus
tacactcaggctcacagggaatggcagcccaagggctactcctactgctgggtttataatagacccaacctagtgtccatccataaggacaatgactcatcacgggacaaaggcaactcctggacatccagggtggcctgattccagtcctctgtacagatatgtcagggataagagtccctgtaggctgccccattccttagaaaccaggggtagcgatgagcttatatctacccagagacgtgacaatcttaggcttggtggcacaatcccccaagcactgggtgtggagttcaagaaactaaactgccacctaccaagctacagtgactgtaccttctgtaccatgagggtcccctgctacaacctggaccggagcccacaattctccatggtctgagcacatggcaggccacagacagctaacatgggcctcacacattcaacctctctatgggaacatgctggcagcaaaataccaagcagttgccacattcttcaccgagcaatcatctgaaaattagtgccagagaagacttttgggaaagttaagtgaggtgcagacaatctagtcccacactggggacagcccaggctcaggagctgacaacctgccacccacccatcctgacctctagattgctccacagagaaccagatcagctgtcccatgtctaagccttggtatatctaagggagtgtagcatgatggcgtctggcctcactgcggtgctgggagaagtcaggcatagaaggcagactccagcccatgtccgtgcatgtagacattgttccctgctgccactgttaggaacaaggaaacagacatgtgaggagacttccaacctatcactcccaggagaatcccagccagtacccaggctgttaaggctcccccagtaggcatgctctgtgattcaccagtagcaggtccctccttctatagcaagcaagatcttagccaggtttggaatcagtcagcgaggagcactgtggtgagcacctgaaactacacagctccaaatgcactcattcaaacaaagcacccacttctctccatgctcatctggtttccaagacaccgtcacctggtatctccccctacccctaaactcttcccactgtaaatgtcaaggaactaccctctcacaagagccagagaagaaacaccacccccagggagttggtataggagtacca

SEQ ID NO: 4602 - DNA, 1600 bp, mus musculus
tagggttttgttactgtgaagagacaccatgaccaaaacaactctttttttgtttgtttgttttgtttttcaagacagggtttctctctcttttattttttatttttagatttatttattatatgtaagtacactatagctgtcttcagacactccagaagagggagtcagatctcattatggatggttgtgagccaccttgtggttgctgggatttgaactctggacctttggaagaacaatcgggtgctcttacccactgagctatctcaccagcccagggtttctctttatagccctggctgtcctggaactcactttgtgtgaggagcgggtgtggcagcagtcccaagaagtcaccagggactgcagctaagtcttatgacttgcacctgacttcctcatacacctgaaaataagccacaactatcgtgagagctgcgcaggtgcaccaggatactggcgaatccattttggtggagacatgcccctgctgccctgattagctgaagctgcgtgcctggtgaggtgacatggcctgagtggatgagggctaagagtttataagagtgagaggcccaaggagtctaacgcgtgcgcgcgtggcgcaatgaaggtgaagggccccgcccgggggcccgaggtgggatcccgaggcctctccagtctgccgagggcgcaccaccggcccgtctcgcccgccgggccggggaggtggagcacgagcgtacgcgttaggacccgaaagatggtgaactatgcctgggcagggcaaagccagaggaaactctggtggaggtccgtagcggtcctgacatgcaaatcggtcgtccgacctgggtataggggcgaaagactaatcgaaccatctagtagctggttccctccgaagtttccctcaggatagctggcgctctcgctctttcccgacgcacgcagttttatccagtaaagcgaatgattagaggtcttggggccgaaacgatctcaacctattctcaaactttaaatgggtaagaagcccggctcgctggcgtggagccgggcgtggaatgcgagtgcctagtgggccacttttggtaagcagaacgggcgctccgggatgaaccgaacgctgggttaaggcgccccatgccgacgctcatcagaccccattttgtagatcaggctggcctcgaactcagaaatctgcctgcctctgcctcctgagtgctgggattaaaggaatgtgccaccatgcctggcttccaagacaactcttataaaggacaaaatttaattggggctggcttacaggtttggaggttcagtccattatcatcatggtgggaagcatggcagtatccaggcagacatagtgctggagaaggagctgagagttctgcatcttgatctttttttttttaagatttatttatttatttatttatttatttattatatgtgtgtacactgtagctatcttcagacacaccagaagggggcattggatcccattacagatagttgtgagccaccatgtggttgctgggaattgaactcagaacctctggaagagcaatcagtgctcttagccgctgagccatctctccagcccgat

SEQ ID NO: 4603 - DNA, 1400 bp, mus musculus
tacctttatttctgagacagcgtctcttactgggacctgggtctcaaccagtgagctaggctggatggccagcaagccccagggatttctgtctccccagtgtgtgcaccaccatgcttagattttttagttttattttcttaaaaatttatttatttatatttatattttttggtttttcaagacaaggtttctctgtgtagtcctggctgtcctggaactcactctgtaggccaggctggccttgaactcagaaatccgcctgcctctgcctcccaagtgctgggattaaaggcatgcgccaccacgccctgctaaaattttatttatgtaatgtataagtactccaaaattttatttatttaatgtataagtactctgctacatatacatctgcagggcagaggagggcatcggatccccttatagatggttgtgagccaccatgtggttgctgggaaatgaactcaggacctctggaagagcagccagtgctcttaactgctgagccatctcaccaacccttgtatttttttttaatcatgggttctagggatcagactcaggtctttgtgtttacaagctaagcctttacccaccaagcacccctccagccctgctctcccatatttgactctttcattctgatcaggtttggcctggtttctaagttggaatattcattttcagttctaacttagtagaatgcatagttatcccctgtgctttgtgacatacaccatgtctgaagaattcttgaagggtgttttcaggtcacatggtccaagctggctctctcctgcatccagccctgcagtgtctaggggtgtgtgggtggatatttaaccacccattgtgactaaatcttcatttatagtgttgaccaatttccatggtgtaagttttttaactctgggagacttcaagccatctgggtaaagccaccaatcactgagatgggcagaggtgcgcagtaggttgtgagcatgtccaggtgactctagcgcacttgcgcacttcccccagcagggccctttcttggtatgaactgagtgtggactgcattctagtttgcttcttgtttctgtgacaaaaccctgaccaaaaaccaacgtgggagaggaaacagtttatttgctttacaggtcacagtctatccctgagggagatccagacaggaactcaaggcagggacctggaggtagggattgagacagagaccacgaggaacactgcttcctgggttgcatctcctgacttgctcaaccacctttcttattgagcttaggaccagctttgcccacagagggctgggctcttttctccaccacttatcaatcaagagaatgatcaacggacatgctcacaggccagtcaatagaggccattcctcagttgag

SEQ ID NO: 4604 - DNA, 1200 bp, mus musculus
cctggctctgggcatgccttctggtagttaaggatggactggcttccatgatctcctagactaaggacacctcctggactttcgggtataatgggaggagggctttgggaaagggggccactccatcaagttaatatacacggcaaccaggaaagccccctatccatcaagcgggccagagcaaagcaggcagaagcaatcgataacagagagctgtgcagcgtgctgagtgctgtctgccggcaggaagccattctgggccattcacttaattttaaaacatggctgagggaggtgtcacctcacccctgcctttgcagtgaggcagctgagggattagtgggtaatctaagcacctgccccccagtggtttaacatctctgagaaactcccgggagccctggaatcatgacagcgaggtcccttttcttcatcctgccacttcccccaaggagaaatgtctatgtgtaattcaaaatccacagagatcctccctgggtgtctggagtagagtgggaccaggaagatcccccaggcccccacaggttctttccaatgctctgtgctccatcacaaagtctttaaaaaagacttttaaagactgagacatataaagagctcaaggcagtaacctatacggcaaacatattttcataaagatagctatgtcaggttgggaggttttggtagcttccaacttcagacagagggagaacacacatgcaaaatgaaagaggggctgcctgaagtgcatcccacagaaccaactacctacaagtatcaccacagacactggtttgtgtcagtgtgtataactgtaaaagcatgggcaaatggggactggagagttggcaccgtagttaagagaactggcagctcttccagaggacctgcgttcgattccaagcactcacaaggtgtgatcacaatgcttttgtatttccagccccagaggctccattgctctcttctggcttctgtgggcagcaggcaggcataccgcatcatatgtatttatgggtgagtgatgagttcctggttaagataatttttcaaattgttgaatgccttgattcctgtagaaggctaatgaacacagcagactttaagaaagggtcattccgtgctctgattcacaaccttattaaaggagcaagcccattttctgggctctccttctggaatgtccctggaaagtgt

SEQ ID NO: 4605 - DNA, 1000 bp, mus musculus
tatctatctattcattcttgcccctgtggtcctcagacctttggcctcttgattcagctgcttacggcacatgttcatccagctatctggaaagcacctggatccctcatccaaacatcacccccactccctccttactgtccctcctgcgggtgctactgattttcctcaacctcacccctgctggaagcactgcttactttaagtgtatctcgtctgtgatctgcccctcgggatagaagagaaggccccagggatgtttgcttctgcacgttatgagaggcaggacagactgcagacagtaaagacactctagcgtgtgtctcagaaagaagggaggagcacaatttgatgcactcagacactaggtctctagacaggctggtggtggctgtggtagagctgagctggggacccaggtatcacagacatcttttagactgctggttaggcctccgcagtgccctgcgggcaaagcctggcctgccggctgctgaactcgcccatccgacccgattggctagcctctgggaaagagcgtccccggctcgaagataacattgtccagccaaatcttattaaagggcagacaatgtttaaaaccaatttgaagtccataaacacctcgtcccacgcatccacagccctgaccgcggggccttcccgatctgtcttctcccaggaggagcaacgccgctcctaggaatggcttaatccgattcctctgtggctcccaggcaggcggctcggggagtgtttattttccagacttccagactgtatagaaacagacagcttgtacctgcgccaatgtggtgtctgtattttgggtgaggatagcatgcaagtgtactattttgagggtgcctggccagacttctctccccaagtcccaagcgccaaagctttctgtgcaaggaagtctatagttagtgtcccctccctctccccctctctctccccttatgctaatatttaaaacttgatcctttcaagagaa

SEQ ID NO: 4606 - DNA, 1000 bp, mus musculus
actgcggtgtttgattataaatatgagacaattctgtgtgattgctaaacagggcaaacgagcaaacagacggggcagagacacagctgggaggagaatgtccccggaggagaatgtgctgaggagaactgggaggtgcggctttaaactggaccagagcttcttaaagagactcttcctcgtatcatcccccgtgagaacgtcttggagaatacagggacaaatggtacggcaaggagtaagaagaagaagggttgtggaatatggggaggggtacacaagatacatgacatacatgcctgaaaatggacctatatgtaataagaagaaagaaaacaaaagtcagatgttcattcccacctgaccagaggtctcgatgccgctgcagttcttatggagtatacttatacaagttcttagactgtatcaaggactcctgagaaactgcctggttccaggataagaccagagaggctcagatagtcctgagcagaatgagtgctttccccaggtctgaagccggggaacacaggatctgccaggagggggcgctcataggccacatcgggctcagtgggaacccaacaagggacactagtgatgggtcctaaggtagcaaataaaatgtatttgagaacacagcgtaagaaagaaataaaaactctcaagaaaaaaaaaggtacaaaacactaagaaaagagacacagcggatgaaaggctggggcacatgcagaaagggctgtttgcagagatgcttctgctctggtataaacagatacttctgaagcaaagtcccctgtgaggtctcagagagacacagtggagaggcttatatgaagcactctagacatcctgtgagctgtgcaggagggtcatctgctggatgccactgccaccccaccgctccagtgagaagaggcacaccatctcggcataagaggtaatctatcccgctgcacacctgaggccagtggggaatatctagataggctctgactga

SEQ ID NO: 4607 - DNA, 1000 bp, mus musculus
acattacaaaataatatcaaatttgagcaatgcctatctaccaataggggctctactgaagatgctcaaagcaaaacttcattgtgaagaggttaattgcactcatgaagatattaaaaataattaatccctgagcactaaaacaaaagagaaaaattcacaaaaataaaataataagaatcaataaacactgttcattcataactctcaatatggacagtttcaatatttcattaaaaatgacacagaccaacacattgaattaaaaaaaaatctatctttctgctacatccaagaaatacatcttaaaatcaaggatagtaatcacctcagagtaaaaagatggaaaaggtaccccaagataattaacccaagaaacaagcaagataattaacccaagataattaacccaagaaacaagcaagtgtagctgctttaacatttgagaaattaaacttaaaaccaagacttatccaaaggaaaacaaaagagatgggaaaggacagtgcatctcatcaaaggaaaacaataaagaatattgcaatcctaaacatctatgcaccatacacaacggtaaccaagtccataaaagaaacaccactacagctaaaaatcacatatcatggcgagtgacttcaacaccttactcttgccaatcgataggtcatacagagagaaaccaaatagagaaatgttggaactatatgatgtcgtaaatcaaatggactcagcagatatttatagaacattccatccaaacataaaagaatttaccttcttcttagcacctcactgaactgtctacaaaactgtctccatgtactcagaaccagaacaagtctcaaaagatacaagagaagtaaatgacaccctacagcccatctgaccaccaggaactatatctgaatatcaacaaccatagaaacagcagaaagctttaaaattcatagaaactgaacaattcattatggaataataataaaaaatagagcaaacaaaa

SEQ ID NO: 4608 - DNA, 1000 bp, mus musculus
ctaggggtgagccttgaggccttggagccctactctatctcctgttaagtccctggacctgactgtggatgcagtgtggccacctggcctcctcctcctgtcatgatatcatctctgcctgctgccgtatcttccccaccataatgatatcctccctttaaactgtaaaccagcagaatacactgtaaataccccacactctgaaaattggaacttgttgggatttccccacagcaacaaggaatgtaaccaaagcattattaagatctggaagaaatacatttataaaaattgataatgcaatgtactagataaaattcaatatctcttcatgatttttaaatccacttaagatataaaaggactattaaaaatacataacaaacataagatttagcataagccgattaaagtgtgttacgagccagcaagaacaaatgaagcataaacgatattttacttctcaatgggaaaagtcctaaccagtacaccaaaaacaagaaaacatttttgtaatttagaaagaaaaaatcatttattattaaagatgataaaatcacaaattttgtaagataaaaattgtgctacaaacacataatcatattagtactcttctttctaatcgtcttttcttcgccgtcccaagcgtgtttgtgggtgtcgtacaggtaaacaccaagcggactctctttcgtgacctcactgggtttggttggcttccttgactggattgtgagatcggatctcccagcggagcccagcctagtgtctaactcttgctaattctcaggtttcacacttccaagtgccaggatcatacgtttgtaacacggggccctggtgttgttttgtttttaaaacaggctctgatcaggggcaccttgcatttccatggccttgaacgcagagtcctcctccacagtcccaggagtctaagcatgcagcccgccacgcctagcaatagtattgggattagagtttagcaaggatgcttcctttt

SEQ ID NO: 4609 - DNA, 1000 bp, mus musculus
tgtgtattcaatgcaatacttgatccagtacaagcacttgaaggttagaatgtttactcttgttgcatacaattaagtagtaatgtagaaggcaggaataaggacagtaatttgtcctccccctcatccctggccaccagtgacaggcagaggagatggccctgaggtcatcaaagcacaagggcttgccctccctccctctcacctgctgcagccctagggaaagcaggctctgcacctcacctgggcagcatagaagagcttaccctggatgtaagggttgtggatgagccagccccacgtgagaaagtaggagagttgtccctgcctctctcccctctcttttggcctctctactggcaactggtgagagagttggccccaatagcagtcataagatcaggtgagctgtgcctagtccttgcctgccgtagcactcaggagagcaggccctgaacctcatctggcagcatagtagagctgatcctgtatagtaggggtatggacgaggaggcctgaagggtacaagcatgaaagagctgctccctgtcacttgtctgccatgcagtggcttgagtaggggagagatgtcccaacatgccctgctccttggcaccaatggcaggcagaagagctggccccaagaacatcaaagcaggaaaagtggccctgtccctcccctgttataacactagggagagcaggccctgcaactcacctgggtggtacagtagagctggccctagatttgggaagtgtagggaagttgtcccaaggatgatagtgtggaagagctggccctgcctcttgtctgcttggctgtgacacagacaaggcacagaaacagccttccctctccttgtcccttgccatctgtcttagtcagggtttctattcctgcacaaacatcatgaccaagaagcaagttggggaggaaagggtttattcggcttacacttccatactgctgttcatcaccaaggaagtcaggactggaact

SEQ ID NO: 4610 - DNA, 1000 bp, mus musculus
tatctaagctgcatacccagacattgaattatgttttaccattctgtaactggttttaatggaggcatgtattcaaactttacttataacagtaaatattcttaaacttctttcgattttagttcattgggaatcctgggattcagaaatgtggattgaaagtaatctcttctctcgcgcaccttcctgatgccacagagacattgtccctgcaaggagcagttgactcagtcctccacaccttacagatgtatccagatgaccaaggttggtaaagatagagcttggaaccactgcttattgtcttagtcagggtttctattcctgcacaaaacatcaggaccaagaaacaagttggagagaaaagggtttgttcagcttacacttccacattgatggtcatcaccaaaagaaatcaggacaggaactcacacagggcaggaacctggaggcaggagctaaggcagaggccatggaggaatgctacttactaactcacttcccctggcttgctcagctagctttcttatagaacccaggactaccagcccagagatggtatcacccacaatgccccactcccctccccccatcccaaattgtgaaaatgtcttacagctggatctcatggaggcatttcctcaaaggaggctcctttctctgtgatacctccagcttgtgtcaagttgacacacagaaccagccggtacacaatttactggatttgttttttattccttccttctgctttaaggttaaaagaataaccactgttaatttttctcttttattttagaaattcagtgtctgggcttacaccttatgggatgcttgatgacaaagaagaatttctgcatagggacagggcacctcctggcaaaaattctggcttccactttgcagcgctttaaagatgttgctgaggtgcagactacagtaagtgcactcgagagacttgggagcttacacagtctcccactattctcgcaactcccgttgt

SEQ ID NO: 4611 - DNA, 1000 bp, mus musculus
agagaagaaatgaaggagagaagagaataaggaagagactagaaggacagagctggcagctgagctggcactgagaatggagtgaggcagagcactgagtaaggtcatcggtctcctccttgtcactccttctaacctgggtaccaggcatcccttcataagctctgagataccaggcaatctcctgttggcaaggccaggtgatagatgttggtctaatcagtgggagattcttcacaggttgggcaggaactgctgctcacagcctgggtagaccttccttatgcccactgtgccttcctagaacctatatctatatcccctacagactctggctccaaccagactctaccttgctaaagaatgtactgttttaattcagagtttctatcccactatcagaaggtgtcctgctggccatcttttgggctacagcgccatgatagtctgtgtgttcccaagacagtgttcgcagatggtctgggtgagccaagccaccacctgaacagagctctccttaaaaaatagcatcacaaaaggttttctggttcctctcctcctgatacggttgcctgcagcttgtatctcgctcattctctgctcctttaaatgtgtacttaaatgggggtctggagagatggtgcagcaggaaagagcactgactgttcttccagaggacccaggtccatcccccagcccatacatgctatttcacaattacccataactccaaaaccaggagatccacatctaccttcggacctctgtggacaccaagtgtatatgtagtgtatggacatgcaagttaaacacacacacacaaaattaactaattaatggccattactgaaagctacagtattttctatctgtcttaagtatatcttgagtctcttcactaagtgttgggagaactctccaacaatctcagtcaaacaggacccaacattctgctgcttacaggaaacccatctcagagaaaaagacagacactacctaa

SEQ ID NO: 4612 - DNA, 1000 bp, mus musculus
cttctttcccttcacctgttcactcaatccagttagtactttcagtgtggacatggatgtagggccttccactggcgtatggacagcttacagggggtagggcacatccctgagggaaacagactccccctcagccagcagccagcagctaataggttctctgctggtgtggggacttgggaaggatttctttatgttcccaggccagcctgtttgtgatgctcatgacacataagttcttgtgatgcctgtaaatagctccttgtgttttcctctcagcaccactgttgccagcactcctggccttataatcaacatagctaccttatgctgtctctgtggtaaacaaacaggtcacagaaggggatcccttgggactaggaccctccagggagctacagtgttatatttaagagaaggcctttatgtaggcaagagggtgcagcactggggaagacagtcctactgctagaggcaggtgagcctggctaatgccaggacatcaggtaagttgattgaaatctgattgttaaactggggccgatggtgggacctgggagtcagaggttttaatggcaaagcagcatctcaaacagtgctggaaaagagaaagagaggttggaaaagtcagtttcctaattttcttcccatctggcctttcggaggatcacttgctgcctgctgaattgaagggaggcagagcgcatgcttgcttgagccttattctcaaatagttgaggttttaggtggacacagagagagccattgctttctgtgtaacagtgtatttatctagtttgcttcacggggacaataaggtgctttcagagtgattgcttcagaagatagattttagagctctgttagttggccagccttggtctctggcatcagaaggaatgacacagctcatgagcactgtgattctcaggctgaggcagagtgtggtaattgagtagattggcagccctgtcagctgcctggggcctataggcagtag

SEQ ID NO: 4613 - DNA, 1000 bp, mus musculus
tgctcactggctgtctgtcctgacagagactctgctccggatatcagatattgtttcatgcctctgacacatcaggcacctctcactggcaccagtgaacccctgcactgccactcaaccttgtacccatccagccatttctgtggctcatctctgaaattccttcagagggaggatcccaagcccccccagctgccagtctggccatctcacatgtgttagagaacggtcactatgtgtccaggaatggtcatatgaatgcatgaggggactgagcagcctcacaccttatcccttgtcactaaggacttgactaaagatattagcaaatagaggcgcagacgacttatcctgtgcaccgacgggaattggaccgaggaagtaggacccagagattcatgctgaagttgtattttataagaactgtttttaactattgtgtgagcttttgtgtcttttttcttgttggtttgtgtgtgtgtgtgtgtgtgtgtgtgtgtgtgtgttttgacacagggttttctgtagtccaggctgaccttgaactcacaatgaagctgtgatgatttgtctatgctcagcccagggagtggcactatcagaaggtatggccctgttggataaagtgtgtcactgtggatgtgagctataagaccctcatcctagctgcctagaagtaagtattccactagcagcctacagatgaagatgtagaactctcagctcctcctgcaccatgcctgcctggatgctgccatgttcccaccttgataataatgaactgaacgtctgaacctgtaagccagccccagcaaaatgttgcccttataagagttgccttggtcatggtgtctggtcactgcagtaaaccctaactaagacagaagtcaagggtgacggtgacgttgaattcctgctcctccagctcccaagcttggggcttacagagcaagagcctcctggtatttatatacacgtatttgtggccaaaagaaattgc

SEQ ID NO: 4614 - DNA, 1000 bp, mus musculus
gggggtcggaggaggcaaggagtgcggaaggagcggagagcaaggtggagggaggcgctccatgaggatcggagaggcgggtcccaggggtgagcctggagatggggggaggatcatcgggggcacaggctcagggtcagtgcagttggcttccggtggagggctgataggtgtctcgaggatgggggcagccaacggtgactcggggtcactgtcccctttggcaccaaaggggtactctaactcccccaaaggagacaaggctggaggggctgcagctgggataatgggtgagagtggaggaggaagaggatctggggaggagagaagaagaggctctgagattagatgtgccataacgtgttcagactgcccccagaggaacagaacactaataccgccttacctggtggcatcagctgaggtgacaagactggctcccccgacagggacaagggcagctcctcgggaagtggggatagaggtggttccccaggctcagacagggctggctctccaagcatggggggtaaaggtggttccccacttggggaaaacaaggacagctccttaggtgcagagctctggcttggttcctcaggaggctctgcaggctgaggaggtccatttagttcctcaggctgtggggacaggcatggctcctcaggcatgggggacaggcagggctcctcagaatgaggagacaggtgcaactgctgaggctgaggggacaggtgtggctcctcaggctgaggggacaggtgtggctcctgaggcacaggggacaggtgtggctcctcaggctgagaagacgggcctggttctacaagcacaggggacaggcatggctcctcagactgtggggacagcggcagctcctcaggctggggacagagtcggggctcctcaggctgaggagacaagtatggttcctcgggctgagggcagagtctcagctcctcaggcagtggcgacagcggtgactcctccatcggcaagg

SEQ ID NO: 4615 - DNA, 1800 bp, mus musculus
gcagaggccatggaggggtactgctcttagcttgctcctcatggcttgctcaggccgttttctcataaaacctaggaccaacagcccatcaaccatcagttaagaaaatgctctataggcttgcccactggccaatctagttgggaaattttctcaactaaggttccctcttccaaaatgactataacttgtgccaaattgacacaaaactagccagcacaccaattaaatatgtctactttaaaacatacagcccaaagatatagatgttctgtcagattcctcttagaatgcataaaagaaaaatttggatgtccaagaacctcttgaattagaaataataataatttaaaagggtttgttttattttatgtgtaggtctgagtgtatgtaactatatacacatccatacaggtgattgtggagccagaggagcgtacagacagatccccaaaactggagttacgggcagttttgagctgctctttatcggtgctagagaccaaccctggatcctctgcaagagcagtttcagcccatggaaaacttcgttacagtacatgtctgtaagcacaggcagccaaagtggtagcagggatagttactaaagagacagacagtagagggttgaaacaatttaatcacagaagaataagcaatagtataaaatcattaacagcgcaaccagtggctgctgctctccaaatctcagctcatcctctcctaccctccccctccctgcataccattaaataagcagcagggtatgtagttgtccctgccactagcaggtgataggaaggggacatgtagctaggagctatgttgatcctgggtagtgttccatcaggtgaaatattacttcctcctccaaaagaacaattttcaagtcctggagctgagtctggtgacagcacttatttaagtgatcaggaacccagagtctcaagagccatgggacgaggtcacagatggtctggagacagcttaattcaagatgcagccagggctggacttgaggtgggctcagaagtgaccagacaatgactagtaatccagaattgtgccccaaccgagtcaatgaaactcatttatatgcacaatacacatgtataatcacacacaaaaaccacacaaacacagagccaataaccttactgaaaggaccagagggcattaaatacaaaacggcagagtttctttaaaacacaaaaatatttctttgattctcctcagtgccttgcagtccctctagtcacaggagtgtagatgtggggaggccctaaaatgtaggttgccagtggctttacaagtcccctgctcttcagccaagtggctgcctcccatgtagccgttcatgcagttggcaccattgctagagctgctgccagagaggttgtttttgtgggttgtctcatcttcttcctctgagctgctctctacatcactgcggtcatccttagacacctgagggggacaggaccaaatgcagtacacacgctacgtttcatactcacggggcaggtggatctcagagcctaggaaagcccactcgtgtacctgtttctaggactcacggggcagatgagtctcagagcctaggaaagcccactcgtgtacctgtttctaggttcggtgacactgacttaaatgcttctgtgtcactggctgtgattgtgaacagagtttgcctgcttcctgttttgctttcatttatgccattctataccagaaaggctgctgtgatgccacactgagtccatgtttagttgtgaggaaaactccagcacttcttccctc

SEQ ID NO: 4616 - DNA, 1200 bp, mus musculus
tagcagtgttcttagaactcaattaatggtttaccctgctgcattaatgagctacaaggctcactaatcagtggacttttaagtgtcactaatttacttatctgtgtgtgtgaggggagatgataggcaggcagacagacagacagacagacagggacgggtggatgggcatgcccatgccacggctgaatgcggaggtcagaggtcaaccctgtgagacactgtcttcccctctactgcctcttcctaggctcacatctaggccttcaagcttggacaaccacacagctagcactttacccactgggccgtcttggtggccccaccttgcgacgtgcatgttgagcatagctcatcatctgcactaatgaacctccacgcccctttcttcccctcagccacccctagctcccaggttccagcgtgaggcttggcactcacccaagggtaagtcagtgtggcgacgtgcagcacgggcttccccgggtccctgctcacctgtaagctctgcaggacattcaggaagtcattcatccccgttaggtgctccacatcctggaagacagcgacgagcagggtggggatgatggcgatagaccgggtcaggatcactcgggcaaagcgcgaccattttaggttcaggaatccctggaaggaagcatggaagctggtgactgaatgtgacagagagagagatgcctggggaagtcaggaaccctcagaagcgtggggctagacactccaagctgtgcaagctccctctatttcaccccagcacacacctccatgacaaactggccagaataggttccagtcatggtggagctctgaccggcagccaggatccccactgcccagatgtagagagctgcaggcccgaagtaacatccaagcacaacaccctgggagaaggagggagagacaggcttgtcagtgacctgcttaggtaacacccagagcagcagccctctgcagcacctccctctgcttgggaacacccgcacaccaagtatcatgctgggcactgcacaaaggggcgctgactctggtcagacctgggggcttctgacctcactctgctggtgccctgcatccctcagcccagccctccctcctctctgtgctcacactcaggaggcagagctcacacttcccaaaacaagctcctcgatgctcctttctgggaaatggagggaggca

SEQ ID NO: 4617 - DNA, 1200 bp, mus musculus; identical to SEQ ID NO: 4616

SEQ ID NO: 4618 - DNA, 1000 bp, mus musculus
tgactcatgccagctgcccaggctccagatgcatctctctgtcatgcccaccgctgaacaagcccctgctactgccctcgcctctcctacccaccttagatgtgctgtgccaatcaatcccacactggccgacacccttttatgtggcggtgttgtcttagagggccctcagcacagggatgccctgattcaagcatgggcaccttttctgccaggcgaccatagtagtgagacccctacagcatgacccttacactgcctccccactctggccccctgcacctctcctgtggaactccccataccgtgtcaatgtacacgagatgccaggccagtgattcaaactgcatgatatacctcccccggcagcccactgagctactcacctagttcttagatgtggaaacaggtcaaaagttaagcaatttgactgctcatggtctgcaggcgacagagctaggatgcaaagcacagtcgtgtttcagcgagttttctaggccccaaagacctttgagggctgagcacttcgctttggtcacatctgcaccggcttcgctaaagacgacatttctactatgctgcacactgtcccctatgcttagcacaactgggaaggtggtggcacacatggataagaactgaggaggaagctgtcttttcttaccatttgtgcatgtgggtgtttttttctgcaccacttgtagtactggagaaggccaggagagggcatcagatcccctggaactggagtttcacgtgattaatgcgaaatcttgggtgcttgggatcaaacaccatcttcaagaagaacagccagtgcttttgacttctgagccatctctctggccccaggaggctgatgactggtgggggccagctgagtaaaccttccataggggtccctggatcatgtttgtcctatgctcttggccaaggggaagtcagtagattcaatggccccggtcctgacgatgcccgttagaagccttcatttccttcc

SEQ ID NO: 4619 - DNA, 1000 bp, mus musculus
gggtacccccctaacctgacactttaggtctctgtgaggctaggtgcttcctttcccactgaggccagacaaggcagtccagctagaagagcacatcccatgtacagacaacagcttttggggtagaccttgctccagttattcagggcccatatgtagaacaagctgcacatctgctacatatgtgcagggaggcctaggtccagcctgtgtatgttctttacttggtggttccatctctgagagccccaagggtccaggttagttgactctgttggtcttccccatggagttcctatcccctttgggggcctgaaatccttcctcctcttcttccacaagagtccccaagttccatccactgtttggcatgagtgtctgtgatgtgctatgcgccaggctgagaggtcaccagtccctttgggagctcacgttcaaggagatcagctgcttactgtagtgtgacaccatgattcatgacattgtttgtaactttttggccatgggaggcatgcagcactgctcttagcactctgagaggcaggactttgcctgctgtgttgcatagtgggggctttcagcatctgtccaatccaagcagacaatgctgcatattctgtagcatagagcaacacccagcagagcccagtatggtgtttgaatctgccagtttgtaactcatgggcattggatcgattcagggggcatacatattttagctcgtgccttaactcctggaatcaccactccccatccctgccttgaatcacttgtaccaaaccagcattctttccaatccttgccagaaccctgcagggcttgaggaaaaaaccgacattgctgtggaaccatttctccttggctccctagctttaagcaggcagtgtgcttttttttttttaatccagaaatctaaaatcaactttgttacaattaagtttttgccacatgttggttcgccaatatgtcattgtaagtgcttaatctcagtcatgggttt

SEQ ID NO: 4620 - DNA, 1000 bp, mus musculus
cactctctagtccatgactgagcacaggaaaagaaatgccatgatttgctttttcttcacttattttaggaggtattggccatcagacaagaaaaaagcctataaaaagatgattcctgatcttggcaatggatgtgtccaacagaaattgggggggggggggccgcgggtaatagtaggagaggggagggagacaaagagcaaacacattatctatgaaaatgtcatgataaacatattattttgtgcagtagctaaaaatgtaattatttgttaagttacatagagaagtacaggaaaagcctggagatttggagacctagctcccaacacttccgtttctgctcacgtagcaccctatgaatgcgctgtggtagctgtggtcgaggaagccagcgtccacctacactcactcccacagaactcaaggactctactggagtcggtcctaccgcgcaaattaacatgccaatcctcgtgcccaactataggtgcccagcgctcacatctgcgagtcagtggggattatgctgggacttgtactggcctcgcttgattcgctcaggtttggttaaagagctgcgggcactcatcccgtgcatcagccatttattgtcctgtgtgaaagcaactctctccaagcttaagcttggtcagcattggtgaaccaaaatattcattaattgtcacgtgtaaaattaaaaacaaatagcatacttaaatgagtcttgggagctatccaaaggggtggggggaggaagcagatttatgcttgagcaagttcctggcgggatctccactgcggcgactcctctgagagagcccgctcattcccaggctatagaagtactaaaacttcctaatattcgagcgaaaactgttctttacagtgccaactcagaattctgtcttcatgaccaaaaatcccacgaagtgaaaagcaaactgaggattgtgcgcttggaaaatggctcgtggattcactccaccctgatgtttt

SEQ ID NO: 4621 - DNA, 1200 bp, mus musculus
gcctaacacttgcttatcaagtcagagacttggttgatttcacaagctggaggtttgaacttgagtaagacatttataaaaacacagacggggcaatgtcctccccagcccaggtgccactaggcacagcataagagactaagaattcaacaggggaaaggctggacactcagggtttgggagtataagcccccacttctggctcagggggttgagaagcaggataaacaaaatgaacttggaaaagaattggaaacccagcaatttgccttctacagggatggggctcgggaaggaggtagggacagggcatttcacatcactaacctaacgtgggaaactgcaagggaccatcttcaactggccttaagagtaagaccaaatggctgatgggagaatccacaggagggcgaaaagggagcatggctgggaggaggcaacaagccccttcctttctgggcacaggaaggcagccaaggcacaaggtccaggcagtgacctcacaaggacagcacagtttttgcagcttagaaatcacccacctgtccccacccctactcattctgctcagcactggcaggtgtggggccactctctgggtccgagggagtggatggctctgcagcctggggccttgccttttcttctgtgtctccttccttggaggcagcactagcctctgcccccttggcctggggctcttggctctcagggttggcagcggccttcccttcttgggcagtgcccttgttgctgcagacgctcatctccccctgctcctgctcttcttctgttgtccaggaggctgaggaatcacccccaccctccttccgatttctgttgaaggacaggccactcaatttgaaaggcttcttgaaagagaatttcttcttcttcttgggggtctccttgggggcgacctcccccttggcctcagcttcctggctagggggcgctggctcgatggcatcaccagtagccccagctgcctcatctgttccgttcacggatggtgactccccttcacccttggggggttaagtctccattgcttctcacgtggccattctcctgtccgttggccttcgctggggaagcacccgctgcctcctcggcggtcacgtcgccccccccctccccgccccacaccttcttcttaccattagggatactcaccctcaagtgtgtgaatgtacgtga

SEQ ID NO: 4622 - DNA, 1000 bp, mus musculus
ttcatctgcttcaggctatgatctgctcctcattttaactggtctttccctcccatatatcatcatgccaaggtcagctgctattagggcattcttcattcagaaatgtcaaaagtatatagggtacatagagtcacactgacctctgaagacttattttgaaggtgtatgctgttatgcatagctgcatcctgcagaccaaaaaaaaaaaaagttacatggccaagccttatctatagagccaggcaaggatattttgcctctgtgatggtcacatgaatattgcttttataattctgtcttcctgagtagctaaagtcaaaatcactcttctagaaagctaaactgcataaaaagccgtgtcatataaaatgcaaaattaatgataagcatgtgtatctaatgtataatacaataaaaatgtaattggtaaatattgattttaaatgtaatactgcgtatggatttgtgaaaaccacaatcatggattttcaaaacaatgagagtaataatacatttgatcaatcgttgagacattcttaatatgaatgttttcaccttgttcttggaattacagtttccaaggctctatgccatgatcagtcaggaagttattttggggatatggtcagacagcacctccaaacaggaacaagcatcagaaacagctttctcaccccaagtcagaaagcaaagaaaagggaaaacagataactattggagttctagaagttccttcatgaaaagccttcaaagtctaaaagactcaccactgtgtcccaactctcaaaggtaacactgtttccctgggaagaaaatagcccatgcatgaccccttgtgggcctatagggtacctataaattagaacaggtgaaaccattgaaaatacatgtactttggtagcaactcttccagtgtcttttcatgcatattcagaattctactttataaatctggagtgtcagttggacactgctactttagcctagaatcatggtg

SEQ ID NO: 4623 - DNA, 1200 bp, mus musculus
tgtattctgttggtgatgcttacatctatgactcctgatgtctttcctaggttttccatctccagggttgtttccctttgggatttctttattgtttctatttccagttttagatcctggatgattttgttaatttccttcacctgtttggttgtgttttcctgtatttctttaggggagttatgtgtgtcttctttaatggcttttacctgtttacctgtgttctcctgtgtttctttaagagagttatgtttttcttaaagtcctttatcatcatcatgagatgggaatttagataggaatcttgctatcaagtgtgttgggttattgagggcttgctgcggtgagagagctgggttctgatggtgccaagtagcattggtttctgttgcctgtgttcttgcgcttttcccttgtcatctggttatctctggggttagctgtttttactgtctctgactggagcctgtcccccaccccccaccccccatgagcctgtgatcctggttgtgtcagaactcctgtggtgcctggtgtctctgtgatcatatgatcctgtatatgtccgaagttctgggtatgggtggagtgggcagagatccagagcccagagtctgctctggggttccagtgcatgccggaaggaacgtgtgcctctggttaagtgggggtgcctacattccctggatcctggggtggggcatttaggccaggtattgagggatgggtgagtggggggtctcacctgtgactctggatctgtccgaagtcctggaggacaggctgcctctgggtgtgggtttgttggggaggacggagtacaggctctgttcctggggaggtgcaagccaaaaggactatgtgcctttggctagacaggggtgcctgtgtcccctagggggtgtccccagttaggccaggtattgggggtagtcctggatctgttggaaatcctggggtacaggctgcctctgagtgttgtggcttatattttaaaaaagaaaagaaaagaaaaagactatgaagtttggagaacataaagggtggatctgggaagagttagggataagagttgggagtgttacatgaaagagtaaaatagattgtatacatgtgtaaaattctcaaatgcataataaaatattaatggcctttaaaaaaaacaagctctggaggacctgagtcctgatctaagattga

SEQ ID NO: 4624 - DNA, 1000 bp, mus musculus
ttgttattaaaatgaaaagctgttatataaaagcattttgaacaaaacatttttgttcattattcctttagacttggaatgtgtatgtctatatttactttcttcatgtggatctgtcagaagtctaaggaagaagaacaataagagagcgaagaaaagaaagcccggcacagtggcccacacctgctatctccgcacataggaggctaaatcaggggttgtctgtgaatatgaggcttgcctgggctatgcagtgggactcttttgtctcaaaaaacatgagtaagaaaggggagaaggaaaaagaggaagaggaaggagatagcagggaaatactacttggttttaaaaataataaccaaataaacaccccccccttttttttttcaccaaaataggggaaactgctttctgaaggataatatgttacaaaactctttccaagcttatttagaacaccatcaggttccaatgtgcctcatagaaaaacaagtagatggaggcacttggcacatcaaccttctttgcaccaagtgaagggatgtttgccgtaatacctgcttgctaatggaggaacagcaagtgcagcaaaagagtgagctgcaataggcactccgttcattaggcaaaacctcagaatgttaaatgaggctgtgatgcacagcacatcctactatcataaagatgcggataatacccaaaggacgcactaacagtgcctaaaataatagacacacagaaagcagccatactggaagagtgaacagattgcagggctgacttaccagcgcgaggagccaacagggtattgccaaaagttcttggttggagccatcacactaaaagtaaactacctcagttaactcagcacagatgccaatgtgcccaaggatcccatttggattaggagtgccattttccttattagtataatttctaaagcactataacaaataagcacaaggagccatgctaaattcatgctcttgttagcagtata

SEQ ID NO: 4625 - DNA, 1400 bp, mus musculus
aaactgatactgcattgatttctatttaccattgatttctgtttccacattgtaatatatatcttaaaaattatctgtcatagtctaaactcaatattagtaggtttagacgcaggaagagagcaatcttctacagaaaggagacttcagtatggtcacatgttaaatgagggaagttcttcagatatgctgagtagattgagactacaccaaatgttttctctttttattctcttttagagactctggggaaaagagatcttgtcacacagttgtagcagggcatcctttttcatatgttgagttgattcatacaaggttcaagaaagatggcacacctctgggtaaatatatgaacagtgaattgacagtgtagctgctgatgtccttagctgatgttcaaaaccaggttcttagtctttacaaggtagcctataggctattagttctgcagaaatcctccagtaaccttgactctcaatgaagtttgctttacattcagctggtggttaagtttcatggggatttcctcattaatttgttgctcatttgtatgttttctttccagaaacataaatttagatcatttgctaagttttgtctacatatgttgtatattagatgttaatctgcaaagtgtggtctttttgtaatttttttaaagcctgaaactatatttgttttgaaatgtaattatatcattttcccttttcctttttccctctaactgcttcttctcaaactcacagccaaccattggactgagcacagggtcccgaatggaggagctagagaaaggacccaaggagcagaaggggttgcagccccataagaggaacaacaatatgaaccaaccagtacctcccagagctcccagggactaaaccactaaccaaagagtacacatggaggaaatcatagctccagctgcatatgtagcagagaatggccttgctggacatcaatgggaggagaggtccttggccctgtgaaggcttgatgccccagtgcagggaaatgcaagggcagggaggtcggagtgggtgggttggtgagcaaggggagggaggatgggattagtggattttggaggggaaaccaggaaagggaataacatttgaaatgtaaataaaaaaaaaatctaataaaagagaaggaaaccctctctctctctctctctagctattgttaaatatatattattttaatgatgatcttatggaaggcaattatttaatgaatattttcccctgtttttcctggtttcagatcagattgagatggctgaagctttttcaccgagcagctcctgggttcttagccactctgatgtaaaaacagtcatcattgggctattagtgtaatatattcccttttatcatacactcattctactagat

SEQ ID NO: 4626 - DNA, 1200 bp, mus musculus
catctttaagttagtagcttttatgcagaaacaaaattgacacatatgtcttaagtagataaccgttaatctctcttgtaaattttagatgctgggaatggttttacagtgttccaatgtaagaagaagccataactatgtgttctgtttccgaagggtggatttcatggtttaccctgctatgaacttctaagaatgaatcttggatgagttgctatcatctcttttatagtatttattttgtaacagattgagaagaaaagatttttcccttttgtgaactataaaataaactgaagctccaagaacagttccaagtattgcatcctgaaaggcccttgtaatgattttttgattcaaaagatcacataccccatgtactattcctggaataaccacaaacttgaattctggtttcctctaccaagacagagagcctcccctaaagcgatcctcatttacaatgaaaataaaacaactgaaggtaacgtgccacctgccacctgccaccccatatccagtatacctcaaccaggtacacatgtgagttttaaacaacatagttttaattaaatcgttttaaaattagatcatatgcttctttaattttataaattgttagtgttattacttaattttctaaactctgtagcacattaatctttccattgaagaaaacatcaaatcctagtcatgttcatgttagtaagcattaaaatcatgattatgaactgtttgcaaggtcagacattagcttttatagtttcttggatgctagcaaaggtcacatgactcacaggtcaaaagcacaaagggattattattattggctcaaaaaaaaaaccctttagctttatgtctctatttgtttgccttaaaatctaagccccataggtgacataagtgacctggatgaatgctgtggatcctgggggtttgtatctcaaccaatgagtgttcaaagaaaaacttgcagacctctgtggtcagtagatacacacacacaaaatatcagtacacatgacacatataaacaagataagtttgtctactatactacccattctaagaatataaattctggaaaagatttgttggtgtttgatggatccaatacctaaaaggatgggaaatccatgaaataatctaacaaagtattaaatatttgcctcttcttctattttttgattatggtttttg

SEQ ID NO: 4627 - DNA, 1000 bp, mus musculus
catatgccaaagcaacccaccaaaccccgcagcacagaaaacaaaaggcaacttaccatatttggcacagtggtgactgaagtattcttgatatctgtaggaaaagcaggtaaactattgaccatgctctgtttgctggctaactgggggttcactccagtggctcccatctgctgccctccagtttgactaaagggttgtccaaatggacttgtggtaccagtcattcccatctgaaacaaaaacaggaaccatcaactgtcatgacacaatcatacatgaaaaacagactttagaagtgcttgtctgacccaatgatgccaaggtgtaacctccctgcagttataaatgaaagcttcattgtcaagagttccttagaactgtgaaaggacaagtttcactcaatgacttaatgctacagacagaaggctgatgaagtggcttaaagactagatcatccctgtctgaactaccatcacagtagaagcaacactttttcctcctcaccttggccaaagccctgccctgtcctgcaccagtcctacacagcaaaggctctgagataaagaccatggggaactttttcagctaatatttaattactctataagtgcttttattctctcaggggtcttgatcagatttcaagggggtaatatgatggttggaaacactctgataggtttctttagaaaatttctttctctcccctcccctcacttttctcttctcccattaccaacagccttttccttttggttgtgagactagattttaacagctgagtcagccctctggctcaatttttgttttgttttgtgttttttaagacagaattctctatgtagcactggctttcctagtactcactctgtagatcaggctggcctcaaactcaagggggggcctctgctccctgcccccaaatgctggaattaaaggcatgtgcccaaaatacccagctttctttctttctttttaaactactaaaatatagtct

SEQ ID NO: 4628 - DNA, 1200 bp, mus musculus
tagcaggtaagaagaggaaaaactatcaatttctaggaagtggtttttaaaaaagctactcaggttgttggaatggaacatttatttaatgacaagaatgtgcaatgcccatagatgagaagtcccagtcagcatgcacaaaatatgcattttatgctgggaagtggtggtacatgcctttaattccagtactctcgagagacagtggcaggcagatctttatgaattcaagactagcctggtctatggagtggagtgtggctcaggacagccagctgttacagagaaactctgtctcaaaaacaagacaaacaagcaaacacaaacgcattttgcaacacataatcaccttatctcctccagccgcacaagaagatatcccccacgttgacaatgtcatgcgaggcaaaatgcgtaaggaccaggccaggtggggtcctaccccatagggacccatgcgccctgaattatgctgctgtgaggactacagctggaagagggggctgcatcatcacaggctaaaacccagctggccctacaagacggacacaggttattatttattattaaaagtcttatttatctgtatgtgtctgctgtgagagaaggtgcttgcagagggaaagggtgtcagatcccttggagctggggttataggcagttataagctgcttgatgtgggtgttgggaactgaacacaggtccttcgcaagagcaatgtgtgtccttaagcacttagccatctctccagcctaatacagggatctcaaggaagatacgttaaggctttaattttctgttttgtgctcatccataactccattagtggtttggtttaacgctgtggttaaaaaaggttcacatggagtcatggctggcgtgcctggatgatggctctgacctgctccaagctgcagtgtacaggactgccagcttctgcaggatgcctgctctgttgtgttttccctgggtccaagtggcccgttctacagtcacatccggctgtctgtcatggctctctcctaactgcaaggacatctgtggctcaccttagtggagatgaggaattctctgcttaagttccaagttgattcaaggtcttgcctgggctggcccaggagtgcaggtgacatttttcctttgtatgctcaaagctctcaggaggtcacagtggcagctttttctggctgacctgagaaa

SEQ ID NO: 4629 - DNA, 1000 bp, mus musculus
aagatagaggcctcgtctcatgtcctaggctttataataaagacaaatttgaaaagtaattgataaagactcattccttgtagagcaataaaatttatcgtggcttaactaatctggccccacttgtgcctgctgcctgccttcccaaccatcggatgactaattgataactaattttctcaatttgttctccattacttattgccaccaagaagcgtctaccttagtctgtgaatcacggaaaccccgtgaagtccggtgatgagtcttgccaggattcagcatggcacatgggccagcctttcaggcagccacactggtctcttctcacccacatggctaagactcgaggtgtttagtccctgccaggcacaggcactgtgagggacaatgaacattccacctatatataccatgttatcttaacatggtaacaacagaggttcagagaggccaggggcctttctggaggtcatagagcagtagaacttgtaacttgcctgtctgtcttccaggtctatattttggccactatgttagtcatacccgtacctccccaaactctttcccctaagctgagaaatgtcaacaccaaggaaaccttgccagctatggagtgaaggtgctctatctccagatagcctggtctcataacgctgggtctctctatcctctggtatagagtcacgacaactgatccttctgtggctgcttagccctcagacctgcccacagcactgacctcctgggaaaatatctcctgaacttcctgacacccagctttatgtgtctgttggggcccgaattcagcattcctgagtccagacactgcctgcctacgtgtgcctgctgtgtagtggttcggggtagcgggaggctgagccagggaaaggttcactcattacagattcctgaaccctgctgttcactggcttcttaacaagtgatgctattagtcttacatgttctcaattcttcattttctttgtgtgtgggggag

SEQ ID NO: 4630 - DNA, 1600 bp, mus musculus
gagaagggtgtggtttccctaatttctttctcagcctgtttatcctttgtgtaaagaaaggccattgacttgtttgagtttattttatatccagctacttcaccgaagctgcttatcaggtttaggagttctctggtagaatttttagggtcacttaaatatactatcatatcatctgcaaaaagtgatattttgacttcctcttttccaatttgtatccccttgatctccttttgttgtcgaattgctctggctaatacttcaagtactatgttgaaaaggtagggagaaagtgggcagccttgtacataaaatatttgacatgtgttcatgctatattcatagtaaaagtcaggattttactattttaagcatgtttttcctgaagttgcacatcatgggctacattgatgtacacaaataagcatggttaccatcgacgaatttcttatgataccttgtaaggctctttagaagcctaagcatctataatatggagtagtgatgctgtttgatcaggacagaagctatgaaggtgctgtgagattgaacgaagttatgtttaccatgtgtgtgtaatgtgtgtaggactaaagaggaattggggagcgagcttgcttgtcaggaaacaagagttcaagatcatttctcctggaggagagccagggtcccaggctttagacatcacttcagagaagctgtgagatttgccagctgcccctgcctgtgctgcatgacaagagagtctgccagggagtgatcttcaaacaggagagtccaagggcttaagcagacagagctgaaaacctgggggcttcctgtccctcactttcctttcctgggacaagtgttcagattgcctgctttgatgatcagtcaaatggtgaccttagaagtccctccactccaggcccggtggctgagcacttcagaaagtagtggcatccttaagatagaagcaacttggtgtttcctggtaactgctgtaggtcattaaacctatttccatcaaatttgaaaagggtcgtcttgggccattgtgatggctcagcaggtaaagatacttgccccaagcccgataacttgagtctgaaggcagaaggaaagattcaatttccacaagttcttttctgacctcttcatgcactgtggcattctcacatgtacacacacacacacacacacacacacacacacacacacacaccctactaaataaatgaaaaaattttagagggatgggctcccaatttcctcctcctcctcctcttcttcctccctctcttcttcttcctcctcctcttcctcaattctggctagcctgggtctctgttttaactagaatagcccatttcctttcaggttcaatgtcctcattttcactaaccttttcaggtcaccccatcacacgctgtcccttccttaagctccactgtttttattgtgcagtggtgtgggatgatcatgctctgccaatggccactctcaaagaaatggccttttctaaagagactgttagctaagatcaagggaataggctacaacattaactaaagatatttctctatattcttttaaagttcaaaggatacaggaattc

SEQ ID NO: 4631 - DNA, 1200 bp, mus musculus
ctacctgtttggttgtgttttcctgtttttctttaaggacctgtaactctttagcagtattctcctgtatttctttaagtgagttattaaagtattctcctgtatttctttaagtgagttattaaaatccttcttgatgtcctctaccatcatcatgagatatgcttttaattctgggtctagcttttcgggtgtgttggtgtgcccaggactgggtgagttgggagtgctctgttctgatgatggtgagtggtcttggtttctgttagtaagattcttacgtttgccttctccatctgatattctctggagttagttgttatagttgtctctggttagagcttgttcctctcctgattctgttagcctctatcagcagtactgagagactagctctctcctgagtttcagtggtcagaacagtctctgcaggcaagctctcctcttgcagggaaggtgcccagatatctggccttcggacctgccgcctggcagaagttgtgttccagtcaccagaggtcctaagttcatgtggagagtcctctctgctgactccacgcccaaggtgacccagtgctggcgccaaccggaaggccttgtgactctggtcaggccaagctgtttccctaattaatgctttctcaggtcctgcgtgattggattggaagagaaggtgtgttccactcatcagaggtcctaagatcgtgtggagagtcttctgggtaccttgcgggtgtatgccgactccgcgcccaaggtgacctggtgatggtgctgactggaagggtattattggtgttctgttcagaaagttgtctcctgtgcccatgagtttaagggcaagtttatttaccactttctattctctcaggttcagtgtatctagttttatggtgaagtttttcatacacatagatttgaattctgtgtagggtgataaatatagatcaatgtgcattgttttacatgcatattttacagatatccagtttgacaagcaccattcgttaaaagtgatgtctctcttcttccagtgtttatttcttctggctttgttattttaaaaaatcaggtgtccataggtatgtgaagtttatgtctgagttatcaatttgataatgttgataaatatatctattttttgccaacaacatgtgttttgtattactgtagtttggttgggggttattactatagtac

SEQ ID NO: 4632 - DNA, 1600 bp, mus musculus
cagggctggtggtataagtcactgttaactagctcccctagtgatcattgcaaaagtgcccctgctaagcctgcaatgccctccttgttgaacatgtgtgagtgtttctttttcttaaagcatggttcagatttgaccagcccccacttcctttcaaagctctccatgtaaaatatgaggagttgagggctttggatatggagtcccacagtatgtgagcaagaagaaccttgctcctcacctttcccagtggtgagtatagccctgggcttctgtggtctgagtctggaggctttcacttgtcaagggatgtaggagtttacttactttaaagactatgaagagcagtcctcaccgtgtagtgctcagactggatgcttctctaagccactccctcctggtgttttgccagcacctctggcttctgtttctcacccttttccttggctcctactctgatgccaactcctttttctaaaggggagtttctccagggatttcccccttttgagttctgcattcttcttaagaggactggtatactgtgtttacaatagtctctttattcgtctcttcattttgtctctagcctagacttttcttcctatggtatgttcttgttatttcccagggactgctgcctcaccctgcttacatggaaggcataaccttctcaggaaactcagaactttctggaacatccactgtcttgctgtgcacccaggagctcaggccagagtccttccagccctccagccaggtatccatcctgctgggttacaccacatccattcccaccaggctgccctctttctggcagagacatttcccatagcctcttaattggtcctcctgctgctgttcctgcccgtcttcactccatcacccagctggagtgctctttccacagtgaacatcagctcatgccagtcccctgcctaaaacacttcaataaattctctttattttgaagataaaatcctatctccttcgtagggctctgtggatgttgcgatttgctgtctgccctgcctcaagacccagacacttactctctcagctgccaagatgtggactgctgctacctcagagctgaaatctcttagaaaaataagtcagaatgggtgagagcattatatatagagttccacagtctggaagcaagcagcttgacctctctaggaaggtcactgctacattcaaggctgcaccatcagacaaagacttcaagtagcagtggttcagggtggaggtgggaggaatgccttccatgtctgtttgcttgtttgtttaacttgggatatctttgaacagctgccccagtttgagctcccactctaggaacaacagaggcccttgttgtcccctaactgtaactcatcccctccctctgctctttgttgctatggctgctttctgctcccctttccttacatgtgtggtttctgagaagtctccccagtaaaaacagtgtgtatcttccaaggtcctctaacacaacactggatgctgtagtatagacccattggtcatccgctgccttgtttgtgacaatgtgcataaaacatggaaagtgaagagaggaagtgctctttcacaa

SEQ ID NO: 4633 - DNA, 1800 bp, mus musculus
ctgaagtgtggtgtcaggagagagctcaccacatccaagtttaaagagaaatcaacagtcctgggcagtcctcaggaactacacgaagaacaagttatttgttttggtagttctggggattgaactcaggacctcacacatgctagacaagtactctatcactgagctacaacccaacccagttgccctgttctagccaactctctaataatacatcctcatccttcagttagagcagatcgctgcctagcaaagactggccttgtgtctcgcactaagctttccaaagctacaagatgcacacacacaggcgatgcacacacccacaggtgatgcacacacaggcggtacacacacacacacaggcgatgcaatgctcattgtgtgcttccttcactctccagccacaaagaggatgtgtgcctggcttctcggacgagacgtcctggcatgttgcttgtcaatactccacatgtccctatctgtcacatcacagtgtgacgcctctggaccgtcttgtgaaaagacaagtcccagccgggcaatggtggccacgcctttaatcccagccctcgggaggcagaggcggcggatttctgagttcgaggccagcctggtctagagtgagttccaggacagccagggctgcacagagaaaccctgtctcgaaaaaccaaaaaaaaaaaaaaaaaaaaaaaaaaaggacaagtccatagataattgacctgcctagttttggtattgtcatggccacttaagtccctcccaaaacaagaggtgccactgcatgagtgaaatacatttggtgtatgtgcttggctgaggagccaatggggcgaagctaccatctgtgggattatgactgaacgcctctaagtcagaatcccgcccaggcggaacgatacggcagcgccgaaggagcctcggttggccccggatagccgggtccccgtccgtccccgctcggcggggtccccgcgtcgtccccgcggcggcgcggggtctccccccgccgggcgtcgggaccggggtccggtgcggagagccgttcgtcttgggaaacggggtgcggccggaaagggggccgccctctcgcccgtcacgttgaacgcacgttcgtgtggaacctggcgctaaaccattcgtagacgacctgcttctgggtcggggtttcgtacgtagcagagcagctccctcgctgcgatctaagtgaattctgctaagatggtatggtgtggaaaatatgagtgtacgtgtacatcgctggcactgacgttctcttctgggccaccttagcaagtcttatatctttgagtgtctttgtgtgtgtgtgtgtgtgtgtgtgtgtgtgtgtgtgtgtgtgtgtgtgtgtgtgtgtgtgtgtgtgttggggtgtggggttgagacaaggtttctctgtgtctttgtgtgtgtgtgtgtgtgtgtgtgtgtgtgtgtgtgtgtgtgtgtgtgttggggtgtggggttgagacaaggtttctctgtatagctctggctgtcctggaatgacctctgtagaccaggctgacctccaacttgcagagatcctcctgcctccgcctccgcctctcgattactggattaaagcagtgtgccacttctgcctggcatctttgagtggcttttagcttgcattccatgttgtagtgaaacaaccaaggtgcaacaagaaaaatgagagcaactgtgtctagcaatgctgacaagaaaggtggccctggcttcacctccaactcagataaaataaaaggaaatcctcattcggtccccaaaataaat

SEQ ID NO: 4634 - DNA, 1200 bp, mus musculus
aattaatcctagttgtttctggtcatctttggcttgagacctatcaggaattcccagccaaccttctgaaggaaaggcccacattggtgggccatttgactctgggtgtctggtagttatatgggctgtgcagaacagttgtttgtgaatgggtgggtgggttagcctttgttttcaggggtgatttcatgtgggaaggcttttcttgtccactctgctcctgcaagataaggaccatgcctctttcagaaatgtgggtgcctccacccacccctgctttatctgtgagagggataggaagggctgtctgtgtagccctacaggattagtctgatgtaacagaggattgacactgggaagccttggcaaatgcttcttttcctgtgtgcttgtgagcattgtctctggcctggctgacccttaacagctccacttcttggttgttccagccgggattccctgcaactttcctgatcctcgtgttctcattgtcagcgggatggagccacctgttgagtctgtgtgcctgtggtgacttgtttgctcttggtagttgctgtgatgtcaaagaaagatgtcttcatcccctgctacagtcttgtgtgctcagtgggtagcagtcgttgatataagagaccttgatagggcagtgtggataagcagccttggccttggcctacagcttatataaataatgttcccagtgctgagactggcgcatgcaaggaaacacccaacaactgagctgcagtcccagccaagtctccagctcttcacaccttggttcacataagtgaatgtggtcaccagcctggaaggcagcagaactctgatggtctgggctgagtttgcagggttttgaaatgtcacctttctttgtaaaaggcaagtgccacagtcatatcttcttgttgagtggccagcagtgctgacctcagcacagacagataatgacggccactcagtatgccctgtgaatcctgtgaatgccagtgagtttagagtagtcactgtatgcatgaacacacacacatatacacacactgcacactgaactcatatgtgtgcacacacacagaaagtaaggtctaacaggggatgctcagtatgtggaaagcactctgaatgttggtacctcactagcaggcacttagggttgtgactggctgtctgcctgtgggaaaagccacccagactgga

SEQ ID NO: 4635 - DNA, 1000 bp, mus musculus
gctcaagaggaaggaagaacaaagagtggatgtttcagtcctacttagaagggggaacaatagaatcaagggaagtagagggtgagagggacttggaaggaagagaggaaggggtaaaagaggggcagaatcaggtataggaaatgtacagaaggtcaggaaattgaacagaggtgtgtagcaatggaggatggggaactgggagtagcaaccagaaagtcccagatgccaagaaagcaagagcctctcaggaccccacagggatgacattaactgaaataacccgcaaaaaggaaggagaacctgtcaagaccatatctagaagttaggcatgccccccccccagttgagggatggggccacccacccatctccaaaattttaacccagaattcctcctgtctaaagtaaatacagggacaaggagtgaagcagagactgaaggaaaggccacccaaagactaccccacctaaggatccatcccacatgcagacaccaaacccagacactattgctgatgccaagaagtgcttgctgacagaagcctgatacagctgtctcctgagaggctttgccagatcctgaccaatacagatgcagatgctagcatccaacaaccatctggctgagcacagggcccccagtggaggagttagggaaggactgaaggagctgaagagactttatctggcatcaatgggaggggacacctttgttcatgtgatggcttgatgctccagtgtagaggatgctaggacattgaggctcgagtgggtgggtgggtggtggaacaccctcttagaagtagggtaatgagagatgggatgtgggtttgcataagggaaactgggaaagcagataacatttgaaatgtatacaaataaaatagccaatttaaaaaaaaaaaacaatggataagttctcataccagcaattttaaagtatatttgaaagctctaaaaaaaaaaaaatgaggaggaggaggaggagtcaggaaat

SEQ ID NO: 4636 - DNA, 1200 bp, mus musculus
cagtgatcctctttacccgctacaccatctcccaggctctcacttcagattgtgtctgagtttagcatcaagacctttagagaaaatgcttcactttcaagatgtggctctaacagtggaaatatcagtgggtttggcaggccagggaaggggatatttttagatcaagccctgccaagcgtctgtggccttcagaccctgccagtcacctgccatgctgaacagcaacaagggatttttcatttcctatttgctgccatagcacattaccacatgtttagcagcataaatccacacacatctatgatgtcatatttttggaggccagaaatccaggacaacagagtcacctgtttagagtctcatgagcctgcactcctttggggaagctctagagatggcctgcatctgaggtcattggttgcaggctgagttccctgagtgattgaggctgtaggattaggaccggctggcagctgaagaccagtctcctggtctcctccattctaacaggctgctccattgcttcccatgttctcccagtaaactctgcaacaagagctcaaggactgccactcactccaagcccttcaacctaacctctctggctccagtcccagaacgttctctgctttgggggccttgttttatttttgagagtgtctaaagtcccatgtgtgctaaatcaccactctagcactgacctacaccctagcggacattctctgctttgcaggagctcctgggagtctactgtcccagaagggcaatctcttcaggatctataaccttaaccatactgcaaactgtttgccatggacatacaacttctaggttccagaaattaaaatatgttcatatttggggtacctcttcctatgcctaccacacccaggaaggaggcaaaatgtcagaatagatttgcactgctgctctgtactgtaactgagagtgtggctgttaactgcccgggtccctatgtctgtgtccattgatgaggactgggagatgggacttcagaaccttgtcaccacccagtcttacactttcagcttatataaacctacatgtggaaaagggagacatcaggtcaacagacacgcatgtcactgctgctgctctgtgccacagggtacttggagcacttgagttctctctctgccaccctggagaactctctactagcagaaggaagtagct

SEQ ID NO: 4637 - DNA, 1200 bp, mus musculus
tggccttactggaggtgatatagccttgttggaggcggtgtgtcacaatggatgagatttgaggtttctctgagggcctctctctgcctgcagatcaggatataaagctctcagctactactccaatgtcatgcctgcttgtctcccaccatgatgaccatgatcatgagctaaccctctgaaactataagccagacccccatcaaatgctttgctttatttttaaatttattttgtattattttatgtccactggtgttttgcctgtttgtatgtgtgaggatgtcagatctcagagttacagacagttataagttgctatgtggatgctgggatttgaacctgggtcctctgggagaacagtcagtgcttttaactgctgagccatctcccagccccaaaatgccttgttttataagagttgccttggcatactgtcttttcacagcaatagaacactaagacaggagtcaaacgggcaagaaaatggctgagggctgtagtcacacttgtaagcaggacatgtaccagtgcactgaccccagtacacctctgtggcttcccagagtaacaagaagcctttcgtgctacatctgtaatgaactatgtcaaggacatatagtagtgcaggaggtcagagaatccccaagctgagcaaagcagctcaaaggcaggaagcatgtactttgcgcctctgggcaatgacagccttactgtggctcaggtctagctttggtcctgggacctcacctcaccactaatctgcctctgtctacccttcctacctggcctggggacttgtctttagaaatgtgggtcttgtgatgtgcttgaggtgggataatgggcctggggttacactaaggcacagcaggcaaggactccctggaggtgcccagcatctcagagtcttgtggactagctatttcagttgatccctgctggagttcttgctagctggctgctgagactgaggcctgcaggctacccataaaaggagaaaggaaagtggagctgggaatgcatcccagactccacgcctctcttcctttttgtaccagccagctgtagataacaggagaggggggacaggggcagggaggatcccaagcccaaagcaaatgactccctactttacatcccccaggaagttagcttccagaggttctacacactgtgtggggctagtgcacagttgtc

SEQ ID NO: 4638 - DNA, 1200 bp, mus musculus
tccatctccaggattgtctctctttgtattttctttaatgtttctatttccatttttagatcctggatggttttgtttagttacttcatctgtttgatcgtgtttttctgtatttctttaggagatctgtgtctttcctcttttagggattctacttgtttacctgaattctactgtattttttttttaaagggagttatttatgtccttcttaaagtcctctatcaccttcctgagatgggattttaggtctgaatcttgcttttcaggtatatccagagtttgctttggtgggagaactggattctcatgttggtaagtagtattggtttctgttgcttatgttcttgcacttgcatctcaacatctggttatctctggtgttacctggccttgctgtcatctcttactggagcctgtgatcctgtgatcctgtaagtgtcaagactcctggaggtctagctgcatctgggtatgggctgagtaggtgggaatcagagcataggctctgctcctgggtacagatgcaaactggagggaactgcgtctctggctgggtgaggtttctgtgtcctctgggtcttgtgagtcccagttaggccaggtattgtggtgagggttagtgcctcacctgttgccctggatgtgtcagaactcccggggtcaagctttgtctgggtgtgggcttagtgggagggaatcccaagcatagggtccactgtcaggtgcaggtaacaaaccagaaggaacttgcctctctagctgggcaggctcaaggccaatttcttttcctgatagcttttctgcagttatgtgtataatttccttataagatgaagattagttcaactttgagatactacctaggtgtttgaaattatgaacagggtgatactgatggtcagtaggttagatctgaagaaaagaagttctttcctggtgctttaaatatgtagtttcatgttgtgatggattcctaccttaagtgtcttaagtcagtgttccacattttagatagagttgtataaaatcttttactgcacagattgctttgccatgtgaaaaaccatataatttatttttttgcaaacttaatgtatacttagatttgtttattccaatccaaactgagttatgtttgaggtttctgttttgcttctatcccaggctaatttaaattatcctgacttctcaataagt

SEQ ID NO: 4639 - DNA, 1400 bp, mus musculus
agagggcaccttcactgttttaccctccaaggaccccaatgagaaattgtgaaaggccaaggaggcaagaactaatgtaatgcagaagagagagtttcatttcattcttgaagctcctcattgccacatcatattaatctggctggaatataaaatccaagtcatgaagtcaggagaggaaatattttgtccttttctttttatatcttcccattatacagaggatggtgatgttaggtagcaaagagacgaaggaagtaaagcataaagctgagcagatacaattttgaggtttctgaaaactctggaactctattggagcaggaaggaagcagaggttacagggtattgatggctgtaatgataaatttagactgaaattataaattggggactaaaatcaagattgtgacatttacagacaaatgataaaatgaacgaagaccataaaaattttaatgaaaagtaacatctgaatatttctttaaaggttgaagaaaagaagacagggtatttgtatgcacccaattttagctctttcgagcatagacttgctgccttgagggctactgcacacgttgagccagctcctgctgcctgcactggtggtgcaggtgacatgggtgccatggacaaagctcagaagactgacctggctctcccacttgctttagctcttcaaactgagcacctaaggggccaacaacactttaaccctgagcctgctcctgagcactgctctcatgagaccactgaccctgatcacaatgctgactttgctcttgactcttgtcttcttgctcaaggcaagggtgacaggctcagtattgatcctgaatctgctcctctttgtggcccctgtgacatggaggacccttcaactgaccactccagccaaggcataaacaccaacaccaggcgtgctcctgttcgtggcagaggtgataccactgatcatgataatggcacagatctggcttctacccttcctgttgttgttgattaaggagatggttgatacaccgaattctacaagggtggtctgaggaatctaaccaagaagatttttaccagtaagaaaactgatgatcaggttaagttaccagacaaacaatggtttaaaatagaagatgatttctgttctagaaaactaaattttcttttggtgctaatacttatggttaataaattccatgcttcatatagggctatttaagctttgtctggtaccagaaaaaagtctctgtttcccaataatattgaaaatacaccatataaaaatataaagtcagttatccccaaaaaaccatgattaagtaatgttggttggctcatggttatttcctattctggaatgaggaaatggttgtctttccccatgatttctgagttttcagagt

SEQ ID NO: 4640 - DNA, 1200 bp, mus musculus
tgctaatgaagtacctagaggtccagagtgtttagccaataagcttcccttcccagatattcctccctgaaaaaggtatttaacctcaggcccaccctaagaagtggggtatggttttacacatccattttctgtcatgaccataaactgttaagaaccatggactgcctctttctatcaagatctgccatgaggagccatgaagaaggcctttgcctacagaatcacagcataatctcctatagaaggtctctctgagctctcagccacagctgccaccaagactgcaactgccaagctaaagacaatcatctcttctgggacaagttggagctcccctttccccttgcagcctcaggctagatgcggtccccagcctatgggtcctgatttcattctctgctcttttgtgactcctggcagcacctggatgtccaagaatctgagaacatcctcagctccagccttgtcacaggctcagggacccccgaaccagctcctactttcccacatctgagacggtactttcccaccccttgagaggtgtttcagaggttccctatagcaccaaaactcaccagggcatcagcatgggataaacacagtcaaacttcccctgtctgtgccttgtggtagagtgaacacggacctacaaccctacagtatactattctctaattaagtctatgatcatatgttgagcacgaatcattacactccagtcagaagagttttttttatatagttccaccttttcaggcaggtattgtaaaaaacaatttatagaaagccaccatgaacagtctgggatgaacacactgggatgaccttcctgaaaattttccactgatgagtagctcggcattagaatcatcacggtatcttgctggctcttcatctgggccattgaatctgtccaagtgctcccttacaaagcagcaagtttctcttgtagcctcagagaagttgtgtgtctggttctgattcttctggtcctggtctttttaaatgtactttttaaactgtgctgtggtttctttcctaaagatcattccctgcttaaataagcccgttgatgtttgctaggaaaaatcctcaatgcagcacatggattgcaaaatttactactcagagaaacaaatcttcagttagggtttctcattacgctgatcttctacacaaagaactaagatacagtag

SEQ ID NO: 4641 - DNA, 1000 bp, mus musculus
tcactaaactccaaatataataaactcaaagaaatccaaatctagataaattagaaaatcttgtagacagtatgtcatataaaaaggattgctgctgcttccctgaagacaccacagtctgaggaatcccaggagatctgctgcacttggggcatctaataagaaacttccggaaatcccacagctgacactggaagctcagttttcttgggacccatcaccccccacccccaagatctcccactgcctgaactccaatcccgttctggccagcagcctactaactagtctgctccattgaagacaccaaagctcgaggttctctgcacacaagcagctaggcaactgacacaacagttggaagacctcctgggggctccgtgacatgcagggcaactgactcaagagactgaaagcctccttggagttctgctgcacatgaggaaaaagaaaccatagtcctggagaacagcttcacataggacaacagcttgactgctcctctgaagatacaacagtctgaaggcctcccaggagttctactgcagttaggacatcacatcagcagcttctctgccccagtgaagacccaacagtcagaaggccccagagaaggtctgctacagctagggccacagattgaccaggagaactgaagcaacccagggacaaaagaggcaggcttgagacagattcacccagaccagcaaataccagggataaccagatgttgagaggcaaacacaagaccataagcaacagaagtcaatagacgtgggcatcatcagaacccagttctcccatcacagggagccctgaatacaccaacacacctgaaaatcagaaagctgacctaaaatcttatcttatgaagataatagagccctttaaggaggatataaacaacttcctgaaagaaatgcaggaaaacacaaacaggtgaatgaatgaataaagtggtccaagacctaaaagtggaaagagaaacaataaagaaaac

SEQ ID NO: 4642 - DNA, 1200 bp, mus musculus
caagatcagatgagcaatttaaatagatccatagtccctcatgaaatagaagcagtaattaaaatctcctaaacaaaaacaaaacaaaacaaaacaaacaaacaaacaaaaaaaaccctacagcaagatggattctgtgcagaattctcccagaacttcaaagaagagttaacatcaatattactcaaattaatatgtaaaataaaaaccattatctagaacaataaacacatcctaatttctaccaaggtattgttactctgatatgaaagccatgcaaagacccagcaattaaaaaaattataaactagtgtcctttttacacaatgttcaaaaattcccaacaaaatactcgaattctgaaatccaagagtacatcaaaataatcatctatcatgatcagttaacctcatttcagagatggaagggatagttccacatatgtaaaagaataaacattacctgaaagacaaggcatatgacagactgaaagacaaaattatatgatcatctcattagatggaaaaaaggtctttgaaaaaaattgtggggagcgagtgtggtggtagtcccaagatggcgcccaggactgcagccaagtcttatgacttgcacctgacttcctcatacacctgaaaataagccacgtccatcgtgagagctgcgcaggcgcaccatgacacaagatcaggccatttgactaaggccaatgaactgagattacgcggactgggctgatggggcatggttgaggggttatataagggattgcgattgggagctaagagagattcctatttgcatgttgaaaggttcctgaataatctgctttgagaagaacgctgtgtcgtcgctcttttctgctggttggagacagaagcaacaaaaaatacaacccttcttgataaaaatcatgttctgttgctttcatgctctgtattatatactgaatttttgttttgtatttaatttctactttatttccttattttttgacaatttcatatatagtgctatgattattgtcaccctcaactaacttttgttacttcttcctcttcctctatttcttcccagtaagttttcaagtggctacacatcatagacagtgaagaaaaggaccccacccacaacaattggttcctcttttttccatgatgtaaaagtgaaaaatccaatatgacaaccccatagccagca

SEQ ID NO: 4643 - DNA, 1000 bp, mus musculus
ttacacattaggaaggttgggaacgacagaagtataggaaaagactgttggcatttgctcaggaattatggccaatagttgagcaatgagatctcattaaaataaaatgcttttgcactgctaagaaaatgatcaactgggttggagagatggctcagggcttaagagcactgactgctcttccaaagagttcaaatcccagaaaccacatggctcacaaccatccaaaaggggatctgatgctctcttctggagtgtctgaagacagctacaatgtacttacatgtaataaacaaacaaacaaacagtttttttttttaaagaaaacaatcaactgtgtgaagaggaagctcataaaatgggacagaatttttgctaggtatactgctgcttgaagactaatatttagaatactcttaagaatttagaaagcaggcaaagcagctgaaacaaggtcctacaggcctacatctgcacccaggaggtggggctgttctgcagctctctgtgcaccttccctgccagggaagagcttgattctagggagtgctctgaccctgggactcaggggagatctccagtttctctctagtgactctctaagtctcgtccactcaggagctctcaggctgcagaagcagcagagcagctaggacagggtcatacaggcctacatcagcaaggagaagatgggactgttccacagccctctgtgcactggtcttccctggagacagctggtctcctaggagtgctgctgactgagacttacagactcacaggaggaacaagctccagccagagacagcaagaacatctaacactagagattgcaagatggtgaaaggcaaacacaagaatcttaccaacagaaaccaagactacttggcatcatcagaacccagtactcccaccacaacaattcctgaataccccaagacaccagaaaaacaagattcagatttaaagtcatatctcatgatgctgatagaggatttta

SEQ ID NO: 4644 - DNA, 1000 bp, mus musculus; identical to SEQ ID NO: 4643

SEQ ID NO: 4645 - DNA, 1200 bp, mus musculus
gtgtgaagcagagactgaaggaatgaccagccaagactgccccacctgggaatccatccaatatacagtcaccaaacccatacactattattgatgccaacaagtgcttgctgccaggaacctgatacagctgtccccttgagaggctctgccagtgcctgaaaaatacaggagatgctcacagccatccattggacttagcactgggtccccaatgaaggagctagagaaaggatccaaggagttgaaggggtttgcagccccataagagcaaaaacaatatgaactaaccagtacccccagaggccccaggggctacaccaccaaccaaagaatatacatggtaggactcatgactccagctacttatgcagcagaggatggcctagatattcatcagtgggaggtgaggcccttggttctgtgaaggctctatgcctcagtataggggaattccagggccaggaatcgggagtgggtgggttggtaaacagggctagtggggaggggataagtttcagagggagaccaggaaagaggataacatttgaaatgtaaataaagaaaatatctaataaaatttttaaaaaataaatatttgagatggtagaatacctgggcctggtggaagaagaggtctcttgttctaaggacatgaaaactctactaagtcacaggtgccagtagacaacttcactaagtcacaggtaccatgagaggcatcctaggagagtcacagtagcaggaaccacagcctggcagcctggaacctcccaggtcagagtagctgcaggatagggaaacctgccagaatggaccagagatgtgttctctggggctgcttagaaggacacagctttcaaatttatattgcctaattctttccattgtagagttcccttggtcacttccagtctgcacctatacccacacctatggcagattggcatacctactcccccaccccacatccctgcctgtctcccaggaggtctactctaaccaggggcataggtaagacacacaccccaataaccataccagctggtaccccatagaaacctgcagacatggtatctatccagcccttatggactcccagagtctgaggtctgtacctgcacctataatcaggtagattggcccacccaccactaccaactccaaaattctgtctgtctccaagaaggctgctctaac

SEQ ID NO: 4646 - DNA, 1000 bp, mus musculus
aacacgtccacactctgcctgcaactcacaaggcaatcagtcacgcaggactgaagaggcttgggatggttttaaaagaagcccacaaattcttgaaatgccttccttcaatgcagactaatttttctcctcttgagtgtggattgttctgcgtgactcactgctaatcagtacgacgtagtggaaatgacgcgatatgacttccaaggatgggctttagaaacatttgttattctgccttgctctctccggtggagcatggactcttcgggaagactgctgccacctcagggaggggcccactgataaggaactgagtatctgagccttggaagcagacccaccagcccagtcaagctaattgtcacaaactccctcagaaaagacctgagcccgaaccatgcatccaaaccacctccgaattcctgacccacaaacatttccagataatagaaagtggttacttaagccactaagttgtgtggcattttgttacacagcaatagatggctaattgtttccatagcaaccataacaaaaggtattatgggctcagcttgaatgctagacttgatagagcctgcttcctcatggggtgcgaacccatttgacccccctgtcactcactgctgctgctctcatttagctgactacggtttcccttaacctccctctggtcccaggtgtgccttgggctgcgacaaagcagctgcgtgatttccttgctgttgtccgctgagcgagcccacaggtgagaagggagctgtgcattctgaggggccctgggaaagacagcctggttacagggaaaaatcgccaatgttttccatatcctctacacttagcagcacagatctggagatgcgtgtgtgttagcgcagatgctgtgtctgtgtcacgagctgtgtggcacgtaagattgctgccattttagacaacaatttccagtcactatatgtgcatgccagagatccccacagctgccttttggcagtcagtc

SEQ ID NO: 4647 - DNA, 1000 bp, mus musculus
aggaaggggccctcactgcagctacaggcaccaaaaactctgccctcctagcctctagaactgtaaaaccatgcacatctctcatttgcaagtgacccaggccaaaaggactaagacaaatagtaacttgaacacagaggaaacagcatgactgatacttgcgctgacttctggaataagcagcattcgagctgcctgctgactgaggaagagaaaggaggactttctacaaaagagatcggtgcagaccggtagcctagagtaatgaggcttctctgaagggatagtagtggggaggaagatggaaaccaccagccaatctccatgtctaacacagacgggctcttagataaacccatgttcctgaggctggctattctgtatctgtggtggtggtatggatttaacccagatctcttgccctcatgcatgccaagaaagcttcctacacacacacacacacacacacacacacacacacacacacacacacacacacaagccaaccctattgaaaaactgtcaggctctcagagaccccagaatcccattattatatcatgagagattatgatatcaacaagttcttcatcatggctcagtctcttgatatcaccctttaccatccatcagttttcatctggagaataaaactcacagcaacagagcttcgcactccttgtgagcctgttgcataaacacacattaacactcacagcaactgcttcacgcctgtaagtggaggaccatgccatcaatggcacaggggcgataaggttcttccccctgggatccctttatagagatcccagaggaaacagatcgagacttttgagacctaaattgtgtatgcttccacttaagggggaaaacgttaagagtgggtctgactgtgtagccctgactggcttggaactcaccgtgtaaaccaacctggtcttgaactcacagagatccacttgcctctgtttcctctgtctcctgagagctgggatcaagt

SEQ ID NO: 4648 - DNA, 1200 bp, mus musculus
cttagtatccttttattaaatggacatttaaaacctgtgattaaacatgtatacgcattgtacaaagcctcggcatttaaaaaaccttaagtataatattcattttgagaatgactacttcttatatattcctactaatttacataatgcttgtaaactcagttctattgggccaatgttcaaatctgttagacttttaactgcagtaactagagtttaaaataagtaagagtgtcttctttaaaggataaaacccaggtgtttccatcaacttaaaggcaaaaggacatcacatcaaaaacgtcattctggccacaagatctggactctatccaggtgctcccaactcacatcgcctgagagcaagcacattcacatggccttcaactcttactttcttcccgccccctcttctgcaagactctctgaccgttgcccagattgatagagatgtcccgtttagggatgttccattcaacagccatttgatcttagcactttgagcacttagagtctgcatgtacagctgcccactcaaacaaggaagctcctttagtgtcttccaagagcagcactggtctgtgaatgtaagcataaatctttagaaggcagcttgataacaggtcatttagcaaaacaacaacagtacattccctgccgtggccgatgaactcccaaaacatgggctttgggcaaagttcatagcatgaaacatgaattccctcccacaaggcaagcctcagacactgtcagaaagtggttggttacctcagtaacaaacaaccaggctactatttcaccagtaggcacaccttgcttggcaggttggtattccagcatgtcgggcttgccaaggaataaggacattgatggcgttttctcttctagaggactacaaagccccttccagcatgatgaaagcttcttgtatcaggttctgtatttctggcttttaatgaagttttcgctccattttgaattgatgtttttgcaggaagagagatgtggatctaatttttctgcaggttgatgtccagttttgccttcagtatctgctcaataggttgtcttttcttcttgtgtatgtttttgatacctttgccaaaattaaatgacaagagctgtatagatttatttatgggtgttctaccgtgttgatatacatgtctgtctttgtgtctttttgattatagctctaca

SEQ ID NO: 4649 - DNA, 1400 bp, mus musculus
atagccagaagctggaaataacccagatgtcccacaacagaagaatgaatacaaaaaattggttcatttacacaatggaatactattcagctagtaaggagaggacaacctgggttttgtaggcaaatggatgaatctagaaaatatcatcctgagtgaagtaacttacacccaaaaggacatgcatggtatgtactaactagtaagtggatattagctccccccaaagtaaaaaatacccaggatacagcccacagaactcaacaaggttaacaagctgaagaacccaagggaggacacctcaatctcacttgtgagggagaagaaagcaatcacagaagggggaggaagggagggagggagggagggagggagggagggagggagggagggaggaagggagggagggacctggatgggagaggggaagaagggaacatgatcaggtatccggtaagggaaaaggactgaagccctgaaggccagcagaaagaatggaaacaggcaacattgggaggtaggaggcagaaagaccctccagaatgtaccagagacctgggaggtaagagactctcaggactcaaagagagggaccttaggtaaaaagccctacagtggggagagggaacttgtagagcccacctccagcagaaagacagggcatcaagtgagggatggggctgctatcccacagtcaaaaactctggcccataattgtacctgtctaaaagaactgcagggataaaaatggagaagagcccgagggaaaagaggtccagtgacagtcccaaaatgaaagccagctcaaggggatgccccaaggcctgacactattactgaggttatggaatgctcacaaaaaggggcctatcatgagtgccctccaaaagacccaacaagaagctgaaaaagtcagatgcagacatttacacccaaccaatggacagaagctgctaacccctgtagttcaattagggaaaagctggaagaagctgagaacggagggtgatgctgtaggaagaccaacagtctcagttaacctggacttccaagatctctcagacactggatgaccaaccaggcagcatacaccagctgatatgaggccccccaacacatatacagcagaggactactgggtctgggttcagtcagagatgatgcacctaaccctcaagagactggaggacccagggagtggggaggtctggtggggtgggagtaggggatggaggcatcctcatggatacagggaggggaggaggtatgggatgtggaacagtcagaggatagactgggagggggatcaaatctggattttaaaaaaatgagtaaataaaatttaaaaaatgataaccaatctataacccagtcaagtacctaggatatatattgctata

SEQ ID NO: 4650 - DNA, 1600 bp, mus musculus
cagaatacaaatggtagaagccaaacacagaagcagaaaactaaacaagaaaaccagggtcatttctacacgagcagagtagacatgtctgccaaacccactctagaaaaaggaagacattgaacaaatgtaggccaattaagtgctaagcatttaataaacaataacaaactatcaataggtagtagggataaacacttctgatagttactttttagaaaataattgtgaattgtcacagagagtaagtagtaattaaaagaatattgttcatgaaaattggactgataattagtccgcccagaataggcagagactcttcttgtaggtttattgttacgaaacctttaagatttgtatcataaagaaaaggaatcatgcactcaggtcattttacgaagtaaatttcgacacctttgaaggaataataaagttggtttgtcattttgctatgcatctgatgcccttggccctggggctgcgggaagattgagaaacctaaggcatgtcccaggacggccacaatgagcaaaggtgtgatggagagaccggaaagagggaacacgtggtatagagatggaagagaaaatggagctaggtgagctgtgccgtgtggaaagaggtagagccagagattcaatggtgatggaaataggcagatatgaggagcctgcaggaccacctggagtcatggtgatatgactggtaagcaggggctgcttgcaaggtccatgtctggttccacggcattacaaaagttggtgtctgtgctgtgacctgtgttgccactgaagtccatctggatatcagtggtctgggctactgtctgagaccctgtttatgtctgggggcatgcagacacaggggaccaaactgatctgatggtctgcactgccacctgacgccatgatgacatctaggcgcatgctgctgctagggccatgtctgtatccgtggtcctattggagctgggtttgtgttgacctccaaggcctttgttatattgtggatgtccttggtctatgcagccacttgaggccatgttgatgcccaggccctgtgctgagctggccctgcccctcctttgcaacaagttggctccaccatctctggctgctgcagttaacagagtgtgccccatacctccactgggagggagagggtcagctagctctgaatttatgatcatgggcaagccggctcggcgcctctgcagtggcctaggtgtagaagagatgcctgcctcctccccgtgccacctgttgggggaagattacaagggcagagagaggattcaaacaaatgggccaggaaatgagctggattggggtgaaacatgtgaaatacacaaagaaatatttaaagttaaaattttcttgtttaatatatttcactaagtagcatgctgaaattcaaaatttaaccagaaacatgtttaggatcagtgtcttacgaaaacatttggaacagcaatttttatgtactgttatttaaagcaaatactttcatttctaagatagtctgaactatgcagggcattatttttcaggtacaaacaaataccaactgtgcaagtattatttggagtaatggctgaaac

SEQ ID NO: 4651 - DNA, 1600 bp, mus musculus
tcatgtacttccagatcttccctatccatgtccacaacttctttttgttttctctctttagaaaacaggccaaaatatgcagagacaactgacacacagaaaactcattaaaaccccacaaatagaaaccacaacatgtaagcaagagacctgtaaggtaaaaaataacaataataaaataaaatctcagacaaagcaccatgaaaccaaaaatataccaagatgccattgagtttgtgttgagttggcagttttctgctaggcatggagtctgtccttgagtgtggcttgtataagccagtgaaatttcattgtagacagtaaaattttcctttacaagagattgtcaatggtagatcatgtccattttcccttctcatgctaggaccagtatctttcttggacatgtgcagtctttgggcatgctgtcacaatatctctgagttcatatgtacatcagttctgtaaggcactctttgcttgctgtcttcccatcccactggattttgacatttttctgcctcctcttccctgagctctgagggaagaggtttgatggagacatcccatttagcactggtgttctgaggtctcctctcagtctctgcatattgtccagttgtgagcatttgtattttttccctatctactgtgggaggaagcttctttgatgatgactgagccaacatgtgtgttctattgttaactatatgaccatcccatgatggttataaacaccctcctcaacactgaaggaataaaattcagatgaccctgggtatgtgtttcggaccgtccagcggcttgcaagaaacggggtatggctgaagaggcagactcgagatgaaagagagggaactagatggacgagagaaagaatggagctaagtcaagactttctgatcaaagctcaactttaatgtcagggaacatgccttataaagaagggtgggggcattcccgccaaatcattcttggagcccagctgcaggtgactacatgtaggctctggaacagctaggtagcatcagcggcaggtagcagaacaaatagagtgatccagggaggcaggctccaccccagatgatctcctagtgacaagacaagtgtggctcagcctgctttaggctatggagggaggttacaggtatgtgagagacacattgcactgagtggcctctgagtgaaacagacaaggcactgtctttccaatgggtaaaaaaaagtcagtaaaataaatgatttctgacaaaatggtctaatgatttttgataaagcctttttcctcttatacattgatgtaaaatggcatgaaacctaaaatatatcaagaattttgcaaaatattcactatgtacatgaaggaccaagaatataccaaaatctgtcatgtcaatgaatataattatgctgtaaaaatgacaacatatagccaagaaacattctttactgaaaagtggtggcagtttctctaaaacaaagtgattggtttgttaacacctatgtaaggaagagaaaactcaattgtgcaaatgactcacactcaatatacaccacacaatattggacactggtcttgctgttgctgttgaaaatttat

SEQ ID NO: 4652 - DNA, 1000 bp, mus musculus
caggacccaacattttgctgcttgcagaaaagccacctcagggaaaaagacagacactacctcagagtgaaaggctagaaaacaattttccaagcaaatggtctgaagaaacaagctggagtagccattctaatatcaaataaaattgacttccaacccaaagttataaaaaagacaaggagcagcacttcatactcatcaaaggtaaaatctatcaaaatgaactctcaattctgaatatctatgctccaaatacaagggcagccacattcattaaaggaattttagtaaagctcaaagcacacattgcacatcctactataatagtgggagacttcaacaccccactctcaccaatggacagatattggaaacagaaactaaacagagacacatagacactaacagaagttatgaaacaagtggacttaatagatatctacagaacattttatcctaaaacaaaaggattcttctcagcaccacatggtaccttctcagcaccacatggtaccttctcagcaccacatggtacctcttccaaagttgaccatataattggtcacaaaacagacctccacagatataaaaatattgaaattatcccaggcatcctatcagaacaccacagattaaggctgatcttcaataacagcataaataatagaaagccaacattcacttggaaattgaacaacactctactaaatgattccttggtcaaggatgaaataaagaaattaaagacattttagagtttaatgaaaatgaagccacaacatacccaatcttatgggacacaatgaaagcagtcctaagaggaaaactcatagccctgagtgcctcctaactaaagagagcatacacaagcagtctgacagcacacctagaagctctagaactaaaggaagcaaattcacccaagaggagtagacagcaggaaataatcaaactcagggctgaaatcaaccaatggaaacaaaaaagaactattcaaaga

SEQ ID NO: 4653 - DNA, 1000 bp, mus musculus
ttgttttatagttattttgaataggttcatgctctttactagtataagtagcctagataaattcttcctctttccatagtcttaaaatatttctgcctatatattttattttaaggggtatacagtataattatattaatgcaagctgccacatgaaaagaaaaaaaccacacgtacaatgcatctataactataacttaagttcacaccttcctgtatagctccgggtaattgccaggacgaggtggagatggattatcatgtagcatctgatggctggccttatgctgcaaagtgtgttttcagaaataatttcctgccacattcctgactgcatttgcaggctgagttgatccccttccctgctgttctgtgatctgcccctgggttactaacagccccaacagacagactggctggtgctacctgctgctccgacgcagattaactcactaccagccatatgggctagcaacttcataaattcctctccttttgcttttggctcttaggatagttaatggacagttttctggtggggagaaaaacaacctgatggtgtgcagtgtgggcagtaatcacctgcaccccacacaactgccccttccatctgcctgccttcagcagctgtgtgtgtgaagggaactgatttctgcctttggtcctcctgcgttgtcagccgctggctttgcctgcaggagaaagccaaatgtgtgttctacacttaagatcatttctaagcatgcccattcttaaatacatctcaaactgtttccagaattaaaaagtccgatgtgttctgtcatgtgtattaaaactcctgtttcttttgggttgtgagcctagcctttaacagcagagccagctctcctgcttctttttcttctcaagtgtaagaagaataaacgtcctaagaaactgtgtagacctgaaaacatcatatatggtcttgtaatctgagtcaatggtgactctgggcaacaccttccttatgcattct

SEQ ID NO: 4654 - DNA, 1000 bp, mus musculus
tgtactcactactaagtggatattagctaaaaaaaaaaaaaaaaaaaaaaaaaaagtacagaatacccaagacacaatccacagaactcaaaaaggtcaccaagctgaagtgtccaagtgaggatgcctcagtgagggaggagcagggaaagtagttggggtggaggagaataggaggagaggagaacctgatctattattgggtgagggaaagggactgaagtattgagggccaccagagagaatgaaaacaggaaacctcaggagataggaggtaaccctccagaatgcaccagacctgggaggtgagagactccaggactcaaaggaagggaccttagatgaaatgccggatagtggggagagggaaattatagagctcaccaccagcaggaagacaaggcatcaaatgacggagggggttgccatcccacagtcaaaatgttgacccaaaattgttcctgtctgaaagaactccagagatggaaatggagaggagcctgaggaaaagaaggtccatcgacaggcccaatgtgggatccacctcaaggggtggtcccaaaacctgacactatttctgaggctgtacaagacccaacaagcagctgaaggtgtcagatgcagatacttgcacctcaccaggtgacataaactgctgacccatgtgttctaattagggaaaatctggaagaaactgaggaggacagcattcctgtaggaggaccaacagtctcagttaatctggacccctgagatctctcaaacactggaccaccagacagcatacaccagctgacatgaggccccacacacatacagcagagaacagctgggtctgtgttaaatcagaaatgatacacctaaccctcaagagactggggaccctaggaaatgtagaggtcaggtgggatggggggtgggagttgggggttggggacatggagacataaggcgggggaggaattatgggatgtggaacactcagaggtttgattggggg

SEQ ID NO: 4655 - DNA, 1000 bp, mus musculus
tctggttagagcgtgtttctctcatgattctgttagcctctatcagcaaacctaagagactagctctctcctctgagtttcagtggtcagagcactctctgcaggtaagctctcctcttatagggaaggtgcacagatatctggtgttcggacctgcctcctggcagaatatgaaggcccaaaacagggccatttcctagaagctgtgttgctttggccagtcccagaagctgttagcttctgtagtccacactctcacctgcacagacaagtctcagagggatctgggaaccaagttggtgcccccaggtgctctggcaaagccttcctgggtgtggcggacacctcttctctggcagtggaggtgccgggatgtctggagcctgaaagggttctgcctcaaaagctgtcctctagggaccttgggggttttgcagactctgcgcccaggtgacttggtgctggcacgaccagaagggatttgtgaccctggtcaggctggcttttctgcttccctaattctatgtcaggtcccgtgtgattggtttggaacagaagttgtgttccactcaccggtggtccaaagatggcgtggagaatcctctaggggaccttggcggtgttcactgactccgtgcccctaggcagcttttaacattatcaattggttctgaaattattgtattggcatcttgtgtattgagaatttgttgacatgtaaatctgattggttaactataagcattgagtcttgtttttacttggttactgggtattgtgttatcaaactgtgtgaggatggcagatttatttggttattgagatgtgggaaagagctggcgagaccccatttggacatagtgttgtggcctgcaggtgccagtagtagagctggcacatggcccagtagggccggagagttggtgggttgagagaagcaggagggaggagagttggcaggttcattctttcagagcctaggtaaaccacttgggaataa

SEQ ID NO: 4656 - DNA, 1200 bp, mus musculus
acactactccagtaggaatgatgtcatatgtgttaaggaaaagaaaccagaggtgtaagaaaacaggaaaggctaagtgacaaggtgagcctacaagccagaaagaaaggcctcaccagaaaccagcccagctatacatgcctcccatgctaattacaatgttgatggccctgggttccaaacaagacctcgaagctgtttgtcaacacttagccatttctcagaggccagctctagttcaggcttggtgtcttatgcaatggtgatgtgatctccagacagagaacgtgcacccaagagaaccataatgctgttaccctccttcttctcacattagaatttcgctcacagtcttgaatcaaaatgctagaggaaaccataattatttattagcaattcaatgccgcttacttaatttgctcaaacacatgctgagcacatgctatggccatgttccacaggcagtagaagggatggaaagtaagccttgaccactggcctcatgaagcttataacccagcaaaaagaaagacagtgttggcacatggcttcatgagagatatgtgtgaataacctagggctcagtgagcagaagactcgggctcacattctttacccacgtgggttcagctgccttcaccgctcttcatgtgcctgttgccatgaaccagactcactttttgactaacatttttggacctctggaaagccctaagaggtattgacttggctaaatctctattatgtaatcctactgtgaccattcataattcttaataaatctgctcagtagtttcatactcatttgggtaatctgaagaactccacatatcatgcctttgtcaatgtatccacaccaccaccaccaccagacacctgcccatgaactaggactgcggccagcatcaactggtgcagaggagggagggagaaaaagacgagggacatgtaagcagaaacactgttacttacagacacccctgctggacctgtagccttcagggtggcatcagcaaggctgctttgcagcgtttctgagactgtagccaaagccccagctttgtcccctttcaccagcacatcaaaatgaagtgccttggtgtaggcctcatatccaaatctcacaaagctctcctctgcagatcagagggctttgtccatatgtgacatacaatgatggcaaaggggaaatcatcgtct

SEQ ID NO: 4657 - DNA, 1200 bp, mus musculus; identical to SEQ ID NO: 4656

SEQ ID NO: 4658 - DNA, 1000 bp, mus musculus
agcagcagcagcagcagcagctctaaatcacagtttggtccttccaggcttcctgagatcagttcctgaccaccctgctgtgaatgacacggcgcatgtactaatgtagttggacatagggcttgggaagcacagaaatgcccagtaaattgttcctgacagcatcagcctctactgtgtatcaaatgacccaaacttttttttatggtctcatcttgagttcctgccctgatttccctcagtgatggactgtgatgtggagatgcaaaacaaagaaactcctcccatactaacgtgggttttggtcatttttatcatagcagctaagagcagactaggcagacggacaccggggctcagggttagctaggaggaagttagctgtgtaagcacttcacagtcattgtacagaaagtgttttggagtatgttcttaataagaaaaatactttaaaagttatattttatttcagctatgactgtggtgcttggtatggttataattgtattaatgggtattttatacatataagattatagtatggaatttgcggtaaatatgtgatattcataaaataccatccatggcactggagagctggctcagtgggtaagcacctgctgtgcaagcagaaggacctgagatcagatcccagcactcagtgaaaaactgggtgctgcctgtgcagggctctgtaatctcagggcctgtaggggcagagacaaggatcagtggcccttgctgccagccagcctagctccaggtacagccctgtggcaagagagtaaggtggggagtgacagaacaggagacctgatgctctctcggcctttgtgcaagcatatgcatgcatgcacaggtacacacacacatacttacaaagagctgccattcatgtagctcagtgtctccttccttgtcttcatcatatccttaaataatctgatgggacttttggtgtttgttttttcccaattagaggccattaggtagaatagtt

SEQ ID NO: 4659 - DNA, 1000 bp, mus musculus
caggccaccagagggctatttttgggatacttgccctggccccacctcctctagcagggcagggttggtcagagtacttggtatttctggggatcctgtgcctcttctcctcaggctcactcctgagacaacactgtttagctgtggaactagtgacctatggagtgtgacctcaaaccttctccagaggaggacaggaaacaagagccgtctttctctaggtcaggggctcttgtagctttgccactgagaaacccctaaaatcatgtgcaggtcaaatagagattgggatgggtgatggcttttgcagtaggtaaggcagtggcctttctcctgtggggagcttactctatgggggccaacatcttcctgacaagtgtccaggttatataaccagagtaaccctgaggttgcagggagctgcccccaatatgtaccagcaactgggatcctaaattacccccatgtgactctctggtctcctgacatggcccacaacagttctaaaagctttcctggcttccccgcttgctgtcttagggagccttgctggactctcaaggcaatggagtagtaattaaggctttttgctggggtgtcaaaaatctctgccacttaggaggcccagtcctctgaggaggatcaagctgtggtctgccagctcagcacctgtggatccgagagagagagagagagagagagagagagagagagagagagagagagaagggggccccacctgcaaagataccagagtgagtctttgaaaggcagtttggaaaggatctgaggcactaaggagtaatgcacaagtgagtatttgctgaccatacagggaaccctgggttggtctctaacagcacaagcacgcgcacacttcaagctgaaacctgccctgtgaccacggcaagtggttcagctaggggacctagcttccctgtggacatgatcagtgaacttctgagaatcctgcaaactggttcatctgcagttagccaga

SEQ ID NO: 4660 - DNA, 1000 bp, mus musculus
tattttgtttgttcatagaaaagattttcaccttcacctggcaagtggtgcacttgactcctctgtttcacagcgggcatttcattcctataaaagcctggtgctgcctcaggagttctggtggcaagtcctaaaggaagggaatacaagactattggcatagaatttctcagcccgactgaataagaatatatcttaaaggccaatttcctaatgactacacaggaggcctgtgttgatctgtgctgggctgtgtgtgcacgtgcatgtggagatcggagatagatgtccagtttcttccttcatcactttgcatcctctctattgaggcaaggcttctcagtcaaatccagagcttgctgatgtagctgctctagctagccagcttgttccagggatcctctatctctgcctctcaagggctaggattacaagtagactgccacattacctcacatttatgtgggtgctggggagttgatctacagtattcacgattatatgacaagtatgttactcatggagctatctcctcagccctattttgtgcctttatttagtacattatatcgctctctctatatctgtatctaagatattaatttctatgataaagatattgattgctcttacccccttatgctctcgcctctctcttgcctcttgcccccttactcccaatttccttccccccttcttcatggccatggctggccccccctttttctactttctccttctctctgcctttctctgcatctgtacccttttaactcccctccccattccctgaataaactctattctatactaaaaaaaagatatctatttatctgatatatatctgacatatatgtatatatacatatatatacatacatgtgtgtgtgtatgtatgtgtatatgtgtgtgtatgtatgtgtatgtgtgtgtggtgtgtatgtaataatcaaagaatcacttagggttttgttgatattgttttggttttgttcttgtt

SEQ ID NO: 4661 - DNA, 1200 bp, mus musculus
cccgcctcagcctgcggggcgcgcagagctggctctctcgctccctcccagccaagcagggcgctgaggctaccaccgcgggctacgagccctggagccctcacagacagccgggaagccacacgcacctcagacagctgcgcgggcgcgctctccctcttgcacaggcacacacacacacacacacacacacacacacacacacacacacacacacacacaggcgtgcgcacaggtgtgagggcaagccgcgatgggacagcacgggtgtccctggggaccccagacttagcaccttcctcagacgccactagccgccggccagcccgtgaggcggagggcgcggaggctgcaggctcacaggcgggcgaaggtccagcccggatccggccgcttctcgggtccctctggtcctggtgcctggcgctctccgaggtcctaaccgagcgggcgggtctgtctcaggctccgcccccgccgtgggaggtaggccccgccccagtcggcccgcaccctcctccctcccagactctcgcgccgggggcggggcactctgggcaccaggggggcgggacatcctctcgccaatcacaagctccactgacctaagtcttagggattccaggcaggaaagaagtttggggataggtcagagaaaaagccagtgacaggaggaggggatcatttaggaaagtaggtgatgtatttgattgacagccatactagccagtatgccttggcgccgtgctttgggggctgtaattggtgctacctgttgaaggacgcaagtgtgaatcaatagaatgcttgcaagcttgagaacttgcgctccgggagtcccaggctgcagaaagggttaccttaggtcgtgctctggactgtattgtggacccggcttttggaccgggcttattttgcagccttcccccaccccccagcaccccttgaatctatttctgctcaccagggccaggtgcatctaatagacgatctcgctgccctgctatatgcgttgaacgtagatttgtaaataatccctacaaactgttagttctctccattaagtcatctgtaccaaaatgaattggttttcggtggaaatgttggcttccaaatcttaaggaaatgatttgcctactttatacagcctatggaaatagaccagcgttccccttctccacatagacaaattaaattttt

SEQ ID NO: 4662 - DNA, 1000 bp, mus musculus
cacacacaccccttctcccttaccacacttaccaacacaagactttcgtagccacccaaactgtgggaacttccccagccagccaggaagcaggtcctcctgagtggacacacagtgtcactagttctgctcatcatctccccaggggaacggctcattcccataactgaccacctagctacaaactgagctggagtgactccttggtaaggaatctgtttgatgagcacatcacacggtgcagggaagcctacttactggtttgctgtaaaaggcattcccgtgaagacatgtatcgggtgaagcccaggcaaagtgcagatattccatgccctccctagtgcttgcctctgggaaccagcagcatccagcgctagcccttgggttgtcatggaaacgtcacctgaaaggtgattcaatctctggcactgggtgagcagctcacttcaaagctcacctccctaactagaggctgtgagttaggactgacagtgcctgatctgtgctctactaagaacttctaggtgaccaggcctcatccctaagaggtagccagccatcatacacgtacatagatactatcacttgtgggtttccaggatttgggaagttgtatgtcaaagactgcaaatatatacttaacaatatcacactttaataactccactaaaaactactctcaagaatatactactttgcttagtgaaaactcttgagactttaaagtacaacggggctgaggcttaactcactggctgagtgaatgcctagcttgtactagactctaggctcagcagatggctttgttgtaagtcacacagctgctatgcttcaggctaaaatggaaagcgagaggtttactcctggagtccttggctttcaagactgcactatactgttctttagaccttgtttaagagtagaaccaacttaccaagagtaagtccaactccaaaataaaatgctagcggtttcttccccaccatcctatcggcaggat

SEQ ID NO: 4663 - DNA, 1000 bp, mus musculus
gaagcttaaaagtaagatagggaatttataagaaatgttaaatgtaccatttttacaaatattatctaacatgtgtttagaacaaagtattcaaatctcttaatctctcccactttgtctttcatgaatttgatggcttagagctgtgaccttatggcccttgtaacaggactcaatttcttttcctttatattctgtgtaacaattcttcttttttaattggaaattttatttgtttacatctcaaatgttttctgcaaacccccaatcccatcccccttaccctacttctatgagggtgatccccacccactcccacctcaccaccctagcattactctacactggggcatcaagccttcacaggaccaagagccttgcctcccattgatgcctcttcagttcttttagttccttcccctaactcctccattggagtccctgtgctcagtctgatggttggctacgagtatctgcatttgtattggtcaggatctgccagagcttctcacaaaacagctgtatcagtctcctgtcagcaagcacttcttggcatccaaaatagtggttggtgtctcaatatgggatgggtcctcagatggggcagtctctggatggcctttccttcagtctctgatccactctttttccctgtgttccctttagacaggagtaattctgggttaacattttggagatgggtgggtggccccatctctcaaccaagataccatgcttaacctctgaatatggtctcaacaggttctccctccttgtggtggggtatttcagcttgtcatccctgtgggattctgggaggttcttcttttcgttataagataagcctattgaagaagactatgaggtgagacaccaactactagggaaacagccacagccaccatcatgacctgaattagaattaaaaccaagtatactttttgtaaacacaaaacaaaacaaaacaccttaaaatatttaatatgctctaaattaaaaa

SEQ ID NO: 4664 - DNA, 1200 bp, mus musculus
gaatagtaacaaatacagaaacattgatttttattattaattttaatacaattttagattaacacactgtacactgtactgtctggttttgcatgtcaacttgactcaagctggagttattacagagaaaggagcctcccttgaggaaatgactccatgacatccagctgtaagacattttctcaattcatgatcaagggtaagttggcccattgtaggtggtgccatccctgggctggtagtcctgggttctgtaagaaagcaagctaagcaaactataggaagcaagccagtacataacaaccctccatggcctttgcatcatctcctgcttcctgacctgcctgagttccagttctgacttcttttggtgatgaacagcaatgtgaaagtgtatgctgaataaaccctttcctccccaacttgcttctttttttttttaatattttttttatcacgtattttcctcaattacatttacaatgctatcccaaaagtcccccataccctccccccccccacttccctacccacccattcccattttttggccctggcattccctgtactggggcatataaagttagcatgtccaatgggcctctctttccagtgatggccgactagtgtgggaagccgcaaacgccattacaagatggtgctggctactactggccactgcccatgattatgggtaaacagccaatgtgcgcatgtgcatgagttttttttttttttgccgagtcactgcctggcctgtcacatattaatgatggactggtagcataaccaatcaggtatggacatgtcactcctaggcctatataagcagcaccatttctgggctcagggtctttcgcctacgcagtcaatgctctcccaataaacatgtgcagaaggatcctattgtggtgccgttcttgctggcgagtcgggcgctcacagactaggccatcttttgatacatatgcagctagagtcaagagctccggggtactggttagttcataatgttgttacatctacagggctgtagatctctttagctccttggatacattctctagctcctccattgggggccctgtgcccaacttgcttcttattcaagcagatttgtgcaggaatagaaacactgactaagacacacacaaacagtggctttgttcatgcattcaggaaattgtattatgaaatttt

SEQ ID NO: 4665 - DNA, 1600 bp, mus musculus
ccttggccctctggtgtttaagagcattacaaattcttttaggtgaaagaagaagaattcagagtagcagtcagcacacaggaacctaatgagatttttttttaattaacttatttcttattatatattttcttcatctacatttcaaatgctattcccaaagctccctatactctccctgccccctgctctccaacccacccactcctgcttcctgcgagacagggtttctctgtgtagccctggctgtcctggaactcactctgtagaccaggctggcctcaaactcagaaatccgcctgcctctgcctcccaagtgctgggattaaaggcatgcgccaccactacctggtgagatgtttttgttatacatttttataacaaaaaatacatatttcgatgtgtaaattctgacaagaaggggttttttttccacaattcacctttaaaagttgcttagccagtatgacttccaaaatcactcctattttttttaattattccttccattcgtttatatcttaaatgatatcccctcccttcccagttacccaaccacacccacatctgccctttcccccatcccctttgtttctatgagggtcccccctcccacccactccagtcccaccgctccagcatccccctacactggggcatcaaacctctacaggaccaaggacctcccctcctattgatgtcagacacggcaatcctctgctacctatgtgtctggagccatggagccctccttgtactctccttggttggtggtctagtccctgggagcactgggtggtccggccaggctatgttgttcttcctatgcagtcgcgatcgccttctgctcctccagtccttctgccagctcccactccgaggtccacaatctcagtctgatgcttggccccaagcatctgcatctgcattggtcaggtgttggcagaaccttccagcaaacagccacaccagtgtcctgttagcaagcacctcttggaaagagcaacagtgtcagggtttgatgtctgcagacaggatggattccccaagtggtgtggttcccagatggcccttccttcagtttctgctccatttttttgtccctgtctttcttttggacaagaacatttctgggttaaaaacattgagatggctggctggccccatcccttgactggggaccttttctctctactggagatggtctctacaagttctatctctcctatgctaaagtcatccctgttgggttctaggaatctcttgcttccctgttgtctgggaccctccagtggctaccccagttcctcatcccccactgttacatatttttattcaattttctgacaagtcactcttttaataagaccaagtttgattttctccttttaacatggtcctgggttaaagagaactgaaaatgaagatttggatagttaactatgagtagaacagaattactaattcacaatgcagagtaaggaaaaaaaaaaaacccagaagatttgtgttgatcatttccttcaaaacttaagctacaagccacgtttttgtgttttattttaaaatctatctaaacagttagaaactattataagac

SEQ ID NO: 4666 - DNA, 1000 bp, mus musculus
atttcaaatgttatcccctttccaggtctcccctccaaaaacctgctatcccctccctgctccccctgctcaccaacttacccgctcctgtttcctggccctggcattcccctacactggggcataaaacagtcacaggaccaagggtctctcctcccattgatgaccgactagggcatcctctgctacatagacagctagagtcatgaattccaccatgtgttttcttcggtaggtggtttattccccagtgagctctgggggtacaggttagttcatattgttgttcctcttttggggctgcaaaccccttcagattcttgggtcctttctctagctccttcattgtgcaccctgtgctccaccatcattctataatgagtagtgggagttgggccaagctcagaatatagagtaatgagaactttgacctcttgaggtccacattccccaaatacctgtttttcatgcaatcttatacttgtctcaattctttcattacatgatattagaacttttaataaacctaactaagatgtgttcaccaatcatatttgaaagacttttctaggccatggctttctggcctcctggtgtgaagaaaattggtgagcaccccatgtgtacctccctaaaaagcaaaataaaaaaatgtaatgctggctatctcactgtatctctattcatagtgtgtgtgtgtgtgtgtgtgtgtgtgtgatttgtttaaaaatcaggtaactgtgggtatcactaggatataaaatatgttgtataaaaaaaatgcaagatacttgtccacacccctttgctaatgacttttaaagccttcccagcctgaatagcccagaaaaatcccttcatcaactgctgtgcaaccttagctatttgaaattcagtcatgatgtccgtaaccccagttcacaagcctggtgagctgtgaagtagaggctacaataaggctgaagcaccgatgatttctcagtcttgatcactttggatg

SEQ ID NO: 4667 - DNA, 1000 bp, mus musculus
gagagatcccatctgaaaatcctgcccccactctcattggcacatcaagttactacaggattaggcacattttcacccactgaggctagacaaggtggcctagctagggaaactggattcaagcaggcaacagattcagggatagtcctcactcgagttcttggagacctgcatgaagaccaagctgcatatttgctacacatattgaaggtcatagttccaggccatgctcactctttggttggtggctcactctctgggagcccccagagttcaggttagttgatcttcttgtggagtccctgttctcttcatgtccttcaattatttctccccaactctcccataagagtccctgagctccatctaatgtttggccttggctggctgaatctctttccattgattgcagggtggagactctcagagggcagttctgctaggctcctgtctgcaagcatgagagtattatgaagagtgtcagggattggttcttgcccatggggtagacctcaatttgggcctgttgttggttagacattccctcagtctctgttctacctttatccctgcacatcttgtaggcaggacacactttatgtctaaaaatttgggggtgcattgctgtgcttatccttcaaatgggggttttgtctgatccatatcctccactgctaggagtcacaactaaagttgccctcatagtcaccctgaagcctaccctatccaaggtcttgggcacatcatagtgattgcccccaccccactgcccatttctgttctttcttccctgctctctgtacacctaacttccaccacccactcccccactcctctcctctccctcccagctcactaccttgaactaccttcaatatcaattttctttccccttctgacaaggatttgatcatcctcactcaggccctctttgttatttgcatttttggggggtctgtgaatagtcatagcttgatcataatcacccctttcctaattt

SEQ ID NO: 4668 - DNA, 1200 bp, mus musculus
tatttctgagaaggagagaacaaaacacccatggaaggagttacagagacaaagtatggagtagagactgaggatattgccatttagagattgactcacctggggatccatcccatttacagtcaccaaactcagacactgttgtagatgccaacaaatgcttgctgacaggagcctgatatagatctttcctgataggctctgccagtgccttacaaatacagaagtggatgctcacaaccatccattggaatgagtataacgtccccaaggaaggagctagagaaaggacctacagtgctgaaggggtttgcagccccataggaggaacaacaatatgaattagccagtacccccagagctcccagggactaaaccactagccaaagagcacacatggtgggactcatggctctagctgcatatgcagcagacattgcctagtgggacatcagtgggaggagaggccctttgtcctatgaaggctctatgccatagtacaggaggtggggggaatgccagggccaggaaaggggcgtgggtgggttgctgagcaggaggaggagggaggtggaagggggaaggtgtttttctgagggaaaaccaggaaagggaataacatttgaaatgtaaataaagaaaatatccaataaaaaaaggtgttaacttgtgaatactggaggggagtgtgggctagccacagggaggtttggaagtgcccaaccattgagctagttatggcatattaaaatataaacgttgcttgtgtgtgtgcttcatttgtgaatccagagctcttggccaggtgtagagccaagcatggatccttgagagcatagaatggactttgaatatttcttgctacatactcaggggcagggctgacatgcagtagaaaaatactgtgaacaatatagcttctttgaaaggcagcttacaaaatttctcacaaattcaaatacttattttaccttattaccgtgcttctcagaccattcatatggtgcttatgcttctcggttttgactcgaaagaatggaaattcacccaaaattgctttaaggaggctatattcattatttccaatacttagtacctagtaaattgtacttcaagtggtgcatgtataaaaagactttgagatacatttagataaggttttgtcagggtcaaaattaaatcaactatgaaaacataaaa

SEQ ID NO: 4669 - DNA, 1000 bp, mus musculus
cttcacaggaccaaaggcctctcctcccattgatgaccaactaggctatccccatgaagctgatttaaaaagacttttaaagattgtattgcttaaaattcaatcaattttcataatgacaaaaaatcaaaatgaagaaaccttccattaaaaaaaatcatcatgtatgtatgtcccccagagactcatttatttgaatgcttggctcatcgggcgtggcactattacaaggtgagacctccttggagtgggtgtggccttgttggaggaactgcatcactgtgaaagcagactttgaggtctcagatatgctcaaggctagccagcaccacagagtttctcctttctgcttgctgatcaagatgtagacctctaggcttcatctcttgagccctggtggcatataggctgtcttgcttcccaccatgatgacaatggactaaccctgttaagctactctcaatatcttcctttctaagtgttgctgtggtcttgatgttccttcacagcaagaaaacccaaactaagacataatgagaacaaaaattccaaagtttgcactaatcattgtctcataagccaacctctctgtaagaaaatctacaaatactaagaaaagggaaagaaaaaagaagaagaaagaaagaaaggggtttgaggaggaaacatttgctgtctcagcaccttatgtttctagagaattacttccactgagagaagttatattttaaaggaacttttttccctcggcttttatttttaaatgtgagtatttttgtacctgtgaatttgcacgtcccttgaaaatgattaaaacttgtaaatgtaacctgatcatattaatttggatgtgtgttctctcctctctctctctgaccttccctcccacccattaggcatccctttacttgactcaacatgtctatatcccataagaaaaagggtggatctagaatcttactgtttgatgaatatgacacccatcaatgcaaagtgctgg

SEQ ID NO: 4670 - DNA, 1400 bp, mus musculus
tgtgcctcttctggtagataagatctgtgaagttttatcaaattattttgtagctactcatttccaaagaactcctaagaagaccaacagtagacataagcacttaattattaagaagttcaaaaaaaaaataaagacagaatattaaaagcaaaaaaaaaaaagaagttcatataatagtggaaattacttttaaaagtatttgacaagcatttcagtttttcatcaagtataaataagtgtgtattcatagtttcagttctttaggatattttttaaattttaaactttttattgattctctgtttcacatcatgctccccagtcttgttcatctctccataccctcatactcaccctttgtccttgaactacccccccccaaataaaatacaaacaaacaaatgaacacaaagcatagaaaacatctcattgtggaagctgaagtatgtcacagtgtgtcgcacactatacccctctgtccacatatctccagttgcaaatgttcattgcagcaaattattggtctggtttgagatctctggcttctgtgatatcatcaaaattggatccccacctgaactccttctggttatcctgttgttaccctgtgtcatggagatgctgtagctttggaacagaaggactggacctttcatgtattccaatggttcggagatgatattgattttggggtgggccaattcagagctctgtatctgggtctgggttttagctgtactggttagctcaccacctctcccttaacagtaccaccagggcaagttctgcaacactgctgtgacagggccattggtaggaggcagggtcatctctcccgctctcacacaatcagggccagcttgcctgcactcaggcttctagagtcagctccactgtgctgcataatcaacttacaggactctccctcccaagccctgcagtctctggattggctcactcatctcagttcttaaaacagtgtaattgttgtgagtctgggtttccttgttacaattctagtccacttttctcccacaaactattctcatatgttctttcttttttggggggggcgggttacatacaatgaaaaccaaaagaactttggaaactaaataaatgcaatattttccttatctttggttctttttattctgttacagttgtccatatttaataccacagtactttttagctacatttcatttaatgaaaatttccaaagagtaagtataatctataaagaaaacatttttataatttattttagttgtctaaatagtatagtgtatactgatcataaataataacaccacagtgagaaatttgctttccaacaaacacagccatgtcatgggtgataaacaatttcaccatagaataaagaggatatacaa

SEQ ID NO: 4671 - DNA, 1000 bp, mus musculus
tcacattcaaaaaataaatttgaaagattgcacaaataagctatgtaattccttatttcctgctaatatgcaaaaatgtatttatgataattacacacgtactgtgtgccagagctgaaacaatacattcctcataatggagcataaataaagaaggtggagccagctgctcttaaactgtttctttgcaagcagtaatgctatagagaatataccttttccctctgttagtctggcaatgctgaacctgttgctgcattagacgagttgcgttttcctgggtaggggaaggagggctgtctgctgtctggtaggagggctttgtctgtgcctttctctctctctctttctgtttttctttctctctctccttctctttctctctcactggcttgcttgctctgtctctgtctttctctctctctctctgccccccttcccctccctctctcttgctctctctctctctcttcccgtctctgtggtttgtaaggtaggttgcagtgtgtgtatatacacaacatcaagagcaggaaaatggactcattagggaggcaggcagtcattaccactcacactgtacttccagggagacaccgattatgagaagagaaactcagcgctggggaagaaggtaggggcagacaactttcataaaaacaaccctgcctcctcagtccccttgcatttatcatcttatttactccacagtgcttttaggctttctttcctgaattttaatttctgtatctaaatttgacagagctaatgctagtttgaattttggaacatctataggaggcctaccctgtactaattttcttaattatttaagggtgtgaccttgtgattcagttttattagtttaaaaataattacaaacaaacctatttttcttactaaagtaatgagtaaatcagaatcgttcactcttttaaaacaaactcctccgtatgtttgtctctttgcttttctcgtctgtttatgcaattccatctgt

SEQ ID NO: 4672 - DNA, 1400 bp, mus musculus
gctcctgttaaagtgatgacatggctgactttagtcacaagtgattgtgacagataagtttgtcgagttatcaccacttagcacacttgtatccatcagggatgatttatgtcagtgtccaagcaatgtgaggatttatggtgcaagatgtgcgtagcccacatgctcgaacctttactttagaagatgaataacatatttaattctgatagtttgaacatacagaaataaagaaatgtgagacaaatctactattgctgtaatacttccattagtcaagcattgttctagtgtaacttcatataagttactgtggatagacctaactcacaaggtttctttttctcgtcctttctctctgtgtatccagttaacactacaatgtctgtacagatggataaaaaggctctgctctgctgcttttctagtccactgataaatgcagtattaatcacatggataataaaacacagacacctgccttcctgcacaatagcatacaacctagataaaaagaccaatgaaaccagctgcttgggcaggaacatcacctgggcctccacacctgaccacagtcctgaacttcagatcagtgcagtggccctccagcatgaggggacttacacatgtgagatagtaacacctgaagggaatttagaaaaagtctatgacctccaagtgctgggtaagtgacaatgtcacatattgtgctatttcacattaccaattttagttagaaaaaatgtccttgtgattgtgacaagactgaagctctatttccttcccatctctccagtgccccctgaggtaacctactttccagggaaaaacagaactgcagtctgtgaggcaatggcaggcaagcctgctgcacagatctcttggactccagatggggactgtgtcactaagagtgagtcacacagcaatggcactgtgactgtcaggagcacgtgccactgggagcagaacaatgtgtctgttgtgtcctgcttagtctctcattcgactggtaatcagtctctgtccatagaactgagtcaaggtgagtacttttgtaaaaagaaggaataattgatatttaccttattcttccatgaaagataaaggttttaccttcattctttgtgtgacaaatagagtagacaaatctgtttaggggaagaaggagtaaattcaggacaaagaatgaagcagaaaacatgaagctgttttctagctcagcagactcctgctaacctgtgtcacctggacagcggtggtgctgcccatactgtgttggcctctaaggtggctctaagctctgtgaagttgagagttaactaggaaaagaaacccacttcagcacttataacaagtttttgttatcacttgcacttcttatcaactagctataaatt

SEQ ID NO: 4673 - DNA, 1000 bp, mus musculus
gtttacatcatctaagaatatccctcttaattaaaaacttttgaaaatgtcatacacatatgccacatatattgatttgacttcccttccatacctcgctttaatttcccaccctactccaggacccttcaacctgtctttatcccaaattcacgtcttcactgtcatctttattattaataaccctgaatccagttagtactggccatacttgaatagatgtaggccaccctctggggcatgggcatcctgttaactggccataagaaatgtaaccgtctcacaccagtcagtaactgaatagctctgctgaaaggatcgaggccgtagaccttccctagcctcactcaagtttccactgacttgacattgtgcctgtcttgtgtaagcaaacatagaaattacgaggtgattttacgaggcgtcagccatgtcatatctaaaagacagcatttcacagctatacttagcatcttccaggttttaacattcttttcttccatgatgtctccagagccttggttgggggtggttggtatagatgactcacagctgagcattcagtctcttgttctctccattaacagctgcccagtgtaagaagtttctttgaccaaggttcaaagcagcatatatctatgggtctaaacataaatattagttaggaggcttgactacttaactatttactgaaagactgtcagtaagttaccttgcacacccaaggcctgtgatctttccccactcatgggcttttaaccaggtttagtgtatcagacctcaaacccagctagaaagcttgtttctccccctaatgccattgtcatgtcagtgagtacagtgctcctggcaggttagtagtgtagcaagtccatggatgccctttctctggcagtagcaagcctttccaatactatgaaacctagctagcggggagaaggtgtcctggtcagtttgagattagtttctcagtgtatggaaaccagagtgtgctgtcttc

SEQ ID NO: 4674 - DNA, 1000 bp, mus musculus
gaccttccaggcctgattgcactgatggtagagagaataagaaggggtggattctgtggaagccttgctggggaatgaggaatgagccacctggacctctagctgaggcctattgggtccagacaagagcagtcagcaggattgcctagatctggatgagagccatccttgtctaaggaagtgggatgtccctggagcagaagggctgaagggtctttgtaggggaagggcttggaagacatgttctttcagaggtcacagtagggacagacatgctgtaattattcctgttgactgaaggccaggaaatgatgaggactgtggagcacacagcagcattcttgatttctatccagggaatcatttgttctggtaaagaggtcaactttttggtgcttctgtccctgtgttttctgtctatagaggcgtcaattatcttgactcaaagagaccatgcatttgcatctctgaaccccattctagatatcatatttagataaaagcttttctttttcttttactgctgcagttctggtgtccttattctaggagaagtgaaacattgtggatcatcacattccttctagaagtagctgcaaagtgctggggcttagtcaaatgatatagagtgcctaaatcaccagtttagtgagaaccttactggttctggaccaatcaagatgaacactgaaggactctcatacactctcattcattgattgggtttaaaagtgagttcctggcctggggatatggctcagtagatgctgtgtaagcttgaggacccgagtttccaaagccaggctcagtaacatgtctgtacttccagtgttcctgctgaaagatggcagaccaatactcagagcctcatgagtagactagcctgacctatgcaatgacaaacagcataaaagaggggggaacttgaccaagaagatagtgaggactgactcttgtcagtcttcttctgatcatgaggcacagcaggttcaaacccaca

SEQ ID NO: 4675 - DNA, 1000 bp, mus musculus
atggatcagagattaagggaatgacctaccttgagactcattctatgggccagaaccaatcattattgatactctggtatacttgctgacaggagcatgtgctcctctgagaggctcaacctgttaactgagtcaagacagatccagacacccacagccaaacagagcacggagcttggctactcttatgaaagaataggaggaaggattacaggctctgtcggggataggaactccacaggaagaccagcagagtcaactaacctggacccttggggctttcagagactgatccaccaagcaaagaacatttacagactagatctgggcatccacacacatattagccattgtgcagcttggtctccatgtgggtcctgaaaaactataccaagggtgggaggctatcccaaaagctgttgcctgtctgagggatatgttcttctccctgggctgccttgtctagcctcagttggagaggaagtgccagcctagcaaagactttatgtgctaaagttaaaggatacccagggaggtccctaccccatcagaagagaagggaaggggggatggcagaaaaggattgtgggagggaaacgataggagagggcagtgaatgggatataaagtaaataaaaatatttaattaagtaagtaaaaacgtcaaacgctgtataaaagcatccaaagagaaccttctggaagtataatttagatggtgctgacacactctggctacaggccatgctagagtccactaatgtcagttaagccatccacaagccacatgctgactgagctatcacagtggaaatgtgtctagcttatgcactaaagaacaagctgaagctccatagcactgtcagcgcttgccagtcactactgtcctgaacaattatgtgacttgccttagaacagtgaaacatttgtaagtaataattaagggaaaataaatgtttaatctgtagcccttttaactttctgatgtttttagttttta

SEQ ID NO: 4676 - DNA, 1200 bp, mus musculus
ggagacaaagtgcagagcagagtctgaaggaaagaccattcaaagactgtcccacttggggattcatcccacatacagtcaccaaactctgacactattgtggatgctaagaaattcttgctgaaaggagcctgatatagctgtctcctgagaggccctgccacaacattacaaatacagaggcagatgctcacgactgaggacagagtccccaatggaggagttagagaaagcactgaaggagctgaagaagtttgcaacaccataggaagaacaacagtatcaaccaaccagacctcccagacctcccaggaactaagccaccaaacaaggagtatacatggctccagctgcatggcatccaggtagcagaggatggtcttgtcaggcatcaatgggaggagaggtcgttggtcctatgaatgctcaatagatgccccagtgtaggggattcaatgtgaggagccgccctcacatttgccattataagatggccctgacagctgtgttctaagtggtaaacataatctgcacacgtgcaggggcagttttcccgccatgtgttctgcctttcccgtgatgacaactgggccgatgggctgcagccaatcagggagtaacacgtcctaggtggaggataattctccttaaaagggacggggttctggcactccctctcttcgtctcttgctctcttgctcttgctcctgaagatgtaagcaataaagcttttgccgcagaagattctggtttgctgcgtctttcctggccggtcatgagaacgcgtgtaagagttggtgccggaaacccgggaagaaaaactcgggacgggagttaaccatcaccggcgcaaggaagattcctcattccggaaccagaactgcgggtcacggtaatgaaggttcccgtaaaacagactgttgagaaggattcaactgcgtgaattcagaactcttcagctggggaacagggtacccgtaagtatagctttacaaggtaagtctgatcttgaactttctaactaaattcaagacagtctatcagaagtaaagtgggaaatagctttacaaggtaagtctggtcttgaactttctaacgaaattcaagacagtctatcagaagtaaagtgggaaatagctttacaaggtatgtttggccttgaactttgtctagtgttagaagcccttttgttccttttca

SEQ ID NO: 4677 - DNA, 1400 bp, mus musculus
ggtctagtatgtttttgttcatttccatcacctgtttggatgtgttttcctgtttttctataaagacttctacctgtttggttgtgttttcctgtttttctttaaggacttgtaactctttagcagtgttctcctgtatttctttaagtgagttattaaagtccttcttgatgtcctctaccatcatcatgagatatgcttttaaatccaggtctagatttcaggtgtgttgaggtgccctggactgggcgaagtgggagtgctgggttctgatgatggtgagtggtcttggtttctgttagttagattcttacatttacctttcaccatctagcaatctctggcgttagttgttatagttgtctctgtttagagactgttcctctagtgattttgttaccctctatcagcagacctgaaagactagctctctcctctgcgtttcagtggtcagagcagtctctgcaggcaagctctcctctttcagggaaggtgcacagttatctggcgtttggacctcctcctgcccgaagataaatgcccaaaacagtatctttccaagaagctgtgttgctttggcctgtcacagaagctgttgtttcagtagtccacactctcacctctttagactactttccttggagtcctgaaaccaagacggctcccgcagatcctgaggcaaaggcctcccaggttgggtgtacacctgtcctctggccaggaagatggctggtgtctggagccgaaaatggcgccgcctcaggagctctgtggctcttgtctgtcccagaagctgctagcgtctgtagtccacactctcacttgcagactgcccgccgtggagtcccggaacaaaagtggctaccgcggaacctgaggcagaagcctcccaggccgggcagacacctgtcctctggccccgaaggtggctggttgtctggagccgaaaatggcgctgcctcagcctattttcttttaagataaatttatacagagtttgttcaaatcctatgggaaattttgctcacatttcagaactaaaataggtaaaatttactgactcctaagcacagagcgaaaataattgcctgctatgaacaagtattaaattaaagatgtctgtgtcttcaggtagagaatgtaactattagaccatattttaaagtctacaggaaactcttggtctttgttgttgggctccacaggaatattgggttaaaatcctggtttgactagctgcctgcttcatattaataagtagtaatagaagtgtaattaaattgttttcatatttataagaagagaatacagattttcaaaatattttttggggggtatgtgtgtgtatgtgttattattccactggaagagaggacagtatacaagcttttcacattgcc

SEQ ID NO: 4678 - DNA, 1200 bp, mus musculus
ctttattccttctacttccatttttagatcctggatggttttgttcaattctttcatctgtttgtttgttttttcctgtaattctttaagggatatttgtttcctctttaagggtgtctaccggtttagctgtggactcctctattttgttaagggagttatttatgtccttaaaatccgctatcagcaccatgagatgtgattttaaatattaaaaaccttacttttctggtgtgttggggtatccaggacttgtggtggtgggagaacggggttctgttgatgccacgtagccttggtttctgttggtaagattctaatgcttgcctttcaccatcttgttatctctggtgttagatggccttgctgtctctagctggaatttgtcctcctgtctgtctgtaagcctgtgtcaacactcctgggaaatcagctctcttctggctgtacagagggctgtggaagagcccaagctcctggtgcagatggtgtaccagaagaatctggtcccagctgttccacttttcctttggcccatgtgcttctttccagtcccgccttggacaggttgtttttggagagaaaaaggctatctcacctctgagcctgggagtaaaagcattcctgggagaatagatctctcctggtgggtctaatgcacagagggctatggaatagcctcagctcctgggtacacatctaaatttatattctttctttccatgtgactgtgtatgtgtgtgtatgtgtgtatgtgtgttgtatgtgtgtgcattcgcatgcagaggcatgattgctcttctctgtattcttgttgtgtggatacatatgtatgtgcaggtgcatgataacatgtgtggaggcccaaatttaatctggcgtgttgtccttgattgttttgtcattttttaaaattaattaattaattaattaaattacatttcaaatgttttctcccttcccagtttcccctccacaaatcccccttacctcccccctccagcttcattgtgtcaggattttgctcagtgcttctcaactctggctcgtctagctgcccatcttgttccaaggatcctctgccttttcctttcaaatactttgattacaaaattccacatctgactagattttgagtgatgtctaggcctctgaactctgtttgtgggacatggacttttatcagtgagccctctcacc

SEQ ID NO: 4679 - DNA, 1000 bp, mus musculus
aaacaggcaggagccttgaaaatgtaggtattatttcctaagaagagggcatgagatgagagctgtacccaagctgtatgaataggatttgggctgagcccagagcatttctttctctgttctaactctcctagggtgaagactgaaagtgtctacaactttcaagcctcaggctgctaacctaggcctagaatgtttcagcctgaaacttactgctgaatgaagtctctttctagctctttctgaactctggctggatgttttcactcagcagttctgactcaaactcctctccaagctgattgattcaatttagcttctcgctgaattgctctgcttggaaaaaccaactctgaactcgacacactcaactccactgcactgtgctcattacactgactcccaactgactgtctcaactgcccagaacttcactgaccttaataaagttgctgttctcctgagatataggtatcccatcctgtcaaatctttctctagtccatcactttgtctattcctcaattagatgtcatcatttggggttaaaggtgtatggcaagggccttctgtattccagccagatcacagagacctagaaggtctctggatgtgatcagagcagtcatgttgctggattaaaattcctcaacagaacctgaaggcaggaactgatacagaggccacagagcagtgctgctcacaggtttgcgtatcatgacttagccttctttcttatagaatccagtaccaatggtctgggtcctccctcatgaaccactaattaagaaaatgcccttacaaccaaatcttgtagaagcactttctcagttgaggttccctcttttcagataactagcttgtgtctaggtgaaataaaactagccagcacctacacatatataatagcatacaccctaagtttacatctaggtctcacatataaaagatgtggtatataggtctttattcatccatttatactactttacatagtgatt

SEQ ID NO: 4680 - DNA, 1000 bp, mus musculus
atatttgacacatttaataactatgcccttacatacaaaactttccaagtatactcataatactcaggtattatggccaatgtgtacagttaagtgttggcccactatatgaaagtaacaataaacaatcaacaaacaatttgttctcaggggctttaccaggaaataagaatttattgcatacattacaaaaggaagtttcttttataagcacaagtatttagaaagtaatttgagaggcatatcatatccttgacagaagaatagcaacagcttccctattgaggcctatgatctccccagatgcaggtttttgtcctggcttagtgtaaaagatttaaaaagatgtgaactcttctgtggaattgattgaacacactatagatgtgctagtatccacctcccttgctgccctctgacagttcatcatcccattcctccccctgtaaccaagaggatgtacccactccccaccctcaacccctgccaggccttctcactccctgttttccacacaaacacacaacatacatgaagaataacaaaatagaaaaatggttagccaaagtattgagagggcacagggacagtatcccaattaacaaaatcagaaatgaaaaaggagacataacaacagatcctgaggaaaacacatcaaaacgatcatccatcatgactaagtagactttatcccagggatgcaaggatggtttaatatacggaaatccatcaacataattcactatataaacaaactcaaagacaaaaaccacacgatcatctcgttagatgcggagaaagcatttgtcaaagtccaacacccattcatggtaaaagtcttggaaagatcaggaattcaaggcccataccataacataataaaagcaatctatagcaaagcagtagccaacatcaaactaaatagagagaaacttgaagcaatcccactaaaatccgggactagacaaggcagcccactttctccctacctattcaatat

SEQ ID NO: 4681 - DNA, 1000 bp, mus musculus
gagttatttttgtcctttttcaattcctctatcatcatcatgagatgtgattttaatgtagagtcttgcttttctggcaagttggggtgaccagggttcactgtggtaggagaactgggttctgatgatgccaagtcattttcatttttgttgcttctgttcttggcacttgccttttgccatctggttatctatggtgttagctggtcttgctgtctctgactttagcctgtccctcctgcaagcctgtgtgtcagtactcctggaagaccaattctctctgggaagaacttgggtaatgagagcttgcagtacagggtcagctctggggtgcagactgagaccagaaggatcctatctccagctgatcctgggttcctgtgtcctgatagctctggaaaggtctctcttgggccagggatttgaagagaagtggtagtcttacctgggctggcaggtgtattggccctcttgggagaacagctctctccttgcagtatttgggtatgtagctctgtggcacagaatctgctttgggttcagatggagactgtaagactcctgtcctaggcagcccctctgttcctgtgtccttagggttccggggccagtccctctgagcagcagtggtggtcctccctgcactcacaggcctgtccacagccctgagaagcttgctccctcccagcactatttgggtatggagcagatatggaaatttgcatttttttaaaaaaaaatgcagtagcaaacaagtgggatagggggaaaccacaggcagacaagcaatagcacctacttcttgacaacataattgcaaatttaaaaggcatcatagagactgcaacatggctcagcagggaagggcacttgctgccaagcctgaagacttgaattcggtccctgaaactcacatggtagaggtagagaatttactccagaaagctgttttttgacttccactcatgccccatggcaatgcgtggttgccccacaaaat

SEQ ID NO: 4682 - DNA, 1200 bp, mus musculus
gatgttttgagttaggatctgtttgcattttgtattttctttgattgttgtgcctacattttctatggaatcttctacacctgagtttctctcttccatctcttgtattctgttgctgatgctcgaaactatggttccagatttctttcctagggtttctatctccagcattgcctcactttgggttttctttattgtgtttacttcccttttttggtctagtatgattttgttcatttccatcatctgtttggatgtgttttcctgtttttctataaggacttgcaactgtttagcagtgttctcctgcatttctttaagtgagttattaaagaccttcttgatgtcttctaccataatcatgagatatgcctttaaatccgggtctaggttttcgggtgtgttggggtgccccggacaggctaaggtgggagtactgggttctgatgatggtgagttgtcttggtttctgttagtaagattcttatgtctgccttttgccatctggtaaactctggagtcagttgttatagttgtctctgattagagcttgttcctctcgtgattctgatattctctaccggcagaccggatcagagaactctctgccggttcagtggtcagagaactctctgcaggcaggctctcctctttcagggaaggtgcacagatatctggcattcagacttgcctcctggcagaagataaaggcccgaaacaggacctgtcccagaagctgttagcttctgtaatccacaatctcacctgtgcagagtagtctcggtggagtccgggagccaagatgtctccagcagatgtctcctcctgctggaggtaaagccctcccaggcccggtggacacctatcctctggcagggaaggtgcccggatgtctggagcccgaaaagggggctgcctcagaagctctgtggctcctgcctgtcccagatgttgttagcttctgtagtccacactctcacatgtgcagagtagtctcggtggagtctgcgatccaagatgtctcccgcagatgctcaggccattactcatctttttatgccatagcagagcatccctgaataaacagctgattcctaggcaaaatttcatttcttggagttctggagcaggaaatccaacatcaaggggatggagtatgttgaaacatcttatggtacatcttgacatgatgaagacaag

SEQ ID NO: 4683 - DNA, 1200 bp, mus musculus
cctccaaaatttgacagtaatagcctttctctcaaaacaccaaatattcaagtcacagaataaaaagaaatcaatctggtagtgatttaggagctctatccctactggctagcttttatattgctgggtggtgttatgcatgtttccagaagaaaaacataatcaccgtactcgggtatgccctctttagtcatagtggagactagctgattaacacatgcccactgctgcagcagtggcataataagattcagcaatgatttcctgattggatttaaatcctgatccgcatgatgacattcatacctggcatcattatagggcttggaacctaaggctacatagatgttaggctctatgttaatactaccactatccttgtgataaataggcatacttttaaactgattctttatggcttttttttttttttcgagatagggtttctctgtgtagccctggctgtcctggatctcactttgtagaccaggctggcctcgaactcaggaattcacctgtctctgcctcccgagtgctgggattaaaggcgtgcgccatcatgcctggctctttatggctcattttgatatccataagttagtgtatatatcagcactcttcagagaaaattcaggttagagttgtgatttactcagtaactgccaactgctgaagctgcaaagattaacatattgtgaaattctcgggtttaaatggggcatctatattatacctctttctcccaagaattatggaccattgtgcagtagcaggcagaaagaatatgagaacaagagctgctgtaagccgataaggaaactgtgtcttctgaacacaacagggtggctgggtagctccatgtcttagaaattatgggcaatgcaaattaattttgatgggattataaaaaaaagagagagagaaggcaaaggagagaagcaggagcagacctaggaggaggtggcacagaagaggaatatgaccaaaactcattgtacagaattccaaagaactaataaaagactgttactggtttgatgtaaaagtctataggaaatgttaatgaataaaggaaaataacagaagttaaagaaaatgtcatcaaaagtaccatgacctttggatcaacagaatcacaatcaataaaggcatcatctaataaatggcaataaaaagtgctagatcagccaacaaaaactg

SEQ ID NO: 4684 - DNA, 1000 bp, mus musculus
tcttgagagacatagaaaggaaagaccactctggctgacttagccctaatgctgaaagagcaggatgtaggagagaaacctgggagtcatcgacactttcatgtgcagagaagacacacatggtatgggaagaacactggtctggtacagagcacctggtctcccagccaagctctgctatttccaccttccagcaggtctgctatcaaggcacttatgttttcttttcacaatgcaaagtaaagaagcaaagcaagattttagtttcatctccctaagctcacccctgtgttttgttaaagccaatctattggtctcagtctttattttagaagatgctgagcagctcatggcttgatcctttcttacaggaagtcagataagctttgcgggacatctcaaaggcagcttttgtggcagaaactaccaggcagtttcaggttcttggcaggtttctgttggcatccttacagatctcccctcctttcttggcattgcactgcatttacagcaagtcttggtaggcgtttaattgcctatcatatcacttttatgtattcctgtgggcttactgagaggtgatatacactcagtgtgctgaaggtctctcccccatcatggtatacctactaacccgtaagtgcatgtcaatagtcactatgttcttatcacttggaccatatcagatttattatcttactggttagatgggcataataatgatcatgttgtgttccatataccggtgtgatacgagcactagatgggacaaattagacaattttgagtagcatataataaattttagtgacagagatagttctttgatcttacagtgcatgtcagtatttgtgaacttttctctttggaaaatgaccctaacaaaatgtctctaaataccttcaaatgcctagtgatggccaaggtgaatgccaggccttactggagacaccagcagtttcagcatacagatctcagtgagcagggcagatgtgctgcc

SEQ ID NO: 4685 - DNA, 1200 bp, mus musculus
cccacccactcccacattttggccctggcgttcccctgtactggggcatataaagtttccaagtccaatggacctctctccagtgatggccgactaggccatcttttgatacatatgcagctagagtcaagagctccggggtactggttagttcataaagttccacctatagagttgcagatccctttagctccttgggtattttctctagctcctccattgggggccctgtgatccatccaatagctgactgtgagcatccactcctgtgtttgctaggccccggcatagtctcacaagagacagctatatctgggtcctttccgtaaaatcttgctagtgtatgcaatggggtcagcgtttggaggctgattttttcatgaatcattttacataatggatatgaagtgaaggttctatgccccagtgtaggggagtaccagcctgggaagcagaagtgggtgagttagtgaacgagtgggggggggaggggatttttcagagcagaaaccaggaaagagaataacatttgaaatgtaaataaagaaaataaaaaactcttacacgcgttcacgactggccaggaagaacacagcaaaccagaatcttctgcagcaaaactttattgcttacatcttcaggagcaagagtgcaagagagcaagagcaagagagagcaagaaagcaagaaaaagaacaagaacaagaaagcaagagaaagaacaagaacaagaaagcaagagaaagaacaagaacaagaaagcaagagagagaatggcaaaaccccgtcccttttaaggagaattatcctctgcctaggacgtattactccctgattagctgcagcccatcggcccagttgtcattacgggaaaggcagaacacatggcgggaaaactgcccctgcatgtgtgcagatcatgtttaccacttagaacacagctgtcagcgccatcttgtaatggcaaatgtgagggcggctcccaacaaaaaacaacatcactttgttttctacaaaactaatctgtaaccggaaggaatatttatagagttataggaggagtaaatagaatagcaatgtacagaagagtaacaggttctacaaaagtggtacagaaaaagatgactcagtaattataagtatttgctgcaattgcagaatctgggttcagcccccaacatgcacacacaatccttacat

SEQ ID NO: 4686 - DNA, 1200 bp, mus musculus
gtttctattttgttttttgtttgtgtctttcttccttccttccttccttccttccttccttccttccttccttcctttctctttctttctttctttctttctttctttctttctttctttctttctttctttctttctttcttttctttttgtctaagaatacatatgtttttttattttagttaattaattaatgtcaaatgctataccttcatagttatcctctcacagaggatcttcccctacccatttcccttctcttctgaaaggttggcccctctctgggtatgcccggaccctggagcatcaaatgagtgccagagtaggcataccatctctctctcttttttttttcctttctctttgtttaattgggtattttctttatttacatttcaaatgctatcacctttcctggattcccccctcccagaaccccctatcccatccctctcaccctgcttctatgagggtgtaccagcaccatcccacctactcctacctccccaccctgacattgccctacactggggcatcaagccttcacagggccaaggcctctcctcccattgttgccccacagtgctattctctgctacatatgtggctggaatcatggggtcacttcatatgtactcgttggttggtggtttagtcgctgggagctctggggggtctggttggtgaatattattgttcttcctaaggggttgcaaacccctttggctccttcagtcctttcactaactcctcccttggggacccggtgctcagtccaatagttggctgtgagcatccacatctataatggtgaggctctggcagggcctctcacgacatagctatatcaggctcctgtcagtaagcacttgttggcatctgcaatagtgtctgggttttggtgactgtatatgggatggatccccaggtaggaccagacaaggtatccgtgtttgggaacagatactacactcaggctacagttttttgtttgtttgtttgtttgttttgttttgttttgttttgttttttgttttgttttttgtttttttcttattttttttttattttttaggtattttcctcatttacattttcaatgctatcccaaaggtcccccatacccacccccccataaccctacccacccactccccctttttggccctggcgttcccctgtactggggcatataaagtt

SEQ ID NO: 4687 - DNA, 1400 bp, mus musculus
aggtgtaaaagtgtatcctccaaggacctgcctccagtgatctacttattttgattagtccctgatccctgaggtttataacactttccaataatgttaacgttggagatgaaaattttatcaaatgacctttgaaggcaccttagatccaaacataaatactaatacatcattcatagttcttcttgttgtaatcaaatatgtgccaaaagcaacttaaagagaaataagggaaggttcattttgactaaaggtttattgttgttgttattgttttgttttgttttggttgggtttttttattattattttctttatctacatttcaaatgttattccctttccaagtctcttctccagaaaccctgcctatatgtgggtgctcaaccacccactcaccaactcccaccttccagccctggcattcccctacattggggcatcagacccccacaggcccatgcgctgtttctcccactgatgtccaacaagaccatcctctgccacatatgcggtcagagccataggtccctccatgtatactctttgcttggtggcccagtccccaataactccagggtgtctggccagatgacattgttgctttccccatgggcctgcaaacccctcaagagaatattggtcatcacagcagggaggacatgggggcagacaagtagagtgactggtcatattgtactgtagtgacaaaactaggggatgaatcctggttcgaatgttcccttttctcttttattcagtcctagatcccatttcaatgaatagtaccagtcgcttggtcatccttgctcacttgatccttgctttgatagacacgctgacagatacattgcacagtgattctaaatctagtcaaacagatggtgaagattaacatcatacttgctgcttggtcttgggctaaaatagtgcagtttaaaagtaaataagttaatttgaatgtgaaataacttttaataggcagagaaacttaacctgctttctttgtgttcccatgtcttattgtgtgtttgtgtgtgtgtgtgtgtgtgtgtgtgtgtgtgtgtgtgtgtgcgcgcgtgtgttttagagtctatttgaagtccaatgctagatgtagtaattccccaaataatggaatttctaaagatttgaaacaggcatttcagactaagctaaagtgagataaaacaaaacaaaagcaaaatagtaactcaaagaaacagaattatcaaggctccaaacagacgagcttcagttacagacatcacttataggtccactgcacattttatttcacatgataaggtctattcctcttatctgtctggagtgtttatgagaaatcaaactaaaacaacactaaatgaattttgaagcacctcatcttagctaacctt

SEQ ID NO: 4688 - DNA, 1200 bp, mus musculus
aagacacagtttccttagagttattcatcacctctgtctggtattctttctgactcctcttccacataggtcattgagccctgggagtgtttgatgaaactattccatttaggactcggtgctccaaatattctcactctctacatattgtctagctgttgggaacaaaataaatagggaggggagccctggggaagatcgggaaaggaaaaggggcctaatgtccagccagagttcctgtgctctgggcaggtggacacaggcattgaggggctgcagggacgcttcccacacagcccagagtgagcatctaagcctctgacccaccctgtaggggggtggagaaggggcagcccccgacccgggggggggggtgaggaccacaccctgtagccctgcaggtatgggagagaggggagagggaagaagttcccaacactgaccagagtgggcagcagaacttaaaggagcagagactgtttatgttttaagagctttattatagaaatgcaggggacagagagaaggtagaaaagagagaggtggggaggctagagagaaagagaaagagaaagaagagaggagaagacaaagagaaagggaagaggagagagaagtgagaggtaagagatccaaggagtaaaagggtaagagaacaaggtgggggctgagcacccctttttatgttcttcactgttgctaggtatctggggaggagtttagcctgaaggtcagaagcttgggccattgcttatatgactactgaccatgcttctcttgtgggggctgtgagaggtggtaccttaggcaggggccgcagttccaggagcatgagggaacacctactgtgtcatataggtgaattatgaccatcgaggttcagatctcagctcgactggagaccagcctacaattccccatatctagctatggtttctgagttagttcttacctattgcaagaaaatggttgagtgaggcattgatatattggtgatgaataatttgtttagaaatcattttatctctcttggtttaacagaataataatattcagtttttccctaggcctatggtctatctagcaatggtcttttagccattttaccagtgtcagataccaacacagagatgaatgaaaacactaagacaattcaggtattgaaaacctaattcagtaaggacatagaaattctcaaga

SEQ ID NO: 4689 - DNA, 1400 bp, mus musculus
tagctctctcttgacaacaacaaacaccagactgaagaggaccgtatcaagctgttcttgggcaacctctgcctgaccattcattgtacatggagtttccgaatttagttgtgtttgtttgtaagactgcattgttacaaatattttaggtaagtattttggttgctattcttcaaatgagctttaacaaaatatttactttattagattctgagacttgcatatgtcaatattatattacttcattttcatcctagcctcttccttttccaactccttccatatgcaccctgacccaatttcaattcataacctctttttaaattatgattgctataccaacacaaaacacacagatattatgcatatgtacatatataacattatgtatacatacatacatatatttatatgtgtaatatatatgactatatattacacttatataaaaattgatgaatccattttgtgtagtttatatgtacatgtgtttaagtttgactgtttggctaacatatcccagtattatccatagagaggactgattctccctctcttgccagtcattaattgcctgtagctcttcatctgttgaaggactactgtgaaatttctatgatcccattgacagttggcatgtcaactggtgttgttaatttacaggttgtgtttagcctaccatgttgttgagattttatggccatctgcctctcagaatattattgcccctgatccgcaatgttctctaaactttggatatagaggttacatagtagatgcatcaaatgaggatgcacctctcatggttctctgtatttttaccagttgtggatttttcatgatggtatctgtatctgtcaaaagatactgctttgatgaggggtgagaactatatttattgtggatataaggaatatttagaagagagtggaggattaaactcatttagaaatccagcaacattaggtccttctctagatctctagtcctcaatagcttcaaaccttagcataggtttgagaacaaggtatgaatgccatcctattgagaaagtcttcagtcaaagtaagtgtctgttctatatcccttaggtataagtgccagtattgcacccttgagtgtatcgctccattcagttaacttctatggtttgtaagcattagagttgggtaggacttctaattgtttttcttggttgtcaatttacatatacctgttgatattttgaaacctgggcatttgccttcacttcatagaatcctaatgaaaatacgtgtctgaatgccatagaatgaatgaaactagtggtagtgattactatatcaaaaggatgaatagctttcagaaagaatagagtgagactgtgaatcttgactttaaattgaaaaacaaaatagaac

SEQ ID NO: 4690 - DNA, 1000 bp, mus musculus
agatattaagaaaacaagaagcctatttaaaaatggggtacagatccaaatgaatgattctgtaagaagaaactcagatgacacttgaaaagctcagcattcatagtcatcagggaaatgtaaatcaaaactacatagagattgcaacttacacccactagaatggttaaaataaatcaagcgacagctcatgatgaagacgatacagagaaagacaaacattcatccattgctgttgagagtacaaacttgtttttattattattattttctttatttacatttcaaatgttattcccttccttattttcccctctgaaaatcccctatgctcttccactcctactgttccccaactcacaccctcctgcttcctggtcctggcattcccctacagtgggccatagaaccttcacaggaccaaggccccctcttcccattgatgagtgactaggccattctctgctacatatgcagccagagccataagtcccaccatgtgttttctttgattggtggtttagtccaagggaactctgggagtactagttagttcatattgttgttcctcctatagggctgcaaaccccttcagctccttgggtcctttctctagctccttcattggggactctgtgctttgtccatggatgcctctgagaatccacttctatttgccaggcactggcagagcatctcaggagacagaagccaatgtggaaatcagtgtggcagttcctcaggaaggtgagaattaatctaccattaattgtaccactattggacacacactcaaaatcttgccatagagccatagagacacatttgtaccatatctgttgctggtctattcataataggctgaaactggatacaaccttgattaccataaagagaagaattgataatatgtggtatatgtacacaatggtatattccttagccagggaaaaagcaaatcttgaaattggcaggtaaatatatgaaacaaacaaacaaa

SEQ ID NO: 4691 - DNA, 1400 bp, mus musculus
agacaaaaaaaaaaaaaaaaaaaaaaaaaaaaaaaaaaaaaaatacagaaaaatgaaaacctaaccagtgttatgaatcaactggacctaaaaacacatctatggaatattacacacagccagaaaaaaaagaaaaaaaccttcttcccagaacatcagaacattatgaatcattctcaaaaaattgaccatatagttggtcacaaagcaagcttaaaaatataaaatacagttgaaataatttcttgtattttatcacagcactatggattaaagcttgacatcaacaacagaaacatcagaaaacctacacactcatgaaaactgaacaactctctctactcaatgatctctgagtgaaggaagaaatagagaaatagactcgagccccgggctaccttgccagcagagtcttgcccaacacccgcaagggcccacacgggactccccacgggatcctaagacctctggtgagtggaacacagcgcctgccccaatccaatcacgcggaacctgagactgctgtacatagagaagcaggctacccgggcctgatctggggcacaagtcccttccgctcgactcgagcccctggctaccttgccagcagagtcttgcccaaaacccgcaagggtccacacgggactccccacgggaccctaagacctctagtgagtggatcacagtgcctgccccaatccaatcgcgcggaactcgagactgcggtacatagggaagcaggctacccgggcctgatctggggcacaagtcccttccgctcgactcgagactcgagccccgggctaccttgccagcagagtcttgcccaacacccgcaagggcccacacgggactccccacgggatcctaagacctctggtgagtgaaacacagcacctgccccaatccaatcgcgatgaaactgagactgcggtacatagggaagcaggctagccgggcttgatctggggcacaaaccccttccgctccactcgagccccgggctaccttgccagcggagtcgcctgacacccgcaagggcccacacaggattccacacaagatcctaagacctctagtgagtggaacacaacttctgccaggagtctggttcgaacaccagatatctgggtacctgccctgcaagaagagaggttgcctgcagagaatactctgcccactgaaactaaggagagtgctaccctccaggtctgcttatagaggctaacagtatcacctgaagaacaagctcttaacagtgacaactaaaacagctagtttcagagattaccagacagcgaaaggcaaacgtaagaatcctactaacagaaatcaagaccactcaccatcatcagaacgcagcactcccacccaacctagtcctgggcaccccaacacaa

SEQ ID NO: 4692 - DNA, 1200 bp, mus musculus
ttttctttcttcttatgcctattatatactcaaaatatgtacaatgctcaatgattgcaatttaaaaacataaagttaaatcaagaaaaagtgtcataacaaattgtgggactgtaaaaggtatggggtccccagttgaactaaggttagaagcctcagagactgtgaaggaatggttgcagttttacctggtcctgggtaccgggccccatcactagctgcagcacagcatagatttgtggccatcagacatgtaagagcagtgctccaagacccctaaaggtagaaaaggttgtaaactatggtcacttaggctcaagacagatctccaatttaatgcagtatctaaagacctggatggcttagccaataagctttccttcccagacactcctccctgcaaagggtatttaatctcaggccaccctgatatgtgaggtatggtttttcacatccactttctgccatgacaataaatgccttaaaaccatggactgcctcttttcataaagatctaccatggggagcaatggagaaggtctttgcctatagagctgctgtcttgtctcccatagaaggcctctctgcacttccagccatgaccaaggcaagccccaaattgtcaccaccaagccaaggactcatccctgcaggactagctggtgctcacctcctttttccctgtccccagctagagccattcctccagcccccactctgttctcagctcttctgcagcttccatcacctggattccaagatcttgagaaccaggcctggggatccctgaaccagctccagctgtctcatgcctcaaactgtgctttcccaccccctgaagggtgtcccagggctttactatggtttcaatacccacccagggacagcatgggaatgggtaagagcagtcaactctccagtactgcctccccaagcagccatgccatgtagtggagcagatacggaacatgtaaccctacaacaaatatcaatgactaacatctaggttttttttttttttgcatcaacaatacaaatgaattaataatgccattgtatgtatctttatagtattttattaattcacaggatataaagcatcatctaaagttgtttaacacatatagtatgcataagcaaagatcaaggtgctcatcttctacatgtgtgtgcagagattaaggtcagcctatgtgtgtt

SEQ ID NO: 4693 - DNA, 1000 bp, mus musculus
aggttaccaagacaaatatacataaacatggtttatattggtggacattattgataaagtaaaagataaccattttacaattcacagacccaaagaagggaagtaacaatgagggctcaaggaggggacatgtgaatctcaatgagatttggacatagaatagatactatgagggaatgggaaggcaactggatggtggtggggtaggaatgggaacaggagggatcaggtgggagatagacttgagggagcgaatactagggagtgacaactggaatcatggaaggtaaggtgaagtatctctgggaacccaagcacccaggacaatggaaataccatggaatctatgaggatgactgtatttgctttgactccaagcatgagaacatggagcctaaaccggctatctcctataaccagataagagtttcaatggaaggactgtgacatccacacaaccataagaacttccaactacagtttatcctgactaaaagatattcagagaataatgatggagcagaaactgatgaggtggctaatcaatgacttgtccagcttgccatgaaatgagctcacccttaacactgttaatgatactctgctatacttgcagataggaggctagcataactgtcatcagagaggcttcaccaagcaacttcagcaagcaaaattaggcaggacttcgagaatcctgtggaagaaggggataaagaattgtaggagcctgaggagttaaggaaaccacaagaaatcccacagaatcaacaaacctgggctcataggggctcacagaaacaaactgccaaccacgaagcatgtatgggactgacataggtcctctgcacatatgtaacagttgtgtagcttggtcttcatgtgaggctcctaaaagaaggagcaggggctgtctctgttgcctgtggtttgaatccctttgccctaactgggatgccttgtctggcctcagaagatgagagcctgacttacttcaaca

SEQ ID NO: 4694 - DNA, 1000 bp, mus musculus
caattttgaattcttaaaaactcaaagctggcttaaagtgttaaactttatgatcataaaaaagtacataggcaaacattattctgctaggtagaaataccaagggtttttacacacaggccagtcaaagtctggagaatagctatcaccaatggagctatcaccaaggaaaaggtctaccaatggtaactgccaaagttgaaccaacaaacatcttactgaaggttgaatccatggaggtatcataccacaggagaggtgtgaaatggaaaagaaaagtccacttccaaagaaaccaaaaatcattatttaatgttagaattgagacagaagaaaggggaagcaggctgtaggttgggaaaattaagaaatgtacgaaagcaaagagtggatactgtgaaaaatggaggtaaagatgagagtatcatctgcttaatgcctaagcttgccttatcaaggtgccaggcagcacaggcatggatggactcgtgcctaccaggtgccactctgcctaaatgtccatttactcaagtcacttggattctcagattcctaggttcactcctttcttttacattttttatcgctggggatcagggctgggaatgcctctaattcttctctggctagacctcagctcttgatcaaaggccctttcacagaatattcctttcatctaagcttttgattcaatctacttttgtactcagttattcatttttctgagacaaggtctcctgtagttcaggctattgtctttataggaacaggagattttgagcatctcatcctctcccctccaccccctgttttctgagattacaggtgtgtgcaatcatgtccatttctgcagtgttagagagcaaacgtagagctttgtggacactggaaaagcaatgtacccactgaactatagcctcagcattccaaggagaaaatctagaactaaaatctaaatttaatactggaagcattgtgaaatatgaaataagtttattat

SEQ ID NO: 4695 - DNA, 1000 bp, mus musculus
taactatgtaaattaggtttgtggagctagatgagtgtataattgaggtcaccctatgctaggttattctgtatttccttgtgataaaataagaaatagcttaaagtccaactcttttagtcagggtttctattcctgcacaaacatcatgaccaagaaacaagttgggaggaaagggtttattcagcttacattttccacattactgttgatcaccaaaggatgtcaggactggaactcaagcaggtcaagaagcaggagctgattcagaggccatggaggggtgttacttactggcttgctttccctaacttgctcagcctgctctcttatagaaccaagactaccagcccagagatggcaccacccacaaggggacctccccacttgatcactaattgagaaaatgccttacagttggatttcatggaggcacttccccaactgaagttcctttctctgtgataactacagcctgtgtcaagttgacacaaaactagccagtacaccaacaaacattacattttggactaacatattgagtgtgattttaaattgttttctttagtctttcactgaagagagtgattcttaaaatttgagaatagcaacttaaatttaaatactgatgctgatactgaataaccggaatgactaatgcattagttttctctttttgtcacaacatatttgacagaatcaaagtaaggaaggaaatgtttgttttggcctacagtttgaagtacatttcataatgacaggtaaggctcggtgacaagaatgggctgagctctggaaacaggagtgtgggttgctggtgccattgtgtcacagttgggaagcagaaatgttggaatgcaaacactgcttgcttccatgttcttatttagcctcagattccagtctgtggcatggtgctaaccaccttcaagatgtcttcacaccttagttgaactttctggaaatgccctcccagacatgctttctcagagattttaaa

SEQ ID NO: 4696 - DNA, 1400 bp, mus musculus
tttcaaacaagtataaacactgcaataaaaagtaggtttttaaaaacattctgaatagtttgccaatatgtaaatatacctttatcgccgtaaggaaaaatcataaaatgaagagctactgaacccatactgtatttatagtctaagtcaatcaaatttattatatgaatggaaatcaatttcattaattctgtaaaatgactattttctttatgtcttaaataattaggcaacaagaccacagttggattcaatcacctttattagcctatcaatgttacattttatacataatgtctagtcatcttctcagagggctctatttttagtacatcatgttaacagtaaatagccaagtgtgatggctataccttagcctagctttttaatattctctgggaaactagaaagccaatcattttacacgcatgtaagagtagtgttccaaaataactaggaagcggctacaattttaagcaggggaggaaacaatattcattttggtctttttgtgtctgtattctggtaaattatattttcaattaacagcaacaatgatatcataaaaaaatgctctgctttttaaatttttaaacttcaatacaatacaaattgaaacaaaatagtattgtatagtcttttgggaggcaatcagccattattattagtgtggctgaacctccttatcgataaccaggtccaggttgggcatacccctgaccaaaaggaggacggttacgagcataagggttagccccactagaaggaggggtcatggtacttgcaggagatggcgtaaaacctggtcttggttggtaagcaccaggttggcttggagccattccaggctgagagccagggggaacagtatagttggcaggctgagatggttgggtagtatacgtttgtggagggtaagtgctcgcctggtactgctgtggtggttgagcaggcagttgttgtggctggccagaaaaggcaggagccggtgcctgggaagttggttgttggccatatccctggaactgctgaggttgttggggtccagtctgctggctgtaactagctgaaaaaagcaaaatacataacaaatgttttgggttttttggtgaaagttttccagagacttagtcttattgctatggaccaaaaatgattaaaaaattaacaaatatattcataattatgtagtgagtccagcataaaacatctcaaaaccaaagagttacaaaatttttccagacactttttaaattctatagcctaaaattcaagtcactataagcatgtattttcattacaactgctttgaaactaataataacccttgagcaagttcccatttgcacaaaattcctagaatgaatgctcaaataggtgaaataattacactttctagg

SEQ ID NO: 4697 - DNA, 1400 bp, mus musculus; identical to SEQ ID NO: 4696

SEQ ID NO: 4698 - DNA, 1000 bp, mus musculus
aaaaacaattagggttaaacatcaggtagttccagggcacaggcagcatctgtatgtatgattctttcctgctttttctcactagctccaggaagtactttgctggccctagagaatcaagctttgtttcctctgagaaatgtctgctgagtgattaatcattgacttgatgcccaacttcgggttaccctggatatcaaagatggcttttgacaggtatgagaaacctgaatcctgcaggaagtgcaagacataggattggaataaataaaataggatgtatggagcaatttagatctagcatgaacatggaccagaaaaacaaaatcctaagtaacatactgatgagaggagagatcattgcaaagcagggaggaggcaatgtccctgagatagagaagataggctctggcattgttgctttgaataaactggtgtggagcacatgagtgcaggcctagcatgtggactgagtaggctctgaacatatggacttggtcatgatctgcatggactcatcgatggcatgggctttggcattaaccacataggcccactggacctggaccacatgacctccaatattgagcacatgggccagatcatggagttcattgggtctgacatctagcacatgggtgtctgcataggctttggcctggaatgcatggttggacctattgactctgtggagcaaaccattgagagtatgggctctagtatagagcacattgactctgccatttacagcatggatctgcacatgatacccacagacatggggctggcttggagtgtattactcctgtaatggatgctatgcttgcttgcctggagcacatgggtgccaccaacctaaagcacataggtcttgaggacttacaagccaataatcttgagcacatgagcctggagcaattgttgccaatagcctgacgcacatgggccctgccatgtgctcagcattgggcattggcattgagcaaatgagcctagcctt

SEQ ID NO: 4699 - DNA, 1800 bp, mus musculus
aggaggaggaggtaaaaggagtaagtcagacaggccaggagcaggagcaagaatgagtaagtagcccctggacaggatgacataacatcctcacacactgagagaccattcagtcttttccactctccctgccaaatacatagatggaggggggagaaataccactctaaaagtaagtggctcagcaagcgacctctggctaatgagcaagtttggcttttcccatgggccttgcaagcattcgccttaaaagaggaagggctttgcttcccttgggtcttaagcctgagtttgccatcttggtggggatggatgagggacaggtaaatgcaaatctctgggatatcccacaaggacaacagtacatggagctctcttcaaatattaagttacttctaaatttagtgtgtgtgtccgtctgtctgtcggttcatcccgcagcgccagttctgcttaccaaaagtggcccactaggcactcgcattccacgcccggctccacgccagcgagccgggcttcttacccatttaaagtttgagaataggttgagatcgtttcggccccaagacctctaatcattcgctttaccggataaaactgcgtacgtcgggaaaagagcgagagcgccagctatcctgagggaaacttcggagggaaccagctactagatggttcgattagtctttcgcccctatacccaggtcggacgaccgatttgcacgtcaggaccgctacggacctccaccagagtttcctctggcttcgctctgcccaggcatagttcaccatctttcgggtcctaacgcgtacgctcgtgctccacctccccggcgcggcgggcgagacgggccggtggtgcgccctcggcggactggagaggcctcgggatcccacctcgggcccccgggcggggcccttcaccttcattgcgccacggcggctttcggacgagcccctgactcgcgcacgcgttagactccttggtccgtctgccatggcgtgtgtgtggaggtcagaggacaactcttggagtggattttctctggtcacctggtgggatctggacactgaattctggtcatcagacctgtgccaaattgcctctacccataagtgccactaccctttgagccggtcttaaattgcaattaaatgcaaaataactagcagaacacagaagacccagtgccattcagtactcaaacatatctctttaacctttctctcccagacttattgtttcaacaacttgagaatagctggccagagttcttaaagatgtcaactcttttatattcctattccctacaattgttggacaactttaaaacattttgttgccgtttagtttctttgattcataacaaactctaatgtctgtcttctttagcatttaactatcagcattaactataaagcatccaaagaaagagagacttttaaaaggaagacctgaatacaatccccaggactagaaagaaaacgtctgggtctgtggggactgctcagccagaaaagctcacactgcatgagcaaggggacccgagagttgtgggtggaggtggacatggtggccccctctgcaatcctggcaatgggcagaggggagaccaagacaggtggatcctcgaagctccctggatagccagtctagtgtcaggttcagtgagagaccctgtctcaaaagacaaggtgtggtgcagtgatcacagaaaatattcaacacggacctcttgtcccaatacgtatgtatatgtgtggatgggtgacacacacacacacacacacacacacacacac

SEQ ID NO: 4700 - DNA, 1800 bp, mus musculus; identical to SEQ ID NO: 4699

SEQ ID NO: 4701 - DNA, 1200 bp, mus musculus
tctgagttgctgttggtcatggtttttatctcagtaatggaaaatcaaactagaacaagaaaactatgtagcattaaatacgtgattatatggaaggtactcattgccatgcgctcataactctccaaaagaagcattggagaatagctccctatgtactaagtgtatgtagaagtacactctcgtataatagggcgttattgaagcattcttggtcaggaagttgcaaaatgacaaattctactgtcttttcatttcacttcatttcatttctttttattcttgtggatgcagtgaactttattgatggtattcaagagagaagggagagctccctagacccctccagttattatggaggtctgggatggaaattgtgagggagatgcaaagtgtggggggctgagttgggatagggactcctcagcaaccgagggcttctctcttgctctcagtgtccttcctggagtgggtggctcagggtttctttctccttgtaggccatgtaggccatgaggtacaccaccctgttgctgtagccatatttattgtcataccagaaaatgagcttgatgaagtcattgagagctatgccagccccagcaccaaaggtggaagagtaggggttgctgtttaagttgtaggagacaacctggtcctcagtgtaggccaggatacccttcagtgggccctcagatgcctgcttcaccaccttcttgatgtcatcatacttgtcaggtttctccaggaggcatgtcagatccataatggatacattggagggtaggaacatggaaggccatgacagtgagcttcccattcagctcttggatgaccttgtccacaaccttgacagcaccagtagatgcagggatgatgttctgggcagccccccagccatcatgccacagctttccagaggggccatcaacagtcttctgagagccagtgatgacatttcactaatggttgaagaccctaaacatcagaaacacaaaagtttttgttgtgaaaaaaattttttgttgtgtttttatctggatgaaaaaaaagaaaagaaaaagaaaaaagaaaaacctataaaaataccactagagattaaaaaaaggggggggggatatgatagagattgcaaagaaattcaaaaaatcattagtaaaacaaaaacattaaaaatcttctagaatcaaataaaaatca

SEQ ID NO: 4702 - DNA, 1200 bp, mus musculus
ttttggaagtttaacaacccatgcacaaatataatattttgttttcatgaactccagccttcgacacaagaatcaaattgtacccttgcaaggtttccatagaggagaatgtattagagaatgagaattcccatttggcttaactgttctctggagaagaaaggaaggatgctctgctgggcaccattgatttggaccccaatgaaatgtccaaattggtcccactgagtatcacaaactttaacattataaatttctaatgctttaagagtctcaaatattaacgattgacatttcagacacaatccacttccttcttaagagcctaggccagtaagactgattcgttctttcctcccttcccaagcttctggccagcccacaaattcatcctggatcccatatccagtggccccaattgctctggcctctccccctgcaccccacaggttctgacatggacctgccctatataccataactcactggtttcttcttctctgtaacccacatcaccacccagccataaatctcacaaccttatttagtgtctagactggacctagagtatctgcaatgacaaacgggtcacttctctatatccaacagctacatctagccatacactccataactttctccagtgtctatcccagacccactatatctgccaccatcctctagtcccttttgttactaatatgatattgatcctttattttatgtaagcacttagtgctataaacttacctcttagaaccactgtcttagtgtttctattgctgtgaagagataccatgaccacagcaactcttataaaggaaaggatttaattaggaatggcttacagtttcagaggtttaatccattattatcatagtgagacatggtggtgtgcaggcagatcctgggggaagagctgagagttctgcaacttgatatacaagcagcagcaggagactgtgtgcctcactgtacatagctttaacatatatgacctaaaaggcacttccattgtgacatacttcctccaacaaggccacatctcctaatagtgctactctctttgaccaagcaatcaaacacattcatctttggggaaccacacctattcaaatgatcacaactacattcattgtgcctaatacgtttgggtatgttgtgttttccttttcattcaattttttttccattttttat

SEQ ID NO: 4703 - DNA, 1000 bp, mus musculus
tatatggtctgtgttttgatgagcccttctccattatgtttgcagtacctttctaaaactcattttcactgtttgtcttctcgcttttatctaacggctaccagcatctatagggagccgaagccctgagtaaatgcccaagtaactgtgtgttgtcgacatgagcccagagcggcagacccacagagtgatggcaaagtcttctccctgggagttggggtcagaaggaaattgcagaccttctcttctggcccatgtgtgaaatattaatagtatgcgtggaaaatgtcgagcacagccttacccctcggccaacattttcagcctgaagactgctcccctacagagaaggctcttagctaaacctgtcccttggcccagatctatactacacactccgcctcctcattcatctgcacagaataactgtcttccctgctcagctctctgctataaccgctgctccgttcaagtccacacaacaagcaagctgagggtcccacatgaaaaggcttctcctgcagagtgcccagatcagctgaccctcagagttctgcctctccgtgtgtttctctcattgtcatttcctctgaaacaccagtcaggtttgtccctggaggcaggctagatgagtggccaccctccttgccccaccaccaccctccctgccccaccaccaccccatcttgttgtctcttctgccttccttacaggggtttccttcgtttcgattatgtgtgtatgtaaataacaaatatccttaacagatacccatcatcaagtaaagtgcagcttttgggtatactttgtatcttagtgccccctgtattaatttaattctgagtggcctcctgatcagagtgagcatatgattccaagtatatgcccgttaggccggtccacccagtaacctgcacaattccctgtgaagaattcttatgctgaggaaggaatggttctgtttactggccctcacctgaatgcatagccaaacatagcc

SEQ ID NO: 4704 - DNA, 1000 bp, mus musculus
gcaacctttttaaaacatacacagtggaattctctttcagttaaaaatgaataatgtcgccttctgataggcgccagcaccgggtcacctcaggcgcagagtcgttggacacccccaaagtcccctagaggactctccacgcgatcttaggaccattggtgaatggaacacaacttctgtttcaatccaatcacgtgggacctgagacagcattagggaagcagaaaagctggccttaccaggatcacaaatcccttctggttggcaccagcacagggtcacctgagcgctgagtcagtggacacccacaaggtccctagaggacagcttctgaggcagaccccgtttccagttccagacatccgggcaccttccctgccagaggacaggtgtgtgccccgtccaggagagctttgccggagcacctgagggtgccatcttggttcctggatccctctgagactagtctgcgcatgtgagagtgtggaatacagaagctaacagcttctgggacaggccgaagcgacacagctactgggacaggccctgtttcgggccttcatcttcagtcaagaggcaggtgtgaatgccagatatctgtgcaccttccctgtaaaaggagagcttgcctgcagagagtgctctgaccactgaaactcagaggagagagctagtctctgaggtctgctgatagaggctaacagaatcaggagagaaacaagttctaaccagagacaactataacaactaactccagatattaccagtaggcaaaaggcaaatgcaagaatcttactaacagaacacaagaccactcaccatcatcagaatgcagcactcccacctcgcccagacctgggcaccccaacacacccgaatagctagaaccagattaaaagcatatctcatgatgatggtagaggacatcaagaaggactttaataactcacttaaagaaatacaggagaacacagctaaagagttacaaggccttaaagaa

SEQ ID NO: 4705 - DNA, 1200 bp, mus musculus
gcattttatttattttatctgtgcatgttctaactttgccttaattagtgtatggtttgttttggtcctgtactttggtcctacagagagcagatgaattaggacttagccttcctaagaatccattcatgttagaatcatcttggttgactaagttgttctgttgatgtcccttctttcattccacattttttgcatcttctctgcaagcattctctcttacattcttacattcacattttaccagatttatcgtcaatcattccccacaacaacagtgaaaagattctgttttattttatcttcagctaatgatcaaaatttcaatacaacctatagttacctaaccaaaaatcagatattcggcataactgtcctttaaaatgttaataacttatcaatggaaaagtatcttttatcatgtgatacaagatttataaaaatcattttaatgtcattaaaattagtaggcattttaaaatatactagatcatgtaagtgagttttattttcaaaatatgacagttataatctagatacattttgactaggtaatgtctacttgtacagtcacataaatatgtcatttatttggcatctccacatctttgttgggaaatcttatgtcaacaacacgttaatgaattttctgaagggaggaaacctcaactctgacaatgttttaataagatccagcatcatatggcattttcttaattagtgattgatagagaaaggcacagcccactgtgtatggttctatccctgtgctggtagtcctgggttctgtaagaaagcagactgagcaagctaggggaagcacaccagtaaaagtaagccagtaaccagcattctttgaaggcctctgtgtcagctcctacctctaggtcttaccctggtttgaattcctgtcctgacttccatcagtgatgaatagcaacagttgaatgcaatccaaataaatcctttcctcttcaacttgttctttgattatggtatttcatcacagtattagaaaccccaaataagacattgtcatatattatataaagtaaggtctggatatttggaacaaaaccaaaaatgttcatcagaaagatggtctcatttgaaacaatgagacctaagaaagacaagatggaacaagatgcttacattgttttatccactcatagatcaatcagagcaaatttaagtgca

SEQ ID NO: 4706 - DNA, 1000 bp, mus musculus
ttagcccacatcatccaaacaatggctcacaactgcctatataactcgagggccaggagatccaatggcctacattggcctctgtgggcaactgattggaaatggcaacatacaattattcatgtacagatacacccatgcacattcacatacatgtgcacaaccccatatgcatgcacatgcatatgcacatacccacatataaatgcagacacatacacacacacacacacacactcacacacacactcacacaatatattaagtaagtgaaaaaatactatttcctagtacaataacaaaaaggttttaggatataaagaataataaaacagatatatcctccagttattctgtttttatttacaggagcccctcatctggggatacctgttttggatgaaacatatgaaggaaaacaaaagagaaagtgaaagctgccatgtccccacagcaagagtggataatatgtattaatgttatattagtccttaaattcaattaaggttgacacctcaaggccacaattgtgtcataataaaacatttcatagtaaattcactgatagaatggcattgtcttagtcagggtttctattcctgcacaaacatcatgaccaagaagcaagttggggaggaaagggtttattcaacttacacttccatactgctgttcatcaatgaaggaagtcaggactggaactcaagcaggtcagaaagtaggagctgatgcaaaagctggcttgcttcccctagcttgctcagcctgctctcttatagaacccaagactgccagtccagagatggccccacccacaaggggcctttcccccttgatcactaattgagaaaataccccacatctggatctcatggaggtacttccccaactgaagctcctttctctgtgataatcccagcctgggtcaagttgacacataaaaccagccagtacagtcatgttgataaacagatatgtctgatcagaagacatccaaaca

SEQ ID NO: 4707 - DNA, 1200 bp, mus musculus
ttatccccatggataattatagtcttcacccctcactaaggaaacttgtgcaacaagttttcaacagagaccaccacaggaaactacaagtagtcaaaatttagacgtgtagaacctaattttaatagatatagctacaaaacattaccataactgaagttctagaagcagtatggaaaattgggcaaaaggatttaagagccagacgatactagaatttttatgtttagaataatgtcagcagctacacctttaaactctcaccaataagatggcacaaccatgtgctgagcaagaacaaccaatatacatagaaaagtgtgtgaggaaactcccacaaggtctgaactctacacagagacgtactggaaactgaggaaagctggggctggccttccccagggaagatcatacatcaattgatttttccagtgcctgaactgaaaatatacatagaagtaacattatatggactgaatgtgttatatttaggaatatttgtatatgttacatacatttacatatatatatatgcattcaataacaattaataaaaaagaggatatgaatttgaaagatagcagggagggttacaggaagatgtgaagggagaaaggggaagagagaagaattgtaattaaattgtaatcgcaattataaaagaggaagtaaaaagtattttgagttgagattttgaatcccaacatatttaaaaggaaacattaggttcagtatttggaatattgtggaacataaaatatggcttttgcaatttactgccaataagttgctatgtaaagtcatagaatttaacttctttaaaagcccacaagtataaaacatatggtaatttaagaatggactcgcagggtaggcataccttacatgttctgttatcagggaatggtattaatttagaaaaaaattaagagacatggccttgtggtgttacttgttgtagcaaatgtgtcactggtgtatagggctttaagggtttagaaggacaagccaggcccagagtcaatttctttatctgttgcaggtaaatccagattaatagctctcagctcattcaccaccaccctgtctacgtgcataatgttatattctctgccataataatcatgaactaaacttctggagctacaagtaaaccccagttcctttcttgcataggagttacagtggtcatgatgtctc

SEQ ID NO: 4708 - DNA, 1400 bp, mus musculus
ttattaattgtctttaacaggtggaggaaaacaatacaacttactattggtccttacctattaaccttgatactgcccactattcacagtacagaaccacaaaggaagtttatcaataattatttaattcccttacatactacatactctacttttccacagcttacattttcagaatgagaaattatcatctgaagaattcatgactcattcatactcaccacaatggttattggtcaacctaattttaacagcatatctttaacaaatagttatttttatcacctagacagaggcctctgagaataaaagataaatcttttgtgtatttttatagctaatgatttctatgtatatttaaagttaactgtgtaatataaaaacctgggtattataaaattaatagacattacctaaagttcagaaaaaaaagcagttcaattatagatcattatctaatataagaaaacaccttagcaaattaaaataggatccgaaatctctgtcattacagaaatagaaaggcattgggaatatgtcagtttgtaagtatagagcgctcacaaaaagggacctatcatgactgccctccggaagacccaacaagcagctgaaagaggcagatgcagatatttgcacccaaccattggacagaagctgctgacccttgtggttgaattaggggaaagctggaagaaactgaggaggagtgtgaccctgtaggagtatcagcagtctcaattaacctggacccctttgatctctcagatactggaacacgaatcaggcagcaaacaccaactgatatgagatgcccaacacacacacacacacacatacacacacacacacacacacacacacacacacacacacacacacacacatatatatcagaggactgctgggtctgggtttagtcaatgaagatgcatctaacccttcagtgactggagatctcagggagtttagaggtcaggtggaggtatatatgaatattaaacaaacaaaaagactatcctccagtgtcatgacccctcagcctatgcttcaagtccactctggagagctcagggatttgtttaaattgcagaacccacaaacagtcacatgcatatatttcttctagtaatcactaaaattcttcattagttttccttaatctctgataccctaaagaaagtttcttatgactttcacttatcaaaagaacattcaacaaatgacacattaattttgagaaattctaaaactctgagttcaacatgtcttcatgtattttattatatttgttaaaatgttttgttctcttcccctctttaaattgtaaaaaaaaaaagtacaaacattcatattactttgttcaaaatgtatgggttgatattcaatattaatgttta

SEQ ID NO: 4709 - DNA, 1200 bp, mus musculus
attcagaaatcagatttctgtgtatttgggcaacagttttgtactttgttttttcattaaaaacatgggtgattttttttttttatcaagtctaactctaggaaactgaaatttcttacttccatattttttttctgacttttgttcttataaaaggatttgaacctgtggctcaagctaaaccaatactctgtcaccaaaatgagtacctagccctgttttgagcttattttgagactgtccctctctaacctgcaatggcttgtggttagagaggttcctcagtggctagtttaagagtgtgatgctcttacagagaccaaattgcatcctctgtggaaataaggaaaggaataagaaggaaggaagggaaagaggaaagaagggagggagggaaggaggaagaaatagcaaaacaagaaatatccaataacaaaattagcagcacccaaaggtacaaacagggaaaaggtgagtaaaagaaactagactggaaaatttattttattatgctgagttcagatttctatatatttgctcaacagttttgaactactgagtctcttttttaaaaataagggtgatttttttttctcccaagtctaactctaggaaactgcaaatgctttacctggcaaaacttaacatgacagtttgccatcactacatagatgaatcccattgctgacctaagcagtgatgtttgtcagctagaatcttcagtctgtctctgttcttctataagcttgaattctgactcctggaacttccagttagggaccctctcacacacctctctgtctatgagtactgcctttccacttccttcttcctactcaccattctcctggctccaggaccaagaaatgtataagatcttcctgcttgacacctgctatatatagaatcttcttgatattctgcatattgactagaaccaagctacaataggaaaaatggaatatttgtgtagtagattgccatgataagacagaaaaaaaaccagcattatccctactttgccttcttacttataacactgtttttgttttctgtgttatatgaataaaataatataacggatgatggttcatctatctccagttcaactgagctccaaacaaccaatctgaaaaacaaacaaacagacaaaacaaaaacaaaacaaaaatggttcaaaaatgattagaactggttttc

SEQ ID NO: 4710 - DNA, 1600 bp, mus musculus
tgagtgtattctatgcaaatatatgtatatacatgaaagtcaaaagacaacatgtaagactattccctcctattaccatgtagattaactggatcaaattcaggtagtcagagtttataaatttttaagtgatttcataatctttataaattccacatattgcctagaattgaattaatactttttaaacagtaaatatatttaatattataattatatagtcatatctgaatttattaatactctacatatttattgcattattaaatcattcatgaacaaattgtatttcacatttccaagaatctatttacttcttacaatgaaattctctctgtactaatcggaaaagaatgctgaattcaaagtatttattttatttgtcacctagtttagtttgctaaatatgaaaatgttattcccctccatgtaatgaaacaaaatgatatctaaaagaaatattaacacagtatcctcaagaaaacccaactctaaagtttgggtcaagtccagattgatgtgaagaactgattaaacgctaaagatgttcctcatggtacattaaagtgaaggaaaatgctttgaacaaaagttctttagtttaccggtatattaaaaggcattttgtcttggatcatgacattaacatggcttgaggatgaagcactcacagacaacagacatccacataacctttcacagtaacatgggccatgctggccaattaccataaaagaccatggacacattcctgaatcctggaggccacacaacccactgaaggtcataaaaaagtctttgatctgtacctccacctgagaccatgtggatatcatacccctggctatttgttggtgtctataatccatactgacaatggagacggttctgagatctgtggcatgtactgatgctggaggccaggtctatgtctgtgtcctgagctgatgaggggtactaagtaaaagttcatgattgtaaatgacaaaagagcttcttctgcagaaggattgatgactgcagactcacagtgaaccgagtgagacatagaagacttttgtgacaacaccacaccaccattaatatatatacacatacatatgaaacaatttaaaagagtcttaaaagttgtgatgctgaagaataactctccacaatagagctctgctggtgggagtcaaggtgggtgagacccacttgtctttcaatagctggtgaccagaagttggatcatgttccagtgactatatggatgacatacattttttgggagcaggctacagtgggtaaatccaggaagactaaggagattagtgattatgtgaacatttcaaataatcaaaaaattatatatttaaaaagaaaggtatcttctgaaacaaagataggatggattcacgtcagtgaaaaaaggaaaagtgtttagatttcctgaaacctaaagataatacagcagcctactagatgtaaatgaaaataaagcttttattcaggtcctcacccatgggggcatccctatttacaccatatgcaaaaggtgagaaaaaaaaaactcatgaaaaactcaacgattttctgaagaatcctcttcaaatatttt

SEQ ID NO: 4711 - DNA, 1000 bp, mus musculus
ttatctattatattcttcctcagtctcattgattctaagacattttttgtacagcacaaaagcattgccaaaaatggaacaccgagttcaggaagaagaaagctgtgagtgtaactctgttttcactggaatctccagatgatggtgtaaactttgcctggcattcaaaaactactctaggagaggaagtggctacattttggtcgtccttcaagttctaattcatttgtcactataagagatctacaaatactttagtatgaataattcttccaaggtcaggatatgtgactccctccactagtcaatcttaagctgaagtgctgaacagctgtaagttgtagtagaaacatttcctacttcattgggtttggaattgtctttttctgatgtatggaatagaaaatcggggactcaaagaatactcctcactcacatgcttcccctagcctgtagtagatgagtctccgagtctgaattaaagctagtctggggcctgaagccctccatttacatttctggatcaaagtgtcagtctgatggcctgaagagatgacttaatgcttaagaccacttattgctctctttcagggcacctgggtttggtttccatcacttacatgtggctcacaactgtctataactatagatctagaggttctcctatctcttcatattttagtgggctcaaacatacaatcagccacacacacacatacacgcatacagaaaaatatataaaaaagcattatataatttttattgttggtttcctttttaagtagcagtctgagattgcccaagaatgtgtgactgatgcctgctaagccatccctctataatcagaggcttagtgccatagactatttgtaagcatgaggcactcagcgagttcttgcttgactcatgtcacaaaaagcaatacctaattagaacacattaaatcagtaaagagtagagtacatgtgcactatatgtgccagttattaatgtggctccc

SEQ ID NO: 4712 - DNA, 1000 bp, mus musculus
tataatgtgatttcaaatcagagtcttacacttctggtgtgttggtatatccaatgctagctgtggtgctagaactgggttctgatgatgccatgtagccttgttttctgtcacttatgttcttgctcttgcctcttgccatatgtttatttctggtgttagctggtcttgctgtctctgactgtgcgttatccttcctgcaagcctgtatgtcagtactcctggaataccaggtctctccaggagtaatttgggtatggagagctttggtacattatcagctccagggtgtcaaggtaaactggaaggatcctgtctcctgtttttgtttggttcctgtgccctaatggctctgggcaggttcctctagggtcaggaatttgagcagatgtggtggtcttatctgtgctcacaggtgtgtaggcactcctggaattcccggtttcttcccatggtatttgggtatggatcactgtggcacaggatatgcaaatggaaaccagaaagcaaaatgacagattttcaattttcaacttggcacactcagctgtaagaccatgcccccttctttgatgagacacaacaaatagtctcacacttcaacaaaacattttctttgtttagtaagtttgagtcttttctgaaaagtataaactgaaattcccacatagttaaagtgtgattgacataagaatgggcgaacccacccagggatccatcccataaccaccttccaaacgctgacaccattgcatacgccagcaagattttgctgaaaggaccctgatatactgtctcttgtgaggctatgccagtgcctcacatccacagaagtggatgcttacagtcagctattggatggaacacagggcccccaatggaggagctagagaaagtacccaaggagctaaaggggtctgcaaccctgtaggtgcaacaacaatatgaactaaccagtaccccgaagctcatgtctctagctgcatatgtatcagaagat

SEQ ID NO: 4713 - DNA, 1000 bp, mus musculus
ttgttttgttttgttttgatttttgttttggtttggtttggttttggttttttggttttttgtttgtttgtttgtttttctttaaggacttgtaactctttagcagtgttctcttttatttctttaagtaagttattaaattccttcttcatgtcctccctctaccatcatcatgagatgtgcttttaaatccgggtctagcttttccggtgtgttggggtgcccaggactgggtgagatgggagtgctgcattctgatgatggtgagtggtcttggtttctgtttataagattcttaagtttgcctctcaccatctggtagtctctggagtcagttgttatagttgtctctggttagggcttgttccttttatgattctgttagtctctatcagctgacctggaagactagatctctcctgagtttcagtagtcagagcactctctgcaggcaagctcttctcatgcaggaaaagtgcccagatatgtgatgtttgaacctgcctcctggcagaagttgtgttctactcaccagatacctaagatcccatggagactgctttggggaccttggggttgtccactgactctgtgcccaaggtgacatggtgctggggccgactggaacggacttgtgaccctggtcagtcctggttttctgcttccctaattaatgctgtctcaggtcccgcaagtttggattggaacagaagttgtgttccaatcaccagaggtcctaagatcctgtggagagtgctctggggacctgggggtgtctgctgactccgtgcccaaggtggcctagtgctggggctgagtggaagggcaattcttattatttctaaactactttttgaaaactgtttcacaaatgacttcaaactgttttcagtagaaatcaatgaacacaacatgtatttggtttgcttgttaactctttgtaaattttgtgcccggtcagccttattcatttagtgtcttttcatatatgacttctcaa

SEQ ID NO: 4714 - DNA, 1200 bp, mus musculus
ttagtgtggcggttactcagggagatgggaattgatctaactttaaggtctagctatatgactcttgggtatatacccaaagaatgcttcatcttatcatagagacacttgctcaaccaggttcattgctgctctattcattttttattagatattttctttatttacacttcaaattttatcccctttcctcatttcccctctgaaaatcccactatttcatcctccctccccctgcttactaacccacccaccactactcccctgtcccgagattcccctacactagggcatcatgccttcacaagaccaagggcttctcctctcattgatgtccctctgctacatatgtggctggagccatgagtcctttcatgtgtactctttggttgatggttttgtccctgggagctctgggagtactggttgtgtattatagttaaaatagtactattgtgtgatgttactgggtgaaatctcattattagaaaagttcctgctataactatagtacttgactgtcatagggctgaaactggggtagggccttctatggcagatggaagttatgaatggaagagaagaaaggtaattagctctcaagctaccatctgcatggatatttcagctaatgtcatccccactgggacctgggagcatcttccatccctgtagtctggtactttcgagtggtcccccccgccttgttcctcatccctactacttatttctattccctctcctggccctctggacttctctcctgtctctttgcacaactggtcttgcttacctttttcccctacccctccactctcccaaccaagtcccatcttccctctgtttcccatggttatttttcccccttctaagtgggactaaagcatccactctttggccttccatcttgttaagctctgtcagcagtaccatggctattctgagcttttgaattaatatccacttatcagtatgtacataccatgtatgttctttgcggtctgggttacctcactcaggatattttctagttccattcttttgcctaaaaatttcataaagtcaccacatgttctgtatccattcttctgttgagggacatctgagttgtttccagattctggctattataaataagggtcctatgagcatagtggagcatgtgtccttgttatgtgctgaagcatcttttgggcatat

SEQ ID NO: 4715 - DNA, 1200 bp, mus musculus
tggatgggacaagaaaatatcctgagtgaggtaacccagacacaaaagaacacacatggtatgtattcactaataagtgtatattaaaaaagtgatatacacttatactaataagtgtatatcaaaagctcacaatgctcatgctacaaggaatgataatcagggtgtggaagctttagtcctgcattgaacgggagcaggaaaattgtgggaggtggaggaagagggggactggggagggagaaatggggggaaagaaataaatgtggcagtatcaagaaccagaggagatgggagagagggacagagggtcaggctatcaaacaaaataggtagcaggggggatgaggaactgcgggtcccagacaccagggaaatgtgacattccaggacccacctgggatgattttagctgaaatgcacagagaagggggagatagaccctgttgacacaacctttagtagattcgcatggcccctgctcgagggatggggccacccacccatttcaaagtttttaatccagcaatgttcctgtccaaaggaagaacaggaacaaaaatggaacggagactaaaggaagggccagctagggactgccacacctggggatccatcctgtctgcagacatcaaactcaaactgttgtcgtcaagaggctcttgctgacaggaacccgaggaagtctagccagcaactgaccaatgcagatgtggatgcttggagctaaccatgaggctgaactcagggaacctggtggtggagctggcagaaggactggaggagcactgaggggttgcaacctcactggaagaacaatatagactagcctgaccacccagttatcccagagtctagaccatcaaccaaggagtgtacctggagagatcgctggctccaaatacgtatgtagcaaaggatggccttgcctgaagcccttggtcctggggacgttggatgccccagtgtaggttgatgctggagaggtagtgtgggagagtgtgggtgggtggggggagcactctcatacagaaaaagaggagtgtggagggtggatgtgggatggggagcttggtggaggaggtaactgggatatcatttgagatgtaaacaaatggaatcattaatacaaataagtaagtaagtaagtaaataaataaataaataaggaccaaaaaaaaaaaaaagaagaatggatat

SEQ ID NO: 4716 - DNA, 1400 bp, mus musculus
ttcctcctttgtcttcacagacatctagatctttaactagatctggtgaaattatccctggatactttgtgaactaccattagcatcctagcattagtgaatgaggtacaggcatagtcatcttttcatataagagaggctgtttgggttagcctctcagagcaagtggtaagacatgtgtaccttctttgacaagagaattttttttttttaaaaaaaggaacaccgtcttaaagcctggcaggtcttcaaattctttatttgctttttaaattagaaagattgtggatagtatggataatttctaaggaatatttgagattttacagctgtggtctaaagaagtcacaggagaggccattacatgtccagagtcaagaaaggtacaaagctttgtttgcagtatgctgtgaggaagaatcacacaattattaaactgcagctgctcttcttttttttcccaaagagactcaatagaaatgtgatttgttctcacaatagtcttcaacctgtccatccattcaccttaaaggtgtttaccatacctcaggaaaaaaaaaaatcagccaacagtgtactgtacctctgaggagtcaggtcttcagcgaagtcccatgcatgtctcacgtgagtaagaaggaactcggctctttccagacctgacacagtagcatgggaacagtgggctgtggttttgtttggctcagcacaaggagcatgtctcatgaggagagtgtctccactttccttctgagaaaccaagtcgtgttgctcgaactgatatcatgacaaagctctggcaaatgacatggggactcagtgtagttttgtgtcaattatgttataaattatgcagctgttgagtgttgtttttcttcccggaagaaagtgaaaattacccagggagagcaaatgggaagaaacagcccagtgtagtgatgcctttccctcatgtcttctgaaactcatttattgcaaaaaacacttgaagccaagggaaaatgattttgtttctcagaagtagcaaacctaaaaacagtaccaaaacttggtttcttgggccacatttctacctttttcccctttttgttagatgtgtcattttggatttatggagatcacagggatatgccaacaatataaaacaatttttaaactaagagttcaagaaggaaggtaggctgactccttgctgagtctcaatcttcaaacagattcctgcttatagaagttgattaatgtagatgttcaagatgtgacactagccaatactcggcatattacacctttgagatattcttagatattctttctctgatgttttcttttacaaatactgaatttaaaaaaactatacaaaataatgtttttctctgagagatctgttaatatagtgaatg

SEQ ID NO: 4717 - DNA, 1400 bp, mus musculus
gccagtagaaaagaaagaaagctatgacagaagttttggagtttgtcagtaactaaaaccagtgagatactattcttctagttatctgtggtacaggaagcgagaacttattactcctttgtaaatgtatacacaacacatttgcataaacagtcttgataggcagtattttgcattctcaattagtgatacaattatttaataatatgagtggtttctcctttaaaggagtttgcatgaaaactacattgtagggtttgtctttatgggcattatggcatattttttgggaattatgggcatattgttgtttcagaagaaaattccttattcaaataagcagcatttgtctttcacatctttccctgtcaatgtgattctaaccagaagagctgatgggtcttatacctaagaggacaagagtaacccgagcaatgagaacagggagaactcagctgaaatggactcttagggtgggaacaatgggtgggagcagaaccctccaacccaaccatctggcagccaacacacacctggacttctttatgtttcatcctttgactgacccttttacctttctcaatgttgctattcaagttaaaaacaagtgctgtcagggaacagatggacttcactccaggctggggagagcaagtaagacataatgcaaggtgttcccttatgacctggaggtgacagcaaacctgatcaaaagggagctttctctctagggaggagaggtagtgcaggctcttgttggctcaaaactccttgctaaaggcagccagttcagcggcagttttaaaggaaagtcctccagaggatgtcctgaagccatcaaatccagatcccgtggaatgcctcctgggatccaggcactggccaaaaaacagaactgaagtagctgtttccagcaatttgcagttctcttaaatatgaggagaaaaatacatggagacattttagctcagcgggctcttcagcccaagaccttagagaagtttccattgctgccaagtgcattgtatgactctgcatgtaaataggtgctccaccatctgaaacatttcaggactactcaacccagtccgagagaataaatccatcctgggctaaacggtaacatgtaatatttattgaaaactttaaactgtctttccaaattaatatctgattcaaaaaggagccaaacgtggaaccagccatcaggatatacatgcacatatattctattcataaatctctcaaatagaagggattaaacagccttcacctctattagagaagtttgaggggtctataaaagctgaaatgtattaaccgtctctatgaaaatttatatataaacatagctatgggttaaatcaagctctgggcctaatgtggaatataaagtactc

SEQ ID NO: 4718 - DNA, 1000 bp, mus musculus
caaaagccaaattcaactacatgaattaaaataataaaacaagcatatttttattactaattattcgtttacatttcaaatgatatcttacttcccagttaccactaacaccatccccccactccatgatatcaaacttcctggttacccctctgccattcccccccccatcccacatctgcccttctccttcccttttgcctgtatgatagtgctctcccacttatcatcaccctcccgccccatctctcgagcatagcattcccttactctgggacatcaaacctccccaggaccaaggaactcccctccaattgctgtcaggcaaggccatcctgtgctacatatgtatctggatccagagatccctttagggtacactcctttgttagtagtctagtcttagtgagaactgggtggtcaggctattctatgctgttcttccaatggagttgcaatacccctctcctcctccaatccttcttccagttcccccagcaggtttcctgagctcagcctgatggttggctccaagcatccacacctgcattggtcaattgcttgccagacctccccaggaactgccacacttggttcctatcagcaagcgcctcttattcactgcaacagtgttgggtttggtgtctgcagacatgatgtatgtctaggtggggccgttccctggttggctcttctttcagtttctgttccatttttgtccctcttctttctttggacaggaacatttctagcttaaaaaaacctttgagaatggtgggtagttccatccctcaaccaggggtcatgccaatctactggagggtgtctccagaggttctatctctcccttctctgagcattatggctaatgtcaataccattgggtcaagggagaattacgttgctctggtatccacagcacatctgaaatttctagaactagaagaagcaaatacacccaagaggaggagacagcaggaaataattaatctcgggctga

SEQ ID NO: 4719 - DNA, 1000 bp, mus musculus
ttctctgtatagctctggctgtcctggaactcactttgtagaccaggttggcctcgaactcagaaatccacctgcctcttcctcccaagtgctgggattaaaggcgatcgccactatgcccggctgacagtgtgattcttaacataagggcacaaatacaaaggcacccaagtcaatagaggaagcacagctcaaatcacagattgaccctcacacactgataaagtatgacttcattccaattcttaccaatagttaggccatcagacaaaaattaaacagaaatgcaggagctaactgatgtcataaaaacaaatgtacctaaccaatatttacagaacttttgactcaaacataaaatggttcactttcttctaaacagcatttagaagtttctccacaattgaccacatactcagacacaaagcaagtctcaacagatacaaggaaactgaaataacatcccacatcccatctaatcaccatggataaagctaaatagcatcaaaaacagggacaacaaagagcttatggaaactggaaaaaacctctctactgaatgaaaaataagtcaagaaaaattatttaacgagaggcaacccaccctaacactgtcaatgatattctgctatacttgcccattggagcctagcataactgtcattggagaggcttcacccagccactgatgaaagctgtcattgacccacagccaaacattaggtggagcttgagaaattctatagaagaatgggaggaattattgaaacatcaagagaggtcaagaaaaaacacaagaaaacctactcaattttaactaaccttagtccatagggactcgctgagactaaactaccaaccagagagtattcatgggatagacctaagccctttgcacatgtgtaaggtttgtgcagctgggacttcatgtgggactcctaaagtgggagcagaggctgtctctgattacattgcctacctttggatccctttcccttaa

SEQ ID NO: 4720 - DNA, 1000 bp, mus musculus
tacattgctacaactactcagacatgtatcttctttcaaccgtgtggacgtttgaaagtaatgaaaaataactgaaaaattttaagagttcagttaaaacacgaatgggagacagacgcaaacaaaatataaatggcagagcaatatgatgcaaaagtaaatctcagacaattttcaagattttcagagattggggagacgatggtagtgatagggagatgaaaaccaaaacagcagcagcaacgcacaacaaactggggtcataaacagcgaccagactacaaggaatgggggtcatgggcaaagttaaccaacatggtgatttttaaaacagagtacagatacagcgttcccaagacactaggtagatatttgtttatattaaatttttaaaataatttaacaagaggaacagcaagatggtggaagagttcctctaatgttttccccattttgagcaactacgttcaaaataacttgctttcttgggaaagtggatcaaagcaattcaaggtagcagttaaagacagaacagcaaagaaacactgctttctggctcaattcatctagttggcccatacatatagagagagtgtgtctacatgcatagggatggcaccttgcatgcgctgaacccttccatgccaatcaatcaataaaatgccccatagtggtattgatttgctagctcagcaattaagagcactttctgctcttgcagaggacctcagtttatttgccagcagacaaatggcagcacacagccatctgtaactcatttcagccaatccggattcatcatctggtcatttcaggtcccagacacgcatttggtacacttccatacatgcatgcaagaaagaaagaataaaagaaaacactaagacacataaaatttaaaatatgttttaaaaagaagaaagggccccatagacattctctcacaggacaacctaatgaatgtaattgaggcttcctattgctgggagactctatactg

SEQ ID NO: 4721 - DNA, 1400 bp, mus musculus
atggggggcttttccctggagcaaaaaccaatccttccatcaatgcttattgtaattgggtataggcttgcagcaaagaatcttcatttttgtcagctaacaatatatcacccatataacaaactatataaacttgtagatatctttgaaaatcttgaggcttttgttgccaaagccaaaagtttttatatagttttccccttcaaggaagtagccatagccaattcttgagtacaggatagtcctatatctgtgcataaatggatatattcagaaatacctacattctttctatgtggtcaaattgctgcttgacagccagagtttgcattttcatatgctagatggtttactagtaaaaagccagcatcagaattatgaaaaattctgccagcagctatcagaagttcagagcctagaggctcatatggcccttgtctcatttttggtatgtcttgatgaagcatttcttttgtagatactgcacttcaagcattatgtgcagcagtgttaatctatgcctagatttccaagcttatataccaggtgctgggatatctttgcttattgtcctttggtcagcatttcataatttaccccagcattattagcatgggcattcacttcagcaattctctgacaatgctcaaaaaatttcttttttccaaagcaggctcccctgctggctgtttccaatcatcaggaggtaaggcatctgcagctaaatcctcaagtatagccataatgaaaggcccatattgggcacatgcagctttaattccttcaattatttaataagtataggttgattgattttaacatgattgccctgtgcatacttctcaaatacaggacattgtaaattaaatccttatatatcctctaattgatttacattactctgcaattcttcctgcgatggggacataattttcttattgaggaaaatagcaaccccccccattaatcttagggcacatcaatgccactgaaggatcctgtctcttcataggtggatctagacctgctctaatattaggattgatactatcctcttcctcctcctccttttcttcagtctataacttccctaaatatattttttttctgttaaatgggtaagactttgtatggatttttgaagttgctctttctgttcatccttatctttatgtctgcaagttactgcaaaaacctattttgcagcttctttctctaagtcttcttcctgaggatcaagaggctcctctttcagtcttgttatatagcccttttagcatcctcacaaagaggagggggagtaggcttggtagtgctatctttgtttaattttggcctatcagtaatcactgctagagaatctaacattgcttggatattttcttctcatgcctagggtc

SEQ ID NO: 4722 - DNA, 1600 bp, mus musculus
gctaaagggatctgaaaccctataggtggaacaacattatgaactaaccagtaccccggagctcttgactctagctgcatatatatcagaagatggcctagtcggccatcactggaaagagaggcccattggacttgcaaactttatatgccccagtacaggggaacaccagggccaaaaagggggagtgggtgggcaggggagtgggggtgggtggatatggggtacttttggtatagcattggaaatataaaagagctaaatacctaataaaaaatggaaaaaaaaaaggaaaaaggatgatttaggctttgaattagaatacagaaaacaagacagacttagcagtgaagatctgtaagcaactttacatagggagggactttccaggatggataaggacattgccttgtgaatggggataattatccttcccatcttcttagcctgccttctgtaagccagcatttcctgagtggtagtctcttgatcatgtaattgacaggcctggatttctatatttcaacccagggacagaagtaaaactcatatctcatccttttgtcagaaggtagtaacttcctcctaaagagcctggataaagccttgatacctccatctgtaaaagttttggctctgagaggaaaggcttccccaatggaagttttgctgctgtgagagaggtttcctcagtgtgttatacctctgaaggcacaggtatcctggcattgggagctaaggaaaagaacaaagccacactgcacaacagagcacacacagatgagagagacacaggtggtttgcctctacttaggcaagaagcagcaggagccctaagcaggcaggctttcatagagttctttgagggaggagttttctagggtggagatttgcacggtgaggattggcaaaatttcaagccaagcccagggattggtggggttttgttcttacagactggtgtgttttggggtgccaagattggtgggttttggttggttttcaagtctggaagtaggcttggacattttaccctataccacctttacataaggtaagtgagatgttgagcttaccccagctatgaaagcccatcctcaaaggccatcaagcctgtttagctgtcaactctcacagttggtaagatggtcaagcttctgcatataatttgtcatctctgctcctacaagcagccctattaaaaactgttgttcttgccaaaagcaatctacagattcaatgctatccccatcaaaattccaacacaattcttcaacgaattagaaggagcaatttgcaaattcatctggaataacaaaaaacctaggatagcaaaaactcttctcaaggataaaagaacctctggtggaatcaccatgcctgacctaaagctttactatagagcaattgtgataaaaactgcatggtactggtatagagacagacaagtagaccaatggaatagaattgaagacccagaaatgaacccacacacctatggtcacttgatcttcgacaagggagctaaaaccatccagtggaagaaagacagcattttcaacaattggtgctggcacaactggttgttatcgtttagaag

SEQ ID NO: 4723 - DNA, 1000 bp, mus musculus
catggccaaatttaagtctaaattaagaatataaaaaagtggactggtaagatgggtcagtgggtaagagcactgacagctcttacgaaggtcctgagttcaaatcccagcaaccatatgatggctcacaaccaccggtaatgagatctgataccctcttctggtgcttctgaaatcagctaaaatgtacttaagtataataacaaatctttgggccagagcaagcccggcctaccagagcccactagagagagcagaggttctaaaaagaaaaaaaaaaggaagaagaagatgaaaagtatcaaccttaataaaattcacagaaaatattcatttgtttatgtagaaataaattatgaatagtgtcttagttaaggaacagacaccatgaccaaggcaagtcttataaaggccaacattgaattggagctggcttaaacggttcagaggttcagtccattatcatcaaggcaggagcatggcagcatccaggcaggcatggtggaggaggagctgagaattctacatcttcatctgaagactgctagcagaatactggcttccaggcagctaggatgaggctcttaaacccatgcccacaggaacacacctactccaacagggccacacctcctaattgtgccactccgtgagcagagcatataccaaccatcacaaatagtccttttcaaggttcctgtaaatagtgaaatcaaagggtgtgacttttgcaatattacatgtagataggtcatttacaattttagtgtatccctcaaaaattgaaggaaatactattgcttataaactctttttttaaaagtttgttagtattttaatgaggattttttaattaggtattttcttcatttacatttcaaatgctatcccaaaagtcccccataccctccgcccgccgactcccctacccacccactcccacttgttggccctggcgttcccctgtactgaggcatataaagtttgcaagaccaagggg

SEQ ID NO: 4724 - DNA, 1000 bp, mus musculus
acccacacacacatacacacacacacacacacacacacacacacacacacacacagcaggacagaggaaggtggatgctgtccttgctgagcagtgtctagccataggtggtccccaaagtcatgtgcatcttggccctctattcttttaagctgacagattctctaaagcagggctgtttggcttattggtcttcctgcctccagggctgtcctctgggtggcctacatttattactggctagagtcctggacagagtcccagaaaggactcaggcaacctcttcctcttgcaggtgggtgcagctgttgattgccacagccagaactttcttctgtgttgaacagaaagttccacgatgtacccagaaggggactgtgggacagttcagttcctgtgacagtaggtatatgtacgtatgtgtgaatgaatatatattcttcttcaacttgttcttctaaggctgacaaaaatcagaacaagacagaaagtgacccacataaagtatttatatggactggagtggagcacaatgacctactttctctagacaggctaggctaagtaacatttccaaaacttccccaaattgtactaccagatcaaaaataagaagaaaaaacatgagtctataatgatacttcattctgttttcaatagattttttatgatttttatttatatgcatccatgtgcacctatgtaaatttgtccaggaacacatgaaacacaaaggatatcaagtcccctggagctagagttagaggcaactgcttgctctgtgtgggtgctgtgcgacacacacacacaaagttaattaacagtagtgtttacagagactttgaaaatgtactctcatatttcttttcagaaattcaggttgaaaacctaaggaaaaaatttctaattgtcttttgtcattgttagttttccttgtcaattcatcacaatctcaaatcacctagaaaattttcacaatctagaattattgaggcaattg

SEQ ID NO: 4725 - DNA, 1000 bp, mus musculus
tgtatttgtcaggctctggaagagccttgcatgacttgtgtgtgtgtgtgtgtgtgtgtgtgtgtgtgtgtgtgtgtgtgcatgtgtgttttcgagacagggtttctctgtaaagccctgtctgtcctggaagtcactttgtagaccaggctggcctcgaactcagaaatctgcccgcctctgcctcccaagtgctgggattaaaggcatgtgccaccacacccatttgttttgtttgattttttttccccttccttaaatttttatagaactcaccaaggaagatatttgtgtctgaaattctctttgtgtgatttatttttatgtacaaaaagtaagtagagtaaaaagactatgtcagtcaggagcatgttgccctctgagagtctccacccagcagctgactcagtcagatgctgacacccagagccaaacagtgaatggagcctgaggacatttatggaagaataggagaaaagatttccggctcaaggggataggaactccacaggaagaccaactagtcaactagccggacccttagggctctcagaatctaaagcaccaggtgaaaaacatacacaggctggaactagcaacacctcgccccgacccccttcacttatgtagcagatatgcagctcggtcttcgtgtgggtccggaacaattggagcagagctggactatctcaaaagctattgcttctcccagtgtgatacattcctccagctgggctgtctggtctcagtgggagaagaagcaactaactttgcagagccttgaagtgccagggttgggggataaccagagggtctccatttgctcagaggagaaggggaaggagggatagaggaaggattgtgggaggggtgactgggaggggccagggggcaggatgtaaagtgagtaaggaaaataaataaatactattatttaaaatgtcttgttccttgcttcatagtctgtaatttataagaaatatactatatcccctaagtt

SEQ ID NO: 4726 - DNA, 1000 bp, mus musculus
ttttcagggaccctctgagtcagccactcagagctgggaatcgatgcaaaagcaagaggaatttattgctccagcatgctggggttgtcccagacccgaaggagaggcagagaccctgggtgagtttttatacagttttcaggggtagaatagagcaacagtaattaggcaaaatgtgattggcagaacagtggaacttttaaactgattggtccttagggaatgaagcagccaggggtttccttttctgtgggtagccaatggtcagtctgccctgaggatgtgagttttcctcatctgcaggtggctgagggtctgtccccactgtggtctgaggaatgtagtcagcctctcctctctggagggtaggggtgcctatgtgctctatgacctttcttttccaggaaggtagcggtcttgtggaattttccaaagttcctgagctgacctattcacatactaaagaatatggtcagtcctaaggcatcaacaaagtagtcaaggaacacccaggacatacacagagttgttaatggacagacaaagcataactgtacatagaattttgactgactggtggaataaaatattcttgttgttcttaccagttatgttttgtgaccttttagttagccagcagaagggagaagataaaatataaattcttaccctaatataaggtaagaaataatatattctaacctaaaagatagtaattgaaaaagcaaatctattatattcttctttaaaaaaaaaaccttgtaaagtaataaaattgatccagaaattgctgaaatatggcaatttgtaatacacctttgttagcaagtccttcagactttagctacttctggcattagacactttttatagcttttgattttattttatgtaataagattgaaaatttggatatctctgttttgagaaacttaaatacacatgcttattgttagtagaatatctatgaaaatcattttattctttattttccagtgaa

SEQ ID NO: 4727 - DNA, 1600 bp, mus musculus
gtgtgatgccgtcagaaagcatccaggtcaactctgattatgtaagataaattaatatccctgtattttctaataaatgtagaatgttggaataaaggaatccattcatataatgaaataattatatgctggacactatgctatgtctgcagatgtaaaatttagtcagaattttaagaataatgctgccttttgggatagattgaaaaacatttcctgtccttgtattcagcattttacatttaagaaaattgtggttcatattcaggtaagagctatgtgatatgttttctatctgaacaaattagcattgaccttgcatagatctacacatatctttaaaatatatcgggtatttttttttttttggatatcaaagtctattttcaggatatttaaaattaattgttacaatatgctttcttaaataaaaaggcctttcaataggctctagaaaacatactaatggaataaaatttcttacaaaattaatcatttttttctaattgtaagataaaatatggtatcataatcaaatagggaaattcattacaatttcacttgtgttaattcattcaagtaacatcctaatttgagatcatagttctaacagaaagtggtgagacacacacagacagtgcttggctttcctgactgacttggatatttcagtaatcaacagtcatgacattgtcaaagaggccagaggaggacattggacaccatgcagctggagttctaggcagttgtgagtcacccagtgtgagtgctggaaacagaatccaggttgtgtgttcataactgcggagctgagccatctttccagcctcctagaacaggaatatttctatcaaagacaaatacataagaaatgactcatggagtcaggaagactgtctccgtactatgcatcatctgttcagttttgtcaatggagaggacaaaaccatgataccaaggagaataatacagtgttcaaagggatccacagctctgtccagtccttcttttattctcagtgaagaagtaaccctaagagcagtgtccggtgcccctaaagctactttgaatacttcacatccggtcgaaatgagtttcccaacacagctatacgatagatgaacactttaggcatatggaaactttttagaaagaaatactaattctatgcttgcactgtagcataaataactagagtggagatgagcacataaagtctggtaaacaacaaggctgggatataaaggtgctgcttcccctaatggattatgtggctctgaatcttcaaacacctctaatgttagctctggggctatggctttctgtacaacagttaaaatagtcagaatatctctttagaatttttttttagaaggaagtagtttggggatggtgaaaagagattaagcaaagaattgtaaagaagtgggcttttctgttgtttcttgttgttgttgctgctgttgttctttctttagtgaaggtcagaatagcagagtaaactgatgtgtcaacatagaaatgaaataagttcatgaagagggttaactatgacagctatctgggagttttaactatttacttaattttttatttgtat

SEQ ID NO: 4728 - DNA, 1200 bp, mus musculus
aaaaagtggctattagtcaaaaaaataaaaaaagtacagaatacacaaaatacagtccaaggaattcaaaaaggtcaacaagctgaaggatccaagtgaggatgcctcagtaccatttggaaggaagaagaaagcagccacaaaggggggggggtgtctaggaggaaaagagggtggggtggggagaggggaacatgatctggcattgggtatgggaaaaggactgaagccaaaagggccacagaaagaatggaaacaggcaatcttgagaggtaggaagtttgggggaccctccagaatgtaccagagacctgggaggtgagagactctcaggacacaatgggaagtaccttagatgaaatgccctacagtggggagagaaaacttatagagcctacctccagcagaaaaacagcatcaagtgaaggatgggggtcccctcccagagtcacaactctgacccataattgtcactgtctaaaagaactgcagggtcaaaggtggagaagagcctgaggaaaaggaggtccagtgacaggccaaaattgtgatccagctcagggggaggcttcaaggtctgacactgttactgaaactatgatgtactttcagacaggagcctagcatggctgccctccaagaggcccaacaagcagctcaaagagtcagatgcagatacttatacccaaccaacggagagcagctgctgaccgctgtggttgaattagggaaaagctggaagagacttcggcagagggtgaccctgtaggagaaccagcaatctcaattaacctggacccccaagatctctcagacactggaccaccaaccaggcagcacacaccagctaatacgaggtccccaacacatatacagcagaggacttccaggtctgggttcagtcagagaagatgcacctaaccctcaagagaccagagaccccagggagtttagaagtctggtggggtggaggatgggagagtggaaacatcctcatgcagacagggggttgggaggaggtatgggatggggaacagtcaaagagtgtgtgctgggggtgggggggagtgatgaataaaatcttgaatgttaaaaaaaaaagaatacctacttggatgatgaaatgcagttgaatatctgagtgtaaagagccaattttacatgattcagtaacaggaagcaagaagaagatgcacagcc

SEQ ID NO: 4729 - DNA, 1000 bp, mus musculus
tggtatgtactcactgataaatggatattagccaaaaagtacagaatgcccattatataccctccagggacccaaagaagtaaaacaagaaggaagacccaagtaaggatgcttaaatcccacttagaagggggaacaaaatagtcatgagaagcagttacagagagagatcaagatgatagtggggaaagtgagggttggaggtggggcaggatcaagcatggggagagacaggacagaggctcggagggtcagaagaatgaatggaaatattcacctgtagggggtttggagtagggggaatctctaagaagtcccagagacataggatggtaagagactcccaagactcaatgtgggtgatattaaccaaaaatcacaacagtggggtgatggaacctgaagacacagaacccccagtggatggatggggacactaactcaactaaaatatattagaccacaatatattgctcccatctaagagaaatgcagggacaaaaaaatggagcaaagactgaaggaatgacctaccaatgaccagcccaacactgggatccttcccacaaatggggcaccaaaccctgatactattactgatgctatgttgggcttgcagactggagcctagcatggctatcttctgagaggctctacctaccagctgactgagactgatgcaggtacccacagtgaaacatgggatggaggtcagggactcctatagaagagttaggtcaaggatggaaggaactgaaggggattacaaccccataggaagaccaacagtatcaactaacctgtatctctgggagctcccacagactgagccaccaaccaaagagcacgtatgggctggtcctagacctcctgcacatgtggtggagagggctgccatgtctgatatcagtgggaaaggatatgcctaatcctgtagagacttggtggagggataaggtaggagccctcttaaactttaaggggaggaggagggagcaaa

SEQ ID NO: 4730 - DNA, 1200 bp, mus musculus
aactttcacaaggcatttagatcaaagggagacgaaaactatatgccaatgctaaagttaaatgcatataaaatggtggtttggaaaggaatctatccactttgattgaacaagaaaatcagctagtagaatttgttatcatgaaactttgcatcacccacattttctgaaagccttcaaccagtgtttgtacatttggaaggaaaatttactgtagacttctgtcctatagacaacaatccccaacttgtacttcctagaacttgaatttttaaaaatattttagttctgtgcttgttatgaagaaatcaaaattatgagttgagagaaattttacagctcacacaaacttatatgaagactggaaatctaggaacatgttatagagtcaaaaggtttttctcaccatagcatcagtaacagtgtcaggccttggggcctcccgctgagctggattccaacttgagcctgtcactgggcctccttttcctaagtaatttttttcctgttgtatttttttttgtcctgtctggcctttgttgcttgcaagcctgctcttttctaaagaggaaatgggtcgggggaggcagtggatgtgaggttaaaaggaggtgggtgcagctggaagcagtggagggaggggaaactcaggtttggatatattgtatgagagaagaatctatttttcaataaaataacaaataaaacaagaaaagatgaaaatatacatcaaattaaatatatgacatggaaggtaaagtacaaaagtatattgcatttcattgctaagtataacaattcagttgtgaccttcaattattactctgtatcttggttgaagtgaaacatatggaaaagaggagttctgaaacccagagggaaagctctgaactcatacttctcttactaattctcaagaggaaaaatccatactgtgatgcaggtactgcttcaaagactcgtgtacttgctgactccatggctttcacttgagctttgagattggacttgcaggctttgagctctgcttgcctttggatatatcaggagcttagcagttatctatcctgcactacggaatagatcctaactctcccatggagtgtttcccctaaggtaataaaggccacatgaaagggaggaaggaacaatacccttctgattcagaaaagacttaagacagatgtgaggcatatctca

SEQ ID NO: 4731 - DNA, 1400 bp, mus musculus
attctgctttgactaaaggctttgactaaagccaataaatatttatcagatttctgagacatttctaagtttaaaatagctgagttacatgaattcagtttgggatcaacatttgagtcacaagtatgttttgagaattttggaaagagaagcaaaaaatattacagaagttgtaggtgttgttagaagtattatttttttatttgtaaaaatgactttaaaaaaccttccaatttaggatatttttatttaaattttagtgactaacaaaggaccaatttataccatctgcttcatttacactcaaatgtagatttttctctctcattttctccttaaatagacattctatttggcacattttacttaactacatgtctttgagtgaaaagtgtagtttgtctgactttctatcagaccaatatttattcacaaatatctgtttttgttgctttctcgcatgaagtcatataccacgtccccctgtggagagctggctcaggggcagtatgcggtgccagctggaacgctgacagttgggtgtgccaaaagtggcatgatggacaattggtcgcttgcctttagatttaatttcatgatgatgggtgttactggtacaataactctgagtacttcctcttccagtctacatgcacatatgctgagtgtttagttaccagtgaccaaccaatactttgtagccattaccttgttgacttatataccagaatcagagacaaattgacaaccaacctctatccatttgtaagctgagactcccatgtttgagaagagcttgccataaggtactgggcacacagtacatttggagaagaaaatgtcaggctgaggtcttttatttctaaatatgctgtatgggaaactgttgctgcacaatcccagtgtgtttgtctctgtctgtgctttagaattctgtgcattagagcatcaccactgcctctcctgactctgctacaggataccttggcaatttacaaaattatcacaaagttcttttttctatgtttggtcaaattcctgatgaaaaacttaaagcttcaagagtgggtagtaacactgacaattagtgatttccattaatgttattatcttcacaaccaatcttcagcttatatgacaattggaaaacaaactaattttggctttgattgtttgaataattcacaatctgaaaaaaatcacaaatcacagcacaagagaagattagaattgtatctgttcataagattacttctgtttactgacaagtaaatcaaaacaaaacaaacaaataaaaatcacctctaatcaacagcaaaatataaatgaaataacttatgtgcacagactaaggatttgatacaaaattatttactgaataacaaaggaatctttaaaaa

SEQ ID NO: 4732 - DNA, 1400 bp, mus musculus
atatttggtcattaggtagtggtactacttgagagagatgcattaaatggtatgtccctgctgaagaaagtatatcaccacatttgctctctgtgatttcaatcttctcatcaaaaaaaagaaagaaagaaagaaagagagagagagagagagagagagagagctcagcttccatggtgagttggatggaagctgatgtgtgtcatggtgtgtcacgcagtataaccttttgcccaaacagctttacttggaaatgttcagtgcaatgagtcattgatgtggtttgaggtctttggctcctgctacactatcaaactatcaataatggctctttgccaacacttctctcagacaacctgccttcttcacacactccagcagtttacagatgaagtagatgttagaatgggccaaatcggtgtcccgacagaggtggtggtcaggaggccgcatctcttctatgcccatgcttcctcatttcagacaagtggctgggccagttctctgtagctccctggggtctggctccctcatgcccctgccatcaatgttagatcaactcttctggctagagaaggtgcaacagagtactctctggagagagtgttgcagtctgtgaggggtaggaccagctctgctcaacatgctcccaggaggcaggccacgccagggacatctgaatgagctttgatggtaacatgagtgagaaacattgccacagtcccttgctgctacaggaccactaacccagacatggccctcagtacgtcttcaccgtggcctccggtggcaaggcaggtattcacatctgtctattcttctccatccttgcatctccagttctgcctcttttcagaatgttcaaacccttttttgtctctttctcctccatctctcctcaaccacatacttgcatattgtggtgggtagctccttctgcatgtggctgggtgacaggcaggcctctattctcatccacctacccttatcacatggcaggtggttgtcagatctctgggtgtcttttgatttttatttttaaataaataggatacactaaattgagtctatatggagaaggggttagatgtgagagaagttgtggttgctagtaagcactgtgtgaaaagttcagctggaagaacatgtagaggggtcatactatggatgtttggacaaagtgcaaatatgaagagtattgtgctctaagaaacactataggcagaacagcaagaagacaatgtctaaaacactgttgtgtataaactgtttttaatttcccctccaagcactccctatagtgagtattgttaaaggatggaaatttctaatgtagccataggaggtaaagcatcaaaaccagaatttttctgagattaatatatatattaaggcaatat

SEQ ID NO: 4733 - DNA, 1000 bp, mus musculus
attgttgtttggtctccatattctttctctgtccctgtttcttattgggatttaaagttatggtttagtgattcgaactggaggatacttggtatggtggcttgaatgagaatggcccccaaaggcacttctatttgcacacttagtccccagatagtagaactgtttgggaagaattaggaggtatggctattttgaagctggtatgtccttatactagggggtgtgtctcgagtgagctttgcaatttctaaaacctattccaggtcctgattatttctctctatctctttctgctacctgctgatccatgtggaaatttctcagctataattccagtgccatgcagttctgcttcttggttatggtgatgattaagagcaataaacagtaactaaacacaagcgatattagattagataatttttatatttcttagtaaattctattaattgcttgttttgtgctacaaataacaaattaaaactacagtaaacaacccaaaccccagcctacttggtcccctgcaagtccaatagccttatagtctgccctgtcctatctgcactccagcttctgatccaatcctctaaccacaatcccagacatcttcagacatcagcaaatacaagaagagaccccctacccaaattctctgcctacctgtcactctggaaaaacacagcagcagcaagctccacccagcctcctctgcacttaattttcctgggatcaactatgaatatatctatggaatcttgctgctgtccaggaaaaatggaagactaccaacaacagggaccatgagtactacctacatccctgaggcctgctaccaccttggaaaaccaaaattctgaaaccaccaaggcctaccagctcagcctggtaatagtagcatccctgacaaactactgccaccagggacaaaaaagctctacctacattcccagaggactgctgacataagggactagcagctctgtatacaacagcagag

SEQ ID NO: 4734 - DNA, 1400 bp, mus musculus
aagcatggtaactttgccaaagaaaatataagaaatatttccacaccagtagaatcaaaagaagagaaacacacacacacacacacacacacacacacacacacacacacacacacacacacacagtaccatcaccaatatcaaaatatcaggaactaacaataattggtccttaatatctctcaatgtcaatggattcaattcacccacaaaaagggacaggctaacagaggagagctttagcaggatccaacattctattacatataagaaatatacttcagcagcaaagatacaaattatctcatagtaaaaatcagggaaaagcttttctaagcaaatggacccaagaagcaagctggaatagcaattctaaaatctaaaaaaatcttgttgccatatgcaatagtgtctgggtttggtggttgtttatgggatggatccctgggtggggcagtctctggatggtcattccttttgtctcagctctgatctttgtctctgtaactccttccatgggtattttgttccccattctaagaaggaacaaagtatccacactttggtcttccttcttcttgagtttcatgtgttttgggaccctgatatagctatctcttgtgaggctatgccaatgcctagcaaataaagaagtggatgctcacagtcatctattggatggaacacaggactcctgatgaaggagctagagaaagtacccaaggagctgaaggggtctgcaaacctatagcaggaacaacaatatgaacttgccagtacccctagagcttgtgtctctagctgcatatgtagcagaggatggcctagttggccatcaatgggaagagaggcccttggtcatgagattatgtgtcccagtacagaggaatgccagggccaggaagcaggaatgggtgggttagggagcagggcaaggtgagggtataggggcctttggggatagcatttgaaatgtaaatgaagaaaatatctaattaaaaataaaataaaaaataaaatctaataaaatagaatttcaaccaaaattaataaaaagagatggggaaggagacttcatattcagcagaggaaaatctactgatatgacctctcaattctgaacatatatggcccaaataaaagggtaaccacattggtcatggaaacattactaaaacttctaaaacttaatcacacattgaaacacacacctttagagcagaagacttcaacatcccactctcaacagttgacaggtcatcaagacagaaactaacaagagaaatgacaaaattaacagtgggaatgaatgaatctgccctaacagatatcaacagaatatttcacccaaacacaaaagattgtaacttctcctcaggatctcttggaaccttttccaa

SEQ ID NO: 4735 - DNA, 1600 bp, mus musculus
actttgtttactcttgtggatgttatcctttcttaggatgtacaacacattgataattaataaaaaaataaacttctaaagttggtagatgaatttatttggagtaaagtgtgccccactgaaaaactatgaaacaagtgtttgtatttgagatttctgaagtgtagtagcatttctctgttaagatgtaacttttgtttttttttttttgaaaagaaataacttataagttagtcggtagtcaaaaaacaaaagcaaggctgttgaacacctaagccaacagtaacaatgttggataatggaatcctgtgtttatacttatttactactaagggtgatggagattctgagaacattctagaaatcttaaattgattattaaaagacattcatcctcttagttagcaaagaaatgtttaagataaatgttcaacaatgtcctatgtagcatttttttaaagaaccaattgaagtgattttattgttcatatagatagtttaggccattggagaagaggctgtggatgactcatatttccaattggttgggatgtcctgctcactcttacagtaacaagccgactggtgtattctgctctctattagaagcaggccgagttaatctccttatcacttatattcctctcaagatgcgtaatgacactgagcactttcataatcaaatgctggagatcttcagagagatcagggcaaggcctctttgtacttaaggattctcaaggttttattactgatcgcaaggccactgctaccctatgtgagcccctccgatctactaggtagcacctcaggcctttcttggtcagtttgtgcatcagttccttcacagtatcagaagtcaaccttagccacgtgggggcgctacaacgatagggcagcaccaaacggaaaaaaaaaatccttctcaggagcttgcatgcaactaatgatggtggaggtctggcagcaaagagagaaacttccgagaaaaaacccactgtctaaacggacgacaacactgtaggccctaaacaactaaaatgtttgtggtgatttaaaaaaaaaaaaaaaatgtaaccactgcaatatgacagacttcaacaatcatgtcaataagctcttttgcaacccttacttaatgtgaattggtaccactcaggaagcaattttgacttcgaagtgtgtattgagaagtcttcatatgtacaataaaaatatgcacaacgactcttgagctttatcatttgtttcaaatgtcaaatgatttgaatgcacatcaagtgcattgtaaacacagtaaagaatggatcactctctcaaaaggaaggaggaactcataggaactactggatgacaaaaaatgacagcgaacacattcacatttccatttatgtaaaactgaaaaaaaaacaacaacaacaacaacaaaaacctaacatattaaaagtcatattattttacattatgaggaaaagtagtgtataagatgacatttctgatgtgattatccatggttacacattttttaaatgtgaaaagccttaaaataatgtaacttttatcttgagagtcattaagtattgactgattggctgtttca

SEQ ID NO: 4736 - DNA, 1000 bp, mus musculus
gaaaatattgaatttcaacttaacaaatagatcccattcatcaaacttggtgaaccatgaaaccataaagttcctacattatgagcattcaaaggcacatgtgtgtctcttcccttcactggtacagtgagtcaattatgctccttccttctgtgattccaaggacacctgtatccattgcacactccgatgtccttgttgtgtattgcagaacaatttcacattggctttgcatagacagtgtcagggatcatgaacctatgatagataggttgtaaggtgcttaaattaaattgctcatatcatttaattggtcctttgattcctttctcaccaaaactatcaaaaaacagcctgacttttgttagaagattaactacaggaaccttcaaaggattaagtgtatcacctagctgtgcctctaactgggctagattttgcaaaatctggctcgttgtttggccatccataaattcttgtcctattattcttgttgtactccttaaattctctcataaaacttcctgtgccacatgagataatattggtacactttgtgtggcaaatggcacctgaagtcttgtgtttgaaaattttgccatgctaaatattcttcaaattgttcagtgcaattataaatttcatagaacattaattatatttgtatttgataaaagaaacctgttaactcttcaaattatcttagaagattaatttgttcaattgatttagaaatctctgacaaatcccactcttaatacagtagtagtattctgcagtctctacttcacatagcattaaaacaatataaagtttatattcccaaagattacttttaaatgactttaacaggactctgaaagaaaaagtgacagatggtcaaggtcatgggataggatggtttttgtttgtttgtttgattttttttataagaaaagatatcctatcaaataacaggactttcattctgattattatatacagttacaccaatgtagga

SEQ ID NO: 4737 - DNA, 1000 bp, mus musculus
agaagtaaacacagatcatatatacgttaagcctgtgttaatatgtataaaggaaagacatggtatactggctggttttgtattagcttgacacaatctggagaaaggagcttcaattgacgaaatgccttaatgagatccagctggaaggccttttctcaattagtgatcaagggggtaggttactttgtgggtggtgccatccctgggctggtagtcctgggttctataggataagaagctgagcaagccaggggaagcaagtcaataacaaacatccctccatggcctctgcatcagctcctgctttctgacctgcttgtgttccagtcctgatttcctttggtgatgagcaaaaacataggagtgtaagctaaataaaccctttcctccccaacttacttctaggttatgatgtttgtgcaggaatggaaaccctgattaagacacatgaactttatctcagaagagagggggtttctcaaatttgagtacaaaggaaaatagtaaaaataaatttgcatcctcaaaattatctaaatgttgctgagacttttatcttccttttgtactttatcatcttcctaagttttaaatattcaatatttaaatcactgaatctctctgtacatgttcatcaagatttctctatcattttcttatttccccaggaaaattctgatgtgacagtgtgattttttttcttagctattctacagagatatagtaaaagttgcttcccttccaatagtaagaaaaagatgaattactttttgaaaactatgatcaatataactccagaagttaagtgtcaaatagaaactggacaggaagaggatcaaagagattgtataaattgcaaagagtaagagatcagatatagttataataaaaccacctcagagtcacaatatatgtagctggtagtgtggatggagttagggtaatagcattccacctgaaattcctgatgctctctcatattcacagtataagaata

SEQ ID NO: 4738 - DNA, 1000 bp, mus musculus
aagtacaggtttctgtacaaggtgatctgataagattcaagggtctgggccaggcagtggtggcacatgcctttaattccagcagttgagaggcagaggcaggtggatttttgagtttgaggccagcctggtcgacaaagtgagttccaggacagccagggatacacagagaaaaactgtcttgaaaacaacaacaacaacaacaacaataacaatacaataaaaatgcaagggttttttttttttcaatcttcttgcctttgttgaatcttgcttagtttccaagaatacagtcaattttggagaaggttctgaatggtgctgaaaatgagttacttttgtgtgtatgttgtgtttctgtgatatttttataaagctatacaatgcatcaattttattcataacctctgttagtttcattatttctctgtttaatttgtgtttcaatgacctatccatttatgagtggggtattaaagtctaacatttttaatgtgtgacttatggcttagtaatgtttcttttacaaatgtgggtgcccttgaattaggactatgatctgaattggtatatatgttcaggctctggtgataaatcttcttgctggttattgtagtctgggctagcatctgtattgtcttagggtcagcaagatatttatctagactcttcaggattttacagtctctcatgagaactcaagtgtaattctgatagttctaccttaatatgttacttgcactttataattatttttattttgtcctgtacatttagtggtttaattattatgtagcagagaattattttatggtccattctatttgctgttcaggaagcttattttacatttatagatatctcttcctctaggttagggaaattttcttcaatgactttgttgattaattcttccagatctttgagttaagaatcttctccttcactgggcagtagtggtgcacgcctttaatcccagcacttgggaggtagaggcagg

SEQ ID NO: 4739 - DNA, 1400 bp, mus musculus
cacccctgctctatgagggtgttcacacacacacacacacacacacacacacacacacacacacacagagacacacacaaacacacacacacacagacacacacacaaacacacacacacacacacacacaaacacacacacacacacagacacacacacaaacacagacacacacacacacacacacagaaacacacacacacacacacacacacagaaacacacacacacacaaacacacatacacacacacacagacacacatacacacagacacacacacagacacacacacacacacacacatgcacacacacacacagacacacacacacacacacacacatgcacacccacacacagacacacacacacagacacacacacagacacacacacacacacacaaacacacacacacacaaacacacacacacacaaacacacaaacacacacacacacaaacacacacacacacacacacaccccaccctcgaattcccctacactggtgcattgagtcttcaaaggatcaaaagcctctcctcacattgatgccaaacaagggcctcctctgctacatgtgctcctagagccatgggtctctccatatgtaatccttggttgatggtttagtctctgagacttctgggtttctggttggttgatattgttgttcttcctatggggttacaaacctcttaagcttctttatttctttctctaactcctctattggggaccccatgcttagtccaatggtgactgcaagcattggcctctgtatttgtcaggttctggctaagcctctcaagagacagccatatcagggtcctgtcagcaagcacttcatggaatccacaacagtatttgggtttggtgactgtatatgtgatggatccccaggtggggcagtctccggatgccctttcttcagtctctgctccacattttgtctctgtaattttagaacagccatcattgggaagagaggcccctaggtcttgcaaactttttatgccctagtacaggggaatgccaaggccaagaagcaagagtggatgggtaggggagcagggcagggggagggtatagggaagttttggatagcatttgaaatgtaaataaagaaaatatcttataaaaaaaagaatttaaaaaagataatgtttgcttttgtttcaaattctctttaattgatatggatttctgtcttgataaggatcttgtagtttgaagtatcgttttgaggaaaggggataacatggatgatagaacacatgtgacaggaaatcaggaatggatctacttgggatcaagagtacaacagggagataagggtgacagaatgggcagagaagaagcaatgaaccagattatgtatgaaaatcacctcat

SEQ ID NO: 4740 - DNA, 1400 bp, mus musculus
caatattttttgctacagatattaaaatctctaccacaattagcatatgatacgtaatatctgttatatatttcacagataaaaatgtcaatttattagtctagaactattttgagaacaatatttaatatatctatataaatttattattccagtcttaaaactgtgtgtttcatcctgaggcagagaactatatgcatccattgactctcccaatgatgagcacatttgttggttgtctaatgcagcatggtcagccttataagcatacatatgcatagcaaaatcataatgaggagattatatattacatacaaagatgtatataattaaggaaaaatgagagctgttcaatggagtgactggctgggtgaaagagaaaagtgacgtaattctatttctattaaaacattttcaagataaaaaggcaactttttaaattttaatctgttatttatttatttattttacacttcagattttatgaccccacccattcaccctcaaatggtttcacatcccatacctccttcctactcccccatatcaaggaggatttcctggcaccctataacccaccccacctgacctctaaactccctggggccaccttgagggttaggtgcatcttctctgattgaacccaccagcagtcctctgctgtatgagtgttggggtcttcatatcagctggtgcatgctccctggttggtggtccagtgtctgagagatctcagggattcaagttaattgagactgctggtcctcctacagagtggcactcctcctcggcttcttccagcctttccctaagtctaccacaggggtcagcagtttctgtctattgtttgggtgaaaatatctgcatctgactctttctgctgcttgttaggtcttttggagggcagtcatgaaaggtccctttttgtgagcgttcaatagcctcaggaatagtgccaggccttggaacctccccttgagctggatcccacttagagtctgttgttggaagggtcaggaaacaatttttaacattataaattcactttgggaaatagatattagaagtagaaattattttcttaacattttacaacattcagtattatatttctctaaacacattaatgttttaccttattacatatttactgggcttaaagtcaaagactactcaagtaaagttaaaattctgccctatcttttagaagccatatgataatttgtagctttggctgcattaaacattgccactatgcttcgtgatatactgttttctaataatctgattgaatgtctgaattactaagccacgtctgaaatgtgagataccacctcctcaaactgaacatggcacgatgatacatggatataaaaagaaatcacttcttaaaataattg

SEQ ID NO: 4741 - DNA, 1200 bp, mus musculus
tgtgtgtgtgtgtgtgtgtgtttaatttattaattattccattcgattacatctcacatgatataccacttcctggttacccctccaccagcccctcaaaccatatctgccctcgcctcctcccctttgcctggatgagggtgctccttcacccacccaccctttccttccctactgttttaacaaccctgtacactagggcgtcaaatctctccaggaccaagggcctaccctcgcactgctttcaacaaggccatcctctgttacaatgtatctgaagctatagatccctctttataaactcctgggttgtggtctagtctccggaagcactgggtgatcctgccagcagatgctgttcttccaatagagttgcaatccccctctgcacttccagcttttccccaagctcccccaaggagttccgtgagctcagttggttccaactgtcagttgctggccggacctcccaaagaaccgtcacttgagattcctgtctgcaagtgcctcttgaccacaggaacagtgtctgtttggtttctgcagacaggatggatccccaggtagggcagtccttggatggcccttccttgagtctctgctccatttcttgtccctgttcttcctttgttcaggaacatttctgggttaaaaactttgagataggtgggtgacaccaacctttgacagagggcgattgcggggataggggtggggtgggggtgggcagaggcacatctctccactggaggtggtccctacaggttttatcctccccttctctgcacatttcaactaaagtcatcccctttgggtcttgggagcctcatgtttccctgatgtctgaaaccctcaagaggctatcctttgttcctccctccccaacccctgcatatttttgtttgatttcctgaccctctgtacctctctcccatccgttccagtaccttatgctgcctcccttatttcctccccctcctctctccatcgaggtcccactctacctccacctaccatgatcatcctgttctccccttaatgcaggactgaagcatccacaccctgatcttccttctaagcaccataggttgtgtgggttgtatcataggcattatgagcttttgggttgatatccacttatcagtaaatacatgcatgtctgttcttttgtgtctgggttccttactcaggataatattt

SEQ ID NO: 4742 - DNA, 1400 bp, mus musculus
ggtaactgtatgtagaagaatccaaatagatctatacatatcacccacacaaagctcaactccaaatagatgaaaaatctcatcatgaaaccagatacactgttttcaattgagaaaaaaagtagagaataatagtcttgaattgtttggcacaggaaaaggctttctgaacaaaattaaaatagctcaggcactaggaacaattaataaaaggaattcatgaaactgaaacttttctgtatggcagaggatatcattatttgtacaaagtatcaaactagagaatggaaaaagttttgttttgttttattttttattggatattttctttttctacatttcaaatgttatcccctttcctgtaatcccatccagaaacccccatatcccatccccccttcacctgcttctatgaggatgctcccccacccactcacccactctgacttccctaccctagcattcccctacactggggaattaagccttcacaggaccaagggccgctcttcccattgatgccccacaaagccatcctttgtgacatatgcagctggagtcatgggtccctccatttgcactctttggttgaagatatagtccctgggagctctggggagtctgactgattgacattgttgttcttcctatggatggcccttaaggacagcgccctatgtccagcagtgggtgatggatagccaacacgaaaagaactttacatcttggaggttctttgtctcaatggtttgccagggattttgttttttcttttataattccccttcatgtatctaccatggcttctgattttctactttaatgggatacctgtctgttcgtacataggtatctctgtctctgtacagagatgtataaagatatacatgtttttctggaaggctttctcttttgttaatctttttctgtttgttttgtcacagtccagttggtttttgttttatcctaattcttttggctattatgttcatgcctgtttgttttctaagtagtgaaagagacatagagaggtttggattgagatggggagggagggaaggagaacctgggaatatgtgtgggaggggaaactataatcagaatatatcctatgaaaaatatgttttcagtaaaagaatgaaaaatatcatgaatgctaatatttatattactcactatcatattaaagcaatgtaaattcaatgaacatttattatagctgctttttatttctatgcggaaaattacttcacacactagaaagaatctctagatatcattaaacatcttagaattttgatctttaaagagatgtggtttcagattttaacgtgtaattgcttaatccctaatgcagacaggtcactgagatggtgcagggcttattagcatatgtgttt

SEQ ID NO: 4743 - DNA, 1000 bp, mus musculus
tctcaaggctcagagatgactggagaagaggaagcatagagtgtataagagccagaggtgctagttgactgtaagcaaaagtgtctactgggcacactggggaagctgcacatagaaactcacagcagtgtgacaatgaccaccagacctatgcaagcacaagtcagaaaaaaaaatcccagcaaggagagaggtgtgagcatgaagtctcacccctagctgagatgctattggcaactgatagcttctgagagagaaaggtgtggtttggataaagaatagacttctggtaagtcatcctctctagtgggaatcgacacactcaatagtatgtgaacagtacaaatacaacttggtagaatagagaggggaaggaaaaaaaaagacagagagagtacagagtttggtaagtaggcaactttggaaagctagatctgaaaggacttagaaagggtgtgtatggtcaaaatatattgcatgcaaagttctccaagaactattataaagaatggcaagggaaagacagcatttaattctctttccttgcaacctgcatgactttctgatagaatccaaatctaggttttaagaagcttttgcacttcttcctggaccagtcaataaatttcctcttgtggtacatctcggaagacaaagaataactgtgagaattgcaaaaccagtatcgcactgagagcttgcaacttgggctgttagaaagttcaagacaagaggtggtcctttcatttgagactgtttgcatcccgttaatgatgtagccatttttcctccctcagagagaggacaaaaactcagaatctcagctttgccaaccaatcttgtgagtgagctaccatggaaattcagccattcgaatggttagttgacggcactccccgtcaatatctgaccacacatctaagaaagacagtatgagacctgagagctcagataactcagaagttagccatagcaaaaagaaagaacaaaatgtttcccc

SEQ ID NO: 4744 - DNA, 1400 bp, mus musculus
attttgtggaataatttgagaagtactgtcattaactcttgtttgaaagtctgataggattctgtgataaaattacttttgccctggccttttggttggaagagttttagagacagctcctgtttcactagggcttatggatttaaattgtttgtttggggccagtatgtgaactggagatgatcaccagtctggcatcactgacctggatggggagctggtctaagatgagagaagaagaaggtgggcccaagatgaccaccagtatagctctgagtaagctagggaggagagaatacacctgagattacctttgcctggtccatactgccacgctgtacaggtggggcaaaacatccctaagaccactcctaagatgagcccagacacccagaaaccctgggcaccattaagaagagcaagtaagtcatggagaaatggaagaaaaagagaagcagggtgtgtgcacaatgaagacaggcagacctccatacttgatggtagggaggagcactcttatgtgactaactggtgatgccacctaaggtcatggtgagatcctggcttgtgctgcctcatatggccatatctgagtctatagcactgtatcaacaagggtctgtcaccacaaaaggccatgcagaagtccctgatatgggctatagccccaggccatgttgatggatgaaggtgctacagagctggccctgaagacatgagagtagaagggctgtccccaccccttgcaagctacagcattcatgggagggaccctggacatcaatcaggaagcacagtagagttggccatggttagagttgggagtgagctatcctcgagggtgtgagtgtgccagagctggccctgtcacaaggctaacttgcagagtcatataagaggaagagatgcttttgccccttaccacttgtgacaaatgggaaagctgccctagtgtcatgagagagggagaaccgtccctgcccctccccagctagtactagagaaaaagaggttctagtatttatagggtagcagaagccagaggcctcaaaccaggccagtgattcattgcaatgaatatttataagtaaagaagtgtaaacaaaaggacttgtgaaatactagagcttcctcagagagagatttccccctttcttttggagggtaggttacaaggatgaagggtaggtatgtggggatggggaggtagtgggattggggtacataatatgaaattcacaaagaaccaataaagagtttttttttttttaaaaaaaaatacaaaaaccagaacagtgcttatctaatgtttatttaactttgataggtgatatgtattgagaaaattatctcatttacataacattttatagtttgttgaagtgttgtgcatctctgga

SEQ ID NO: 4745 - DNA, 1400 bp, mus musculus
acatgtttctcataggatcattttcaatccagtccagaaccaacatacacaagaagactatgatacccaagctttctcaaaaacatatcatcaacattgctaatatggaaaacactgatttctaaagacgagaggacaaaatgtgtccaaggttttcaatatgctaggtgagggtaaaagaattttttaaatgtgactgtcataatgaaaggactgtagaaggaataataaatttatcatatctaaattaaatataagaactgggacaaagaccccaatgagatatttactgaaaatatatgaaaatgacagtttggatggtatgagcttatgttcctagggaaagtagggtttcctctttgttatctcaggctcataaatgaaagactttaacagcagcctctgaaggaagtttgaggatacttttattaaagttaagagataaattacagggaaggcaagctataaatcttagcagttgtctgcagaagagagaagaagaagagacagagacgagatggaaagagagacagatacagagagaccaagataaagtcagagatgaaaagaaagtcttaccatgtagaaaaaggtgttagcatcagagaagaaaaagcccaaaatgccaaagaaagaatgacatcttcctagaagagacataagcagaaaagttataccatcctgagttagaacacaaaaaggtgaccatcctcacagggccttatgctacaaccacagtgagtacccagagggtagggttttgtgttgagggcaggggaatgcattgttccaaaaatggtgagatttgtggctctagctatatatgtagcagaggatggcctagtctgtcatcaatggggggagaggcccttggtcctgtgaaggttctatgccccagtataggggaacaccggggccaggaatgggagtgggtgggttggggagcagggggagggggaggggatatggtattttcagaaggaaaactaggaagggggataacatttgaaatgtaaatacataaaatatctaataaaaataaataaatagaaaacaaaagcaaaaaaatattccactgaaataggatgatttttctaataagactttatttcagctgaattatatttggttagctcattctttttctgttttcaaagataagacactgaggaaattttccattatctaaagtattttgcataaataaaaaccttacttagcttaatattattttaaagtagacacatttaaaatcgttgtcagataatgattgtcttggcagtagctaggccgttttcccatttttctggaatgtggggtcattgtaaagggttatatgatgtatctataatgtggtgttcttgcttttagaacaaaaaaaatgatgggttgaaatttta

SEQ ID NO: 4746 - DNA, 1000 bp, mus musculus
ggaattagaaatgaagaagtacttattttggctcatggtttcaggggtatccatccatcacagcaaggaatgtcaggtatgacagagcaactgccattgtggcggtcagcaagacaagggacctgttgcacctgcatgtttccttcctctctcattcatctgcgttccattctgtgagttggtcacactgtcttttagtgtgggcctttccacacttgctatgtatctccgcttattaccctaacagggatactatcttagtcagtgttctatagctgtgaagcgacaccatgaccatgacaactctcatacaagaaaacatttcactggggctagcttacagtttcagagctatagtcagtccatagcagggggcatggtgccagcaggcagatgtggtactggaaaagaagctgagagttctactgatgaatctgcagttcaaagggtggagtccatgaccatcatggcagcagacaggcagggatggcccctatctatctaatctttaaacaagttaaacaggcaaaggctggaagcaggaataaggagttggcatcagaggtcagggggcagaagcagaggcagactggttttggcacaggcaacttgaaacctcaacgctggttcccagtgacactctttctcccataaggtcacacttcctattccctccacagttccaccatttggggactgtgtattcaaatatctaagcatatggaaaccattccccttcagaccaccatggtgatttcgtggcttcagagcactcaagtctacagagtgctagagaaaatgtcattctgttgttctagaagtcccactgtgctctgtggaaagcagttggcccaggaaaaactgatgttaatggttccatcactagagtattaaagttctggaatgcagactccaaatcctcagtcctctagtatgaagtactccattattgaaaacttgagcaccaatgtctacaaggagaaaatttcacagtaggaaa

SEQ ID NO: 4747 - DNA, 1000 bp, mus musculus
atgtcatgagggccatgtctgagtctgtggctatgcacagcagagaacagtgttgatgtctgtgagttcatagtaccactagataagatggaaatgtccctggttgaggcagctgccaaggaacacgaggatgtccagggaatgtgcataactggcattgcttctcattaaatgtagcatcctggcgagctggccccatctctcactggtggcagcatttaggagagtgggttcttctacattgagcagcatagtagacctggtagcaggagtgtgggtgagctagaatcaagtgtatgagtgaaagctgaccctttaactcctctgccgtgaagtggtacagctacagccgtgatgccctgcccccctccagactctcaccccctctgacagtcaggagctgaccaccccaccaggttatgagcttgggggagctagccctgccccttaccagctgtagcacttaggagagtgggaccttcaccttgcctggacatcacagcagacctgaccctgctggtgttggcataggtgagccagccccagggtaagagaatgggagagctggacctgcctcacactcatcatcttctgtgaagtggcatgtgagaaggagtgatagcttgaccccacacttgtgccaatacagagagctgaccctgctccttgctggctgcaccatgtaggagatctggtcctgtaccttgcctgagcaacacagtattatttgaccttgttgggggcgtagaggtttgccatccatgagggtgagagcatgggggagcaggtgagacagcccaagaccagaaatatgtagagctggccctggcattcctctgccatgaggtgacgcaaagggcagtgatgtcccatactcctatgacctcaccatctgaggtagcctatagagctgttgtcatggtcatgagagtgagttagttgtccatacctactgctggctgcagcacttaagagagcagccctgcactgtgtctgggca

SEQ ID NO: 4748 - DNA, 1000 bp, mus musculus
ttttagttgagagagtcctgcttggaaattgctgaaagaaaacagttcagagaacaaccacaatcttgggtccgtttgttcaggtttccctccttacctggattacttgtgcacttctcagaactggtttgggctcctctgacagtggctgattttgtctggtcagttctcctaataccagcttgattgctcccggtgagtgttcaggtcagcctaaagtcttgtaaactgggaatatgggatgattaaactgtagctattcaaacaagtctttcttacagcaatgggagaagcacaggggtgctaactttttccacacaaataatctactcgaacatgtttggtgagcctgatgttgggaatgccaaaacttaggacgtagcatgtactttttccatcaggatgcctcctgtaggttttaaacttcttgtcttcctggctctgtttcccattctcccctcccactctgtctttgcttactgttatttttaaggcagtctcactgtaatgtttaggatgagtttgaactcttagtttccaattatactcaaccatctagccttgggtccccacaaagctaggtctagctactcaggtcaatagaatttcagtatgaggttttaaaaacacatctctgaaattttactcttcacttatcctctttatttataggcattcaattctcttccatgtgcaagtttcacttacagaattccacagtttccagtagtttcagttgcagttgaaaaccaaagttcagagttagttagtggaagagaactcaggactggaccatcttaatatttgatgatttcatggagtgcttaagggttttaagtttttaatgccatgacccatggaaaagaatgatttcattcaggttaggggggatgaaaaataaagtacatatttaatatgtattataaatgattgtgatttttgcaacccctagttagctctctctgtctctctgtctctgtctctgtctctgtctctgtct

SEQ ID NO: 4749 - DNA, 1000 bp, mus musculus
taaataaaaaaagaaggcacaagtgaggatgattgaatcttacttggaagtggaaataaaatagtcataggatgcagagagagggaggaaactgtctgagagagtggatgtggaggggaatggtggtagttagtatcagatgtgaggagagtcaggagagagagccagagggccagaggactgaatggaaaactgtagctggcagtggtagggggtgagggcaatctctaggacatgccagagacatggggtgcgtgtaactcccaagagtcaatatgggtgaccttacctgagatgaatagcaaaggtaatatggaaactgaagaaggtgctgtatttaggtaggccacaccccacccccctccagtggaagcgttaggacaccaaaacacctacaaaattttaagtcctaatttgtcctgtctcaaaaaagttcagggacaaagatggaacagagactcagacattggccacctaaaaactgacccaacttgaaacccatcacatgggcaagcaccaatttctgacactatgaataatactctgttatgtttgcaaataggagcctagtataactgtcctctgagtggttccactcagcagctgactgaaacacatgcatacaccaatagccaaacagtggatggagctcagggactcttatggaagatctaatgaaaggctctgaaggggataggaagaccagcagattcaattaacctggactcttggggactctcagaaactgagccacctaccaagaaacattcacaagctgcacggaggtctctggcacatatgtaggcaatgtgcacctcagtctccatgtggtttctccaacaactgaagcagaagctgtcccttagatgttgcttgtctggaattattttcctacctcggctgccttgattgcccacagtgggagacgatgcttttaatgctgcaaagacttgatgccccgagtgaggagatatgggtggggcaccctctcagagacaaa

SEQ ID NO: 4750 - DNA, 1000 bp, mus musculus
ttttatttatttatatttcaaatgttatcccctttcctagtttcccttctggaaatttaatatcccattcctcctttccctgcttctatcagagtgctcccacatccacccacccacacttgcctccccaccctggcattcctctacattgatacatcaagcctttacaggaccaagggcctcttctcccatttatgtccaacaaggccattctctgctgcatatgcagctggagccatgtgatctagtatcataagtggcaatccaagtctagagatattatgaaaagtaaattgacatgttaatttatgatgatcttagcaaaactcaaaaagtaattgagctatatacatttccctaatttttaaagttatttttattagatattttctttatttacatttcaaacgttataccctttcctagtttcccctccaaaaatcccctaacccctctcccattcccttgctccccaacctgcccactcccattcccagcactggcattctcctatattggggcatagaaacttcacaggacctagggcctctcctgtcattgataaccaactaggccatcctctgctacatatataactagaaccacaagtactaccatgtgttttctttaattggtggtttagtcccagggagctctgggggtactggttagttcacattgattttcctcctatggggttgcaaactccttcagctccttgggtactttctctagctccttcattggggacctgtgctccatccaatggatgactgtgagcacccacttctgtatttgacaggtactagcaaagcctctcaggagacaactataccaggctcctgtcagcaggctcttggcttctgccatagtgtctgtgtttggtggttgtttatggaatggattcccaagtggggcagtctctggatggttattccttcagtttctgctctgaaatttgtctctgtaactcttttcattggtgttttgttccctcttc

SEQ ID NO: 4751 - DNA, 1400 bp, mus musculus
cacaggcctgaagcttttgatttgatattaagcatcatataaaacctatgtgataacacaaacctgtaatcctatcatatagttgattagaagaacagaaatttaagttatttttagtgtttgaggctagctcagtacttgtctaaaacaaagaacaacaacttaactgatgcccattcttacaatatgcatgagataggacaatattggaagtttcaggaagatacactctaactaaaactagaaaaaaaataagccatgtaatacactattcattaaggatcaaaataagaatacaactctctatccattaatagtttaaatttgagaatgccattacaggatatcatcctaagtgaggtaacccaatcacaggagaacacacaggttatgcactcactgataagtggatattagcccagaaacttagaatacccatgatacaacttgcaaaacacatgaaactcaagaaggaagacctaagtatggataattcattccttagaatggggaacaaaataaccatggaaggagttaaatagataaaattctgagctaagacagaggatggaccatccatagactgccccacctggggatccatcccataaacaaccacgaagcccaaacactattgcatatgccaacaagattttgctgacagaaccctgatatttcttatgaggctatggcagtgcctggcaaatacagaagtagatgctcacagtcacccattggatggaacacagggcccccaatggaggaactagagaaagtatccaaggatctgaaggggtctgcaaccctataggaggaacaaacagtatgaactaaccagagctcgtgtctctagttgcatatgttgcagagaatggcctagttggccattaatgggaggagagacccttggtcttgcaaatattatatgcttcagtactggggaatgccagggccaggaaatgggagtgggtgggttggggagcagggcagggggagggtatagggaacttttggagaggaaactgggaaaggggatagcatttgaaatgtaaatgaggaaaatatctaataaaatgagttattaattgatctagaaaaaagaatgccattacatatacaatgtgtaacaaattatagggttatagatatttgtccttacctataagaattgatagatgcctgaacactgtgtttctaaagaattttttctccttttgtgtggtttatgtatcagagtaattgtggcttcaaattgtgtagagtaccttctgcttctattttgtggaatagtttgaggagtattagtattaggtcatctttgaaggtctgatagaactctgaactaaatccatctcatcctgggctttttttttttttttttttttttttttttttttgcg

SEQ ID NO: 4752 - DNA, 1000 bp, mus musculus
tttggcagttactcagaaaattggacatagtactatcaggggatgcagcaataccactcctgggcatataccaagaagatactctaacatgtaataaggacacatgctccactttgttcatagcagccttatttataatagccaggaactggaaagaatccagatgcccctcaacagatgcatggatacagaaattgtggcacatttacacaatggagtgatatgaagctattaaaaacaatgaatttgcgaaagttgtaggcaaatggattgatctggaatatatcatcctgagtgaggtaatgcattcacaaaagaacacatatgatatgcactcactgataagtgtatattagcccagaagctcagaatacccaagatacaatttgcaaaacatatgaaactcaagaagaaggaagaccaaagtgtgcatacttcaatccttcctaaaaggtggaacaaaatacacatggaaggagttacagagacaaaggtcagagcagagcctgaatggatgaccatgcagagactgccccacctggggatccatcccataaacaaccaccaaaaacacacactattgtggaggccaacaggagattgctgacaggagcctgatatagctgtcacctgagaggatctgccagtgcctgacaaatacagagtggatgttcacagccatccattggatggagcacagggacctaatgaaggagctagagaaagtacccaaggagctgaaagaggtttgcagtcccgtaggaggaacaacttgaactaactgggatctccagagctccctgggactaaaccaccaaccaaagaaaacacatggtgggactcatggctctagctgcatatgtagtagagaatggcctagttggtcatcaatgcgaggagagacccttgttcctttcaagactctatgccccagtataggggactgccagggccaggaagaagaactgggtgtggttttgagcaggagaatggataggaa

SEQ ID NO: 4753 - DNA, 1400 bp, mus musculus
acagcttgtgaaaatttcaaggaggttttacattttattattggaatatgtatcacttgctaagtataaaaagtacataaaatatattttcctaagtgctaggaataatttaatggaaaatagaattacaactgtgggcaattgaggaataatgagagtttagtttctgaaaactcaccataagcaaccagctgtacaaaactcatgcaagaacaagacggtagagatttccacctttatttatcccgcattagcctaagaaggaggttgacatagataagataaattaaacaatttattgtgctcttatgatcactgtcttctaactttgacctgagtcagtaatcactataacattcagagagcttaaataatcaagagcagcagaagatgcatgtagggtttaaagggtctctaggtctccagtctgtctgctccaccatagggcatgaccgctctgggatgcaggaaagagagttgactgtgcttaccccacgttgttgggctgtagggaagccccaggacaccagaggtagggagtcactgactgaggtgcgggacagccagagcagactggagggtgggcgtccctgagcctgtgacaaggccggggccatctggttctcaagctcttggacacccaggcgccactggaccagagagtccttggctttccagccgttggcttgggtttgggcttgggcttggtggcagcagtggctggaaacacagagaggctttctactggagattacatggcggctctataggcaaaggccttctccatggctccccacggtggatcccagtgaaaagaggcagtccatggatttaagatattggcatggctggaaatggatgagtaaaaccgtaccccatttctcagggtgggcctgagtttaaatactttttgcagagaggagtgtctggaaaggggtacacttactggctaagccctccaggcctttaggtgcctcattaaaatggagatctgtcttgatcctatgtgaccacagatcatgtcctctccctgtgaaggggcttggggagttgcccttatgtgactgatggccgcaaatctatggggcactgcctctagtgacaggggcctggtggcccggaacaggcaaagtatctacagtcccttcagaatttctggagtttcaaaccttagatcaactagggaccaagctacctttcccggtcccacagatgcatagtaatataattgttgcaatcaaacaattgtggaagccgtttagcgatgtctgaagtctgtcatggcatcaggaggaatcggctgaaaccagaaccctgtgatcaagtggaaagtttttgtgaaaggatgaaccagaacagcttccatagaggtttcatccctgcttatcagatcttgaaac

SEQ ID NO: 4754 - DNA, 1200 bp, mus musculus
agacgctttattgatttaagggttagagacatgtattttcatgggaaattccaggtagtcacggtcagtttctatgtagtgtgaacaatggactccgaaactatcaaaactagtgtaacttaaatgaaagttagtttttaggaatgaaatggtgtgatgactcatgagacgctctgccagtgcctggccaatacaaatacagatgctcacagccaaccatcgggctgagcacagggacgccagtgaaggaattaggcgaaggactgaaggagctgaaggggtttgcaaacccataagaagaacaacaataacaaccaaccagaccccccctcacatacacacacacacacacacacacacacacacacacacacacacacacacacacatacacacatcccagagctcccagggactaaaccaccaaccgaagagtatacatggctccagctgcatatgtagcagaggatggccttgtccagcaccaatgggatgcttgatcctgtggaggctcagatgccccagctaaggagatgctagagtggtgaggtagggatgggattgggtgggggagcacgctcgtggaggcaaaagagcggggggggggggggggatgggatgggacttttacggggggaggggggacagggaagggagagaacttctggaatatcaataaataagatgtaacataaaagaaaacattcttccaaaaatcaaatgataaaaaataaagaaagaaaaatgtgatgaatgcttttattttccacaatcgttaaaggaaagaacgttgaaactccgtggtagttctaatgatgcatttcttagttaggatggcaactgttgggataaaagagcatgaccaaagctacgtggaaaggaaagggtttatttggctttagagttccacgtatagtccatccctgagggaagtcagtggagaaactcagtagggcaggaacctggaggcagccgctgatgcggagaccatggaggagcgctgttgagcggcttgttcattatggcttgctcttttataacactcggtagcccaggcctgctcctacccacacagaagggggcactcacatataattcacccatcaaaaaaaaaaaaaaaaagaaccaccctaggccaatcaggtaggagtatttcaccaactgaagttccatcccccaacatgactaccttgtgccaac

SEQ ID NO: 4755 - DNA, 1000 bp, mus musculus
catacagaaaaacattagttgtatttgcttagtgatggcaatgacacaaaaaagcttatttggactcaaaattccaggttacagtccatcatagcagggcagtcacagaggcagtaggtgagagaacttgtcacattctacccagcaccaggtgtcagcaatagatagatgtgtgcacaccagtcagtttgattttactctgtgtatggtaatttggtaggttttcctacctcagttaatgtaaaatcaaacaatgcctggctgagactcctagcagcttagtggtggggaagggtatatattgaggctgatgtagtcaggcaggacttccagtggaggagtttgggataccaacccacccaccaaacctttgacccaaaatttgtcctgcctacaagttgtacatggataaagatggagaatagactgagggaatgaccaaccagtgactggcctttcttgagacccatcccacaggagagagccaagctctgacactatgaatgatactctgttatgcttgcagatagaagtctaacataattgtcttttgacaggtttcatcaagcagtgaatggaaacagatgcagagacccacagccaaacattaggtgggtctctgggagccttgtggaagaatgggaggaagaattgagggagccaagaggggtcaaggacactacaacagacctagagagttaacatttctttttagaaatagaatccatctttctatttgatgtgtttaatatttttcacatatgttttttgggtaaaggcgaattaattgtgtaggttactctgtcagagttttgaaatctctcaaaactaatagaatctgtattctctaaacaatcataactttaagagcttcataataattggtcaatctatatattttattacatttctctcatcaatcaaagatacttaaatttgtttttttttaactgtctttaactagtctagaataaattataaatgagtagagtatgttttg

SEQ ID NO: 4756 - DNA, 1200 bp, mus musculus
cttaaatgtattcatcattgtaatatgtttacatgagatatgctggatttacaatctagttacgctatcaatatttgctgatagaataggcagagagattataggttttctgtgtgggctttctcctttgatttagataagtaggcataaatcttgatatattttccagacagcattgagcaaatcatctgttctacaccaaatgggttgctggtaattaaagaagggaaagtattggatgcaagttctactaataagccagccaccatagtggaaacccacgggcaaagacagagtaaggagtgctgccaagttcacattaggtaaaccagggagcctgctaaaacaccccctagtgctgggaaattcattaccaaaatgtagtaatcatcttgcagaagtaccagcagattgcacacattacctcctgcagactggagtgggaataagtaaaagaaaagaggtaatgatggtcgagggaaattgaattttcatggcacttatcttctgtgtcattctatttgcatgagaacaatgttagctggagacattataggaccctaatgagaacaggagcttctcccaatgggcgagagccaggatgggtgttgatgaaatcaatctatcaatgagattttaaaacgcaccatagccccagtcttgctctatgcccatgtgggtgggccttccatcaaagaagagaagaaattaagaatgatggctagagagagttcaaagcacacccgcctctctgtcagctggcccttaatgataacatactactgctttccttaaagagcttcatgtcttattcagggtaaatgcccaaagtgtggcattttagaacccatgatgtgtttttctattgatgctgtcagtgtgaccagccacggcaggaagtgctgtgtgtcgcctcccattctcctcagtgatccatcagacgtggcagttcatgcatgcagcatcagacgaggagtaaataaggtatcggctccatgctgaacactcacagattttattaagctgccaatcacccatgggcaattcagcacgtcagaagacaaactcttatagggagtctcttagtacctactttagttgtcagctaatacctggcacaactatgtattatctcatatgtaaaacattccccgagttgcaaagcacaaagaggcattttatcccttggtcttgttcttt

SEQ ID NO: 4757 - DNA, 1400 bp, mus musculus
taaaatattgtaaacgaagaagaaacatctccttaaaactaaaaaaaaaaaaaattagaaaaaatagagtaaatatatattactctgtttaataactaaagtatgccatcccctctataaaatataaataaattaataatttaatatttctctaattattgtatgttgagttcctgctacaagcctatggacttaaaatagaataaagctttttaaaattctttcccttgaggcatttttaagtttgtttttaacaaaaaaataaacaagaaaaaaagtatagaaaatgtcttagtcaatatattctgtagttaaaataagctaggtaaataaattattaaactgtaggagaattgccactgaatttagcgtgggaaggagaaacccataggtacacactgatgctcagacgagagcctgttgtcattatgtagttgctgctgggcaagtcatatttagcccaggctttcattaaagtgagaagcttcccttgggtttgttttatttatgtttggattctgttcttattctgtatttaatttgttcctaagccgtactttggcttcgatggcttagcctaaacatcacaagactgtggcttttttttttttttttttttgccatcctatttccctttaaagtgaactgtgagctgaaatgctgtaaaacaccagatgggaaggaagctgccaccttcttccatgcatctgcaaggctatggctcccagtgtctcattgtgtgcaggaactcaaaaattccaagcctcagatgtggtcacatagatcctctgctgactactacagatttgccttcaaatgaaccacaggaatgtttagtagttaatgatggccagaggcttcccttgtcatggggtttttaggctcttgcaagcaggctagcaaagctggtcccaaattcttgtctcagctggcagacagggttccccaccccctgccccccaatcactaacaattgcttcttacatttttgcagggctgtagggaaacaaagataccatccagattcgtggggctagagggataattccaggacttactcatattgaaaacaagttcagtgatttggcccagcttcctcattctgcagtttatcacatcataaagtcatccaaaattataaaattttgtaacagaggggaattctccaactaatttacaattagaatacaatttaaggcaagtttggaaagcaagctaagccattcttcacagaatatgaaaaaaaaaaaagtcttccattaatagtgctccaaaataataagccttctgtttcaaaattatatgctcatgaatatagtgcttaaatatatactcataagattactacttaataatcaataatcgtatcatttttaggagcttcgtgtatgaaattgaac

SEQ ID NO: 4758 - DNA, 1000 bp, mus musculus
accaccagtttagagagcagcacagtattaacgcaggataactagccttgaggcatcaccctgacaacgagcagtgagaggcgtggactcagagtcttggacttggttttggagaatggcgaagcaaggagtctcagcaactgttgggaaatcacccctgctttgactatgtcctttctgccaatgtatgattatttttaaaacattttatagttctttacattgcctgatatttgtgaagctatatgaatctgatgacagcctctggtgaccagctatgtttttgttggggtttttgttgttgttgttgttgtgtattctggcttgataattaagaggaaaatgatggagataaagaataacattctcaagattttgtacctggagggtgacagatctgagcctcatacacttttgtgtgaacaacacctgagatactttctatttatttatttatttttttatattttatttttttccccagtgaaaggttaggaaactgggtgtgaacaatcagagggaaaaaacaaaatgaatttattttcattgtccataataagtaactcttatttttaaaacttacacctatagttttgtttaacaatggtaatcataacacagcagaagacaattttgtcactaagaaaataagaagaaggttcttagagccatgtcattgggccagcggcgttgctctgcaagcatgaagaccacaaatcaatcccagcatatacaccccaactgtgtatataaccgggcatggctgttgctgtgcgcaatcctagagtaggggaatccagacaggctgaccttacatgctttctaggcagcgaggctagctgaaacaatgttctagtcactcacagactctgattgtagagtaatagaaaaaaaaaaccctcatatactgttcatgtgtgatacactctcatatttatgtaaatctaaagtagttagcataaatacagactacgacacatatgcattcatggcaacataa

SEQ ID NO: 4759 - DNA, 1600 bp, mus musculus
attgaacaaatttagagattccaaaactttagagaaaccttgacttttgcatttctaagcgattttttcttttttcattcttatgaaataaaaatatgcctacttaagttctcaccaagatctatccatatgttgattatgtgataccagtgtccctttcatgttagctaaattatgtttgattttttaattaaaatggggacatccacataagaacaattaaacactttgtcccccaatttcttttctgttttatgttgtataagcacaggctgcttttgatattctatttgaatgattaattcaggataactgagacctctagaagctgtttgcaggaggcctttattgtgtgaaagcaatttctgattttggaatatgcaaagtttattgtgtatttaaaatgctaaatctcaattttttaatctcctgctgaatgtccagaaaatagtcctttaaagaacacaggataattaacattcagtttaatgggctctaattgtgagctaatatctgattgaatggataacatttctgcatgtggttttcttccagggaagtattagaataatgggccatcagagtggctcagattcttgccaaagtttcctccctgtaaggaagaaatattagtcccagagcaaattatttcgaagtcatcattaatgcataaggagacagacatgttgaatgtctgattttgaagacggggtgaagagctgctgtcctttctttgatatactttttcttggagtctatgtaacacgcctgcattcattttcccaggaatgactcgtcacactttggccatctaagttgagaacctgctttgtgcaagggagcacatccatgtttgcaagggttcaactcttcccctgagtcctatttctcctccagggtatacaaggatccaggcactgttatcagtgaaggcaacatgtttctgacaaatgatgagggcagattgggagacttgggaggacagggcgggcatcccattgctctgttccaggaactgatgtatctcctatcacacgggtcctttttatagacgtgcttgttgtgaatgtttgattttattctgaatgagacaagtatgacttctgtacagaaaaatgattgaaaatcatttgctctaaatacacaaaatctgattcatatattttaatttcatacttctagtctatacaaaatggaaagcttgggtattaatgaatgtaatgaaactatttctgaacattttgatatacaaaacaaataagattttggcttccttttgttcactgcttaaatattgagtacaaatcattatgttactgtgtaagtgagatataattgaatgcatcacattcttatatatctggtgtagctttgctctattcaagtaatgttctaatatacaatacactttccaatatttaagcgtaatttttacacagttaattttcgaataagcatgatgtttaaataattagatatttgtgttgtttgagaggcagaaagcaattggcagaaataagcaaatgaggcatataggcaaaaaaacctaaaggttatgagtgttcatatatgtcttccagaaataacatatatgaaagtc

SEQ ID NO: 4760 - DNA, 1200 bp, mus musculus
ctgcatcttagatttatgacaaatagttccttatagtgacaagcttctttttgccgaaaatgaatgttggctttcttcccaatttgtggccccaaaagactgcttctttagttctaggtagatacaaaatgaaactcaaaactgaaaacttcaggttccttgtctggcaagagttggcgaaagactaattaactacaaaggcattgactaaacttggcaaaagctgctttctaattgaagcattgagctttaatcagaataaagccagttgctcagaacatagctgctgatatcactaagccatgcactggagtagcactagcccctgcagagagggatgactggaaacaggtggcttaaatgaagggaatgtgatgcccacatggtactactttttggttctttctgaattttctctatattttcactatcttaagtgtttttccacctatacttgagttcttttttctttccctcctgtacatatttataggcatatacataagtatacatatatgcacacacacacacacctcatagttaggacgtcccatattccagaaccaagtgttctcttaccctgccttcaagagttgtcattagtattggccaagttgatatgtcatttctaaagaccaatgtgataaaagacatatttctgtccttcattctgtgttatggtttgtatacgcttggcccagagagtggcactattagaaggcgtggccttattggagtagctgtggtcttgttgaaggaagtgtgtcactgtgggtgtaggctttaagaccctagtcctagctgcctcgaagtctgtcttccactagcaaccttcagatgaagatgtagaactctcaactctgcctgtaccatgcctgcctagatgctcctaccttggtgataatggactgaacctctgaacctgtaaaccagccccaattaaatgttgttcttataagagttgctttagtcatggggtctgttcacagcagtaaaacccaaagacatatatataacatctccctcctctgtctctatctctccccatctctctatactcttctcccctcagatgtggccttttatgtcctcctccacacctaataaatctcttgtgtgaggtctgttgctgtggcgtcatcttttctgtattccttggccttctgatcaccacaaacatgtccatgtatatcacccttt

SEQ ID NO: 4761 - DNA, 1000 bp, mus musculus
tttattctaatcacattcttcttttcttttccaccagaccacaacatcctgcttgttttaatagtgaaacacaaatcttcctaactgccttttaaactgctgtgagaaaagacaaagtcaactgagctaaagttagcaattacctgtcagttgacagggcctcctgaggtgggaatcaggcaccgccttgctgggttcctgccaggtggtgtcactcacagttgttccttctgcaataagtggaagactggttagcggcagtcacagtaataactgccgagtacataaagattctgaaatcaagcaatctcagcacacagttgtagcttggtagtcatcagccccttgtatgcaattctagtcagtgaatagttgccgcaggctccccatttatgtagaaaaactcctaagtctttcacgtagatgtgataaaacagtggtcctcggatgcttcctaggagcttatgatgctattgttcctttagtgctttcttgaatttcctatcgtcatcatgtatcagtaatagtgaccctaccttcaatatgcaccaacattttaacaaaggagtcaccttgttaaagcatgtaagtagaatgtatagttatgaagtttcatgagccatcaaatatccttggctagaaagactcgctctgtggactctgtacactggagtaagccttgactggtgaggagcagctcccatgggtagacaagcaccccctccaggccactcagcaaagacttcccattctacagtctctctcataggctgacataaacaaattggaaaccgtgcaactatgatggagcccagacacaaatcaacgtactgggttctatctaaagtcactagtactctgtgggctctgacaaataagacatggtctgtatcgatcaaggcaggaaggacatgaaaagtccagatgtcctgggtagattagggtcatcacctaagtcaggagaaccttctaggtcatgacaggagatcagttttgaaga

SEQ ID NO: 4762 - DNA, 1400 bp, mus musculus
aagaagtccactgagaagttcctacagtttatatatacaccttcagcaagatacaaggttatctcacaaaaaatcagaacgcctatatacaaatgagaaatggagaaaataagtcagggaaatgacaactttccaatatcctcaaataatctaaaatatcttgggagtaactctaaccaagcacgtttaagacttgtataaaaaatgatttgaagaaaggcattgaaaaagttatcagaagatggaaagatctccaaagctcatggattgttaggattaacatagtaaaaattaccatcctaacaaaagcaatctacagattcaatttaattccatcaaaatatcaatacaattcttcatgtaccttgtgttggtttgaaaaggtttggccctctcatgtgtttgaatgcttggctcaaagggagtggaccactattaggaggtatggcattgataaagtaggtgtggcattgttgaaggaagtgtcattgttggagtgggatttgagatttcctgtgttcaagctctgccctgtgaaggatcagagcctcatcctggccgcctgagacagtttcctcatggctgcctttggatcaagatgtcgaattcttggcttctccagcaaccagtctgtctgcgtgatgctgtacttcccgccgtgactcctaattgcaaatagaatatcatcaatactgtcagagattggtgcttgcccatgggaaaattagcagtttttaagaatcaactagcgtcaccgaggtgaaatctttgggaagtgttttctgagagcacaaagtagctaaagctccagagatagacattatgctggcagccagactcagtaatgtggaagaatcaactaagtggtgctggttttgaaggcatgaaaagatcatggaagtcagctgaggcttggcactgtgagaggccaggaaagccattggtgatggtacagtctcagtggcagatgaagtcccaggattgtaggggtcatacaaagaagttgagccttggcaccatgaagggagcttatgagaggctattggtgaaagtgcagcctaatttcagaggaagatgctagcatattggacatgccagtaccatgggataaccactaagaacagcaacagaagtgggacagagtcacccagaacctagagtgctacagagggcagagctggagaagtgacccaagctctgaagaccatgtgtggatgtcagacattggaacaagaagctgtcacagtaaagttgtcttggagaccccaaaagagtagagatgccgagtgttggaagacctgctaaagaaagctgctaacagcatgtggaaccagcctaaaagaaagaaatgtgttgcagtcaacaaaactgaaaggagttggacatcagacatagagata

SEQ ID NO: 4763 - DNA, 1000 bp, mus musculus
gtgtgctgcattctgatgatggtgagtggtcttggtttctgttagtaagattcttacatttgcctttcgccatctggtaatctcagctgtcctaagaattcattgagagtcctctaaggggaccttagggtgtctgccaactctgtgcccaagatgacccagtgctggcaccaaccggaaggtgacattttatgtttttaactggaagaaaacagtctttctgaaaaacaagaggcaatgtcctaccagcctgatacattagaggaacctggattaggaaactaacatggataagaactcaacttagaaatttcttttaagtgctgaaggcacatgttcttctcatttgcatgtgatgttatgaaaagccatatcaacccaaaactggctagtgtacagcaaagttagagagaggcacacatggtaacatagggcagactgtaacctgcatagctaatgttggtgttgcttttattttgacatggacatatttgtcattgcattaaaatatatcctgggatccattccatctactggcaccaaacccagacactattcctgatcttaagatatgcttactgacaggagcctggtatagctgtccccctgacagtcttttacagagctggaccaatgtagatgcagatgtacacagccaaacattggattgagcacagggactccaatgggaaagttagggcaaggactataggagccgaaggggtttgcaaccccatagaaagaacaacaatatcaaccaaccagaccccccaaagctcccatggactaaaccaccaaccaaagagtacccatggctccagcaggatatgtagcagaggattgccttatctggcatcactgggaggggagcttcttggtcctgtggaggctcgaagacccaggatatggaacgctaggctgctgagacagaagtgggtgggtgggtgggggagcaccctcatagaagcagggggagggaagataggatagggggcttgtg

SEQ ID NO: 4764 - DNA, 1000 bp, mus musculus
gttagaggttttgctgggttagtaaattagttggtatggactcccctccaatgaccttgacgtcattggaactgaatagttggcttggtttccaggactaagcattgtttccctcttgtttaatggttcttaagtccaattagagaactgtttgttactgtcactgtatgcagtgcatgaccctactgtacccttaggattatagtgccacactggtcgatgagatgtggttcctaagtgttatgtctgggtatgagtgttgactgtctctctcctttgaaagcttgcatggtaccatgaaagctagccctcagaaaagaggcatttgggtcagtttcagtacaggagcctctggactctcagtggtgtctccagcacaaaggacttactagtcacatctggggaagtgaccaagggcagcagctacagcctgtatggtttaggtgtctcctaaacatttcatattattcctaaacatctttctctttagacattgtcaacaaatcacagcaaagtgcttttcagatataaatggcaaatatccacctgcttattcctgcaatgatatgaagatgaccaccctcaccttgtctctgataccctcaggaccaatctcacaacctcgctgttcctctttcccttcagtcattgctctaaaccacaacacacatttgttgcctaactgcattcacttcagaaacaccttcaatctctgttggagctcctgagctgctacaggacaggtttctgtcactttctaagccatagtgatccagacacaaacctaaggtgggccaatgcaggaaaggctgaaggagagcatgactgcccgactctggcatggctcagctggacagttcttaatctcatcacgcacagcttttcaaggatgcctggcagcttgagctcacgcagcacacagtaaggattcatacaatcgggtgcattgtgaatagccagcctcccgtcactctctggttcatcctttcctgttcctttt

SEQ ID NO: 4765 - DNA, 1600 bp, mus musculus
tagaaatgtgtcatggaaggaagcaccaagaaatgacttatatagtgaaataaaggtttggattctcaagccttgaagctcagctcatcattgtagtgactgaggcttctcaaatctttatatgaattaggtatacatataatatattgtattctatatttactgcaattgttgcaaattatcagtgtgtcaaagaaaaagttttatgtgggtttatttctaggtctttcatttgattccattaatcaacctgttgtttctttaccaaacccatgtagttttgttttgttttgttttgttttgttatcactattgctctgtaatacagcttgagaacaacttcctttagaagttcttttattgttcatgattttttatcaatgtaaaaaatctttattattataaaagtaggtcagtcattaatttaacaaagtttttttattagatattttctttatttacatttcaaatgttatccccttttctggtttcccctcccacctccccctgctcaccagtgtacccactcctgcttcctggccctgacattcccctacactggggaatagagtcttcacaggacccagggcctctcttcccactgatgaccaataaggccatcctctgctacatatgcagctggagccatgagtttctccatgtgtactctttggctggtggtttagtccttgggagctctgtggggtctggttatttcatattgttgttcctcctatggggctgctaaacacttcagctccttgggtcctttctccatttgggaccctgtgctcagtccagtggttggctgtgagcatctacttctgtatttgtcaggctctggcagatcctctcaggagacagctataagaggcttctgtcagcaagcacttgttggcatccacagttcaggattgttttagctctccggggttttgttttgttatgtttttatatatgaagtcaagacttgctctttctacatctttaaagaattgtgttagaattttaatcacaatttcattgaatctaaagatagctttgggtaagatggccatttttgctatgttaatccaaataatccatgagcatgggaagatctttccatcttctgatatcttcagtttctttcttcaaagacttgatcatcttgtcatacagatctttcacttgcttggttaagaattacaacaagatattttatactatttgtggctattgtgaaggatgttatttgcctaatttctttctcagcccatttatcatttatgtcaaggaaggctactgatttctttgagttgattttatatccagccactacactgaagttgttgatcagctggaggagttctctgtagaattttgagaactgctcatgtatactatcaaatcatctgagaatagtggtaccttgacttctacctttcaaatttgtatctctttgatctccttttgttgtctaattgctccagctagcacttcaagtactatgtcaagtaggtaggggaaaagtgagcagacttctctttcttgtccctgattttagtggtattgcttctaatttctctccatttaatttgattttggctattggcttgct

SEQ ID NO: 4766 - DNA, 1200 bp, mus musculus
gtataccaaacagtttattaatgtcatattattaaaatcgaaaataaaacattaccaaaggccaaactcattttttaggacataattataccagagtagcatgtataattttttattggatattttcttctttgtttacatttcaattgttatcccctctctgagttccctgcctggaaccctcctattccatgtccctccccctgtttctatgagggtgttctcccacccatccacccattctttcctccccgacctcgggttcccctatactgggccttagaacctccacaggaccaagggcctctcctccaacaaggaggatagtataatgccctacaagtagtataatgcccaacaaggtcatcttctgctatatatgcgcctggagccatgggttcctctatccttctgtgtgtactctttggttggtggtttagtccctgggatctgggggggtgggatgggagggggttggttggtaggtattgtgctctttctatggggttgcaaacccctttagctctttcagtcctttctctaactcctgcattgggggccccatgctcagtccagtggctggctgagggcatcacctgtatttgtcagactctggcagagcctctcaggagacagctatatcagtctcctatcagcaagcacttctttgcatccacaatagcatctgggtttggtggctgtatatgggatggatctccagttagagcagactctgaatggtctttcattcaggctctggtccacacttagtctccatgtttcctcccatgaatattttgttcccccttctaagaaggactgaagcatccacactttggtcttcctttttcttgagcttcacgtgttctatgaattgtactttgagtattctgagcttttgggctaatatccacttatcagtgaatgcataccgtgtgtaatttttttccacataattcattcttagtataagtggcttttgaaaatcagaggaaatttttagtatgatctaccttctttgaaaatgtttgtgcttataaaaactaataaggactctaatgctgccaaatgagatactcattctcattatctgtttcattaggtctttgccattacatttaacttattttctgaaaatggggaaatgcagtggcatatgatgaacagtagaagtgcaaaggattctatgtcaagggtttc

SEQ ID NO: 4767 - DNA, 1000 bp, mus musculus
aagaaagacagcattttcaacaattggtgctggcacaactggttgttattgtgtagaagaatgtgaatcaatccatacttatctccttgtactaaggtcaaatctaagtggatcaaggaacttcacataaaaccagagacactgaaacttatagaggagaaagtggggaaaagccttgaagatatgggcacaggggaaaaattcctgaacagaacagcaatggcttgtgctgtaagatcgagaattgacaaatgggacctaatgaaactccaaagtttctgcaaggcaaaagacaccgtcaataagacaaaaagaccaccaacagattgggaaaggatctttacctatcctaaatcagataggggactaatatccaacatatataaagaactcaagaaggtggacttcagaaaatcaaataaccccattaaaaaatggggctcagaactgaacaaagaattctcacccaaaaaataccgaatggcagagaagcacctgaaaaaatgttcaacatccttaatcatcagggaaatgcaaatcaaaacaaccctgagattccacctcacaccagtcagaatgtctaagatcaaaaattcaggtgacagcagacgctggcgaggatgtggagaaagaggaacactcctccattgttggtgggattgcaggcttgtacaaccactctggaaatccgtctggcggttcctcagaaaattgaatatggctcttcttaagaacatgatatgcttgtttgtttggttgttcggttgtttggttggttttgcaagacaaggtttctctgcatagccctggctgtcctggaactcactttgtagaccacgctggcctcgaactcagaaatctgcctgtctctgcctcccaagtgctgggattaaaggcatgtaccaccaccgcccggcatgatatgcatttttgaagagggcactcaagtttcttcatatgggaaaagtatacttttgtgaatttgaaaagggaggactat

SEQ ID NO: 4768 - DNA, 1000 bp, mus musculus
caaaacccgcttggattgtcagctacacttcaaaaccataattgtgataaatgaattttgatgtcctctaccatcatcatgagatatgcctttaaatccgggtctggcttttccggtgtgttggactacccaggactggctgaggtgggagtgctggattctgatgatgactagtggtcttggtttctgttagtaagattcttatgtctgccttttgccatctggtaatctctggagtcagttgttatagttgtctctggttagagcttgttcctcccatgattctgttagcctctaacagcagacctgggaaagtagctctctcctgagtttcagtgatcagagcactctctgtaggcaagctctcctctttcagggaaagtgcacagatatctggtgttcggacttgcctcctggcagaagatgaaggcccgaaacagggcctgtccaagaagctgttagcttctgttgtccacactctcacctgtgcagactagtcttggtgggatctgggaatgaagatggctcctgcagaagctcctgcaaaaccctcccggggagggtggacacctctcctctggcagggaaggtgcctgaatgtcgagccaaaatgggggctgccttagaagctctgtggctcctgcctgactcagaagctgttagcttctgtagtccacactctcacctgtgcagactagtcttggtgggacctgggaaccagagagttagttcttcaaactaaccttacctacattgtttggaattaaagtatgcactacaggtgtgtctgtattctatccacagcagccatgttgctggattaaaattcctctacatccgggcagtggtggtgcatgcctttaagcccagcatttgggaggcagaggcaggtggatttctgagttcaagtccagcctgggctacagagtgagttccaggacagccagggctctacagagaaaccctgtctcgaaaaaccaaaaaaaaaaaaaaaaaaaaa

SEQ ID NO: 4769 - DNA, 1000 bp, mus musculus
acttcgaggcagaggaaggtggatttatgagtttgagacctgcccggtctacagaatgagttctaggacagacagggctatacagtgaaaccctgtctcaaacaacaacaagaaaaaaaaaaaaaaaaaaaaaaagaaaaaaaaagaaaatgaaactcctaaagccaagctaatcatacaatccaacctgttacactacactatttttagtaaactgtatagttagaatttccccaacagccacctcccacccaggccagaccagtggcccagctgatacctatgcaaactctgcagcctgtgtgcttcccaggaggtctgccatgaccaaggacatagatgaaaatttcactcaaatacccatgccagctgagatactcacacagcccagttgaagcaggacctatccacaccaccccctcccctcccacccccaatgcattccgttgagctcaacctcacttctgtcctacttcccaacctcagccacaccagtggtcaactactggcccaaactctatagcctacaagcctcccaggaggtctgaaataaccaagggcacaggaagtctgcaattaccaggggcagaggaggtctgcagtatccaagggcacaggaggcctgtcctaagcagaaacacaagaggatcacactaaccagagacaatactgcctgcctccaaagatagaagctctaactcaggtcactaagctctacaggcctataaggatgctggttacattcagagacatccaggacagttaacaacagagagaaccagatatcagaggcaagcacaagatcttaagctacagacctaacacaatttggaaccattagaacttagttccccaagcacagaaagccctgactaccctatcatgcatgaaaaacaaaacaatgacctgaaaattccatttaataaagaggatagagttctttaaggaggatataaagaactcctttgtgaaattcctaggcaaatggttggacctggag

SEQ ID NO: 4770 - DNA, 1200 bp, mus musculus
ctatcatatcttctatgcctgagattctcttccatcatttgtattctattggtgatgtttgagtctgtagtttctcttctcttacctagatattctatcttcaggattccttctgtttgtggttttttttttttaactaattgattgactgcttaattgattgattaatatcccaaattaatatcccctctaagtgccccctcacacagtccctctccatatcccgctctcattctcctctgagagggtgacccgtgccagtattccccaaccatggggcaccgtctcccaatgagtccagatggcctctatttctattttcaggttttgaacagtcgtattcatttctttcacctgtttgattgtaatttcatgtattttccttaatggatctattcatttcatctttaaaggcctctattatctccaagagattggatttaaggtcattttcttgtgcttctgctatgttagtatatccagtgcttgcgcagtaagacagctgagttatggtggtaccatattgccctggagcttgttgattttgtttttctactggactttggtcacctggttgtccttggtgttggtaggcctggtagtacctgatagcaacaggcctatgatagtcccagaggagagtaggcatttggaaatgcaggtagagctggtagtcccatatagaagcaggtctctggtagaacctgatggcagaaaacctaagagaatgcaggacgaactgagagctgagaaatggagggcacaaggaacaggaaggagatcaccattgctgcgcttacctatacccagagaaaaccccgaaggcaaggaatgggggagaaaggtctctcctggtagtacctgatggcagcaggcttttagaaagctagaatagttgtggagttgtcaacagagggcacatggggcagggcagagctcacagctgctgggcttacctagagaggtcttgacaggcagatatcttctctaaatttttatgtgccaaccactatacagaaactgtccttcattgtagttgatttaccaataatgcacaattgaagttttatttcatagctatccattttgttggcttacttatgacagagattggcccacacaatcatatgtaatattaaaattggtgaaataaagataagaaaatcctgaagtaaattagataaaaagtagttaataaag

SEQ ID NO: 4771 - DNA, 1000 bp, mus musculus
ttaataagaagagcctagatgcctggatatttttagttcataatatttaagaacttgtatagaaaaaaacaacaacaaagacaacccagtttttgttttgttttcaaatgttacaaactattctagtgtgtctgccatgttttctccaaacatgtcagccactggaaaacatattcctgttgagagtattcatctggggggtaaactgtactttattaaggggtccccaggtatccctaatcgatggacctgtccaaagtgattgtggtgcctatattggagaatccagtctggggtgaaagaaaaatctggggtgaaagaaaaaaatgtggcggtgaaggctgaggctgtgtccctgaccatgatctgaaatgtggaggctgagactggaattatgaagactggacaaggacacctagttaccacacctagttactaagggatatggtgatctgttggagcagatgctaggcctatggctgtctttgaacatgtgctactagggacatatttgattctgttgtcctgtgatccaattattgctccacctcttgctcctgcagaatccactgctaaagggcgggatagatgttcaggtactgtctcctcggaggtcaggctttcccagctggacaacctattccatctgagtagccatctgggatatggagttgccctaggtggagaaatactgtagcctgcattgttgctagagaagacatagctgttacagtggcattagtaacaacaacaacaacaacaggaacaacaacaggaacaacaaaataactaataagcagtgctatcatgccaggaacatggcagaacacagccagttccagaagctgcagggaccgacctgaaggccaacgtgaatgtacattatattttgaaaaatacatttgtactttgttattttttttcataggtatagttttatcacagataaaaacacatctttgttaataatacatatctacaatatgggactcaataaccc

SEQ ID NO: 4772 - DNA, 1000 bp, mus musculus
catcattggtttttattgaatacttggtttttttgatgattagtaagtagaaattatttctaaaattttaaattaatatgggttccttttggtaagagattgaattaaacacacttttctacttatttttgctttttaaaaattttaatctttttttttccaatccagattttatccctcgagttggtccaccctctgactgttccacatcccatacctcctcttcccatatccacaaggatatcctcatctcccattcccatcccagcagacctacccactccatggagcctccagtctcttgagagttaggtgcatcttctctgactgaacccagacctggaagtccactgctgtatatgcgttgggggcctcatatcagctggtgtgtgctgcctggttggtggcccaatgtctgagatttcggtggtctaggttaattgagtctgctcatcctcctatagcgtctccctcttcctcagcttcttccagcttttccctaattcaaccgtagaggtcagcagcttctgtcgattggttgggtgtaaatatctgtatatgatactttcaggtgcttgttgggcctttcagattttcctggcatctggtgcccttggttaactttctcattccaactgcttatacataacttataaaaatttcaataaaaattatgtgacctttaataaagcatattttaatttttcctccaataatttaacttttatttgttttatagtgtgaacactagtacaatttggaaagtgataataacagtatgtaatgtcaaatttccaaggattttttataatatttttaattacttctgtattattctccaacaattgagcactctaaaatttcaaggcattaaattcaaatatttgacgaatttgtcatgaacttttctgtattgattaaggtaaattatgattttttccataatttttctgtgaggatataatcctaaactatcaaatcatgaaaaagccctatatca

SEQ ID NO: 4773 - DNA, 1000 bp, mus musculus
catgtgctccagcagggggtggtataactccattttaagcaagaaatgcttgtttctgctcttgcacccactgtccttctatcatccctcagtagggcttggcattttggatgtaaagacttcctttctctgtctttctctgaaactacagtgaaatgatgaaccacgattggatgtagatttttatgttctgaagtacaaattcacatgctagatattgctctcatttataaagtgcctctttctgccatcctaacagaggatgggtaatatttcagtctcagaaaaaattgcagatagatccatcggaagctcatattagtcttgttcattaatccagtcacctctcttgcaaagatcagcatacacttgttcactacaagatacagagctgtcattttgtgggtgggttgggttggtagttgtgtttaactgttcatttgtaacatggagaggcagttctgaattcaaacaaggcagtctgaaaaatctaacttagatgcaattgcaattaggagagtgtagtgtgaagtaatatgggggcaagtttgtgccgattgatgcgctgtctggaggaaatcatcccagttgtagagtctgtgcatttatcatcgctgatgccaagtgtgctggaattcagggaaaggggagaggttggaatgcttaagtagctaggcataaacagtgcacaaaggcagatacactttgggtctctagatgtagcctgtatttgaaattgtgatttagctgatttataatcagcacgcagggtggttagagaggagaactgtggcaaggaagcctgcctgcaggggaacccatattcctcgtcaatgaaacaggacagacggatggcatctttgtaaagaagatctctctgtctcgtgcagtggcatgccatgcagacacccttagtggagtatccgggggaaccagcttttctgtgaacaagcatgtagtatcgctgtgccatgtgctgtaaggaagtcaaagacgcctg

SEQ ID NO: 4774 - DNA, 1000 bp, mus musculus; identical to SEQ ID NO: 4773

SEQ ID NO: 4775 - DNA, 1000 bp, mus musculus
aactttttctcttcatggaacacttagctccagaactacatggcattgtatgcagtcaatctcaaatggaaaggaatgagctttcagaggtatgaacagctatgcatgctctgctgtgaattcacctcacttctcattggtagaaccacttcatatgattagccacaggtgaatcagaattgaggagaaatacattactataatagctcctgattgaaattaatatttcctgttaatgacaaggaatcttgccttacttgaagctgaaaaatgaccaggtcaaataagtgtgaaattggttgtcaaatatgttgtctaacatgttgttttagagggtattttgttaaaaaaaaaataaaaacagtttcttttaaaaattattgtatgttttattgatttacatttcaaatgttattccttttcccagtttcccctccagaaactccctatcccatcccccctcctcctgtttctatgagggtgttcccccacccttcacaggaccaagggactctcctcccatggatgccagataaggccatcctctgctacatatgcagctgaagccatgggtccctcagtttctaaaaccaacatttataaagtacttgctgtgtttatgagctctgagtgtgtgaccttatattattctccaaatatagtttggatgtgtactctgctttacacatgagtaaacaaagattttgaagccaatcaactcaacaactcctgaaggtgcttgctgtccacgctggaattgagccttagatgattggcagaatgttgccctcttggtgctgagttgccaggggaatagatggctgatgctgcaaatgggttttaccttgctgagtttcagtctgaagcaaggaattgtcttctatgtaagtcagccagttctcacttaatcaagctattagcacgaacttattgaaaacatatatccatatgtagctttcaaaaactaataactgaattaaataagaggtataatttgagt

SEQ ID NO: 4776 - DNA, 1000 bp, mus musculus; identical to SEQ ID NO: 4775

SEQ ID NO: 4777 - DNA, 1000 bp, mus musculus
gtcatgtataaatgtgattttatgttgagaaagtaaggtgtcttctgaaatttcaaatatgtttagatatttcaaatatgaactagcttttccactttactttgcctgacttgttacctgtaataacactgaggaaggagtgtgtgtgtgtgcgcgcgcgtgcgcatgcacgcacaaaattctcattaagttgcattgacaaataactttatacactattaaaatgtatacatttacttatttcttttaaatatgtcctggtgtgtatttgctttgtatacttatgatgaaagtgagtggagccctaccagctcttcacctgccattaaatcatttgattatctacctgattatgttgaaggactgtgcatgaaaacaggttcgaatataattcataatataatacaatataatccattctagcccctatttctaaacattatctccaagaaaaatgtacatctgttgtttcctgtcagactctgcaatgggcaaaacaattaccattattccctgtcttagtcagggtttcacttcctgcacaaaacatcataaacacgaagcaagttggagaggaaagtgtttattaagcttacaattccacagtgctgttcatcaccaaaggaaatcaggcagaaacttggaggcaggaactgatgcagaggccatggggcagtgctgcttactggcttgctttctctggcttgctcagtttgctttcttgtggaaccaaggactaccagccaagggatggcatcaccacccacaatgagccctctcacccttgatcactaattgagaaaatgccttacagctggatctcatggaggtatttactcaagggaggctcctttctctgtgataactctagcatgtgtcaaagttggcacacaaaaccagccagtacagttccttcatgaacaaatggagattttgaggtatcaacaaaatgactttatgaaggtcacacagttgtatgtgtgagggccttaattttgtg

SEQ ID NO: 4778 - DNA, 1000 bp, mus musculus; identical to SEQ ID NO: 4777

SEQ ID NO: 4779 - DNA, 1000 bp, mus musculus
tatcatcctgtttagagaatggtaggcatatagctcaatatccatgaagcatgtaatgtcaaattataagtcagatattcacgtggcaaatgattaaaacatggcttggaagtttatatcatgaggctgtgagaattaacagctgaatagattttgtggcttggtagacattaacccactcaacaataatgtttaaattccctaaagagtatgtgatattctttgagatttttttcagctctagaaatatgacaggcccagaagtggtgtttaagggattcttcttaattactgaataaaaaattccaaaactaagtaccaaaaattgtaatacaggaagaagcacacatggattttgcacacaacaccaccatacaatattaaagccttgtagagttactggagaaatgtagcatatagtttctgctatccctccttaagctcagggaatgggcctcgctaccagctcccacccatatttccttggattcatggataaaaagacaacacgggacactctcaagcctcccttgccaccccaggaatcggagagagtggccattggccattccaataaaaaactatcatggttgcttggctgtatatcctatagatattgcctccttctccagctctctccattctcccttcatcctttccagcaactcagtgtcctgccccatcttcagtctttggtcactggtatctttattggtgaatcgagaaccaattgaggaacaggaccttagcatcacaaccaatccctactgagaaacataaaagtgatagcttgaaagttagaataagacattatgtcctgaagtacactaatgatgtttgaaatgctgtgggaaaaaaaaaatgatccaaaatgcatgagtgtcattgcatgcagctttgccaaagtgattgagaaagagactaatagcaaacgggttaaaagtgtcatacacaacgacagggcttgctatccctctaggttaatgtttataagaagctt

SEQ ID NO: 4780 - DNA, 1000 bp, mus musculus; identical to SEQ ID NO: 4779

SEQ ID NO: 4781 - DNA, 1000 bp, mus musculus
tctcataccagcggatggcatgtacttcatttactcctgactagggccctgtcatgtgacctcaggactccatggagaggatcttgacaatcagtcacataggggacttgctccaagcctgtccacatgcggttgaggcatccctaacatctcagactaggtcaatataaagcatctgccatcaaaccccaacccacaccacaatgtatttaagaccctatccaaaagaagtaaaggtgccgggcttgacagcgcacacctttaatcccagcactcgggaggcagaggcagataaatttctgagttcgatgccagcctggtctacagagtgagttccaggacaagaggtgtgtggtgtttcatcaagggtttttctgagagattttgtcatataagggctgtaacacttcttggagaagagagttatcttccaaagcttttttctctgaaagctaccctcgtccactgtggtcactttctgcccagtgcccggtgaccttgaccttgtttcctatcctctgcaactctctagttagcaaggccccccagctggccacacagcctcttgccacttcttgcacaggagcagcatcagtgattgcacttcccctttagcttgctgctccagagtaacagcagccacagaagagaacaacagcctcctccatcagactgccctctccccatctgagaaagcaactctttggctgctccagccagaccagagcttctatgatctctggggatagcatttggtatactgaccagcagattattgttatcaagaatctaaaataataactattctgcaatggttatataaaatcataaagccacagcccacaataaactgtggtaaactctgacctttgcgatcaatttcccaggcatttatttcccaggcatttattttctttctttctttctttcccttccttccttccttccttccttccttccttccttccttccttccttccttccttccttccttccttcc

SEQ ID NO: 4782 - DNA, 1400 bp, mus musculus
attaacgtttaggacaaagattaatgattttaattcaataaaacttagacatgtttcctagataaacttaaagagattgtgatatattgtaacataaggggtattagctttggttctctgttctaatttagttgtatttaaatgcttaccttattgcacccacttaaagaaggcattttaaattatcagaatatttttattagaaaaaaatccagtcctcatgaaattgaaatatttatgtatcaaaataacttacattaaaatatgggaggagatggggtagaagtacagagggtcgggaatttgaaaggatgtgtgtagcagcagttggttcccaggacccaacagggagcacattagctgaaatactcaacaaagatggagcctgtagagaccatatccagaagataggcatgccccctgattaaggggtgaggccacccacccacttcaaaaatattaatcttgaattccttctgtcaaaagtgtggagtagagactgaaggaaagcccatccagagactgccccacctagggacccatcccacctgcagacaccaaactcaggcactattgctgatgtcaagaagggcctgctgacaaaagtctggttatctgtcccctgagagggggtagccccatgacctgccagagcctgaccaatacagatgtggacgctcgcagccaaacatcagggctgcaatgagcacagggattgcaatagagaagttagggcaaggactgaaggagctgaagggttttgcaaccccataggaagaacaacaatatcaaccaaggagacactccaatctccaagggaccaaactcacaaccaatgagtacacatgaggggacccatggctccagctggttatatagtagaggatggccttagcgggcatcactggggagggaagggagccccttggtcctgtggagacttgatgatcaagcatagggggatgctagggtgctgaggcaggtgcaggtgagcaggtaggggagcaccctcatagagggagggggatgagggaggggatagaggatttgtggaggggaaactgggaagggggataacatttgaaatttaaatacataaaataactaatataaatgggtactaaacacatttatgaggaatattgatatctttgtacttaaaagctcctttttgattcagttatttttaattggctaatatttctagtggagtattacataagtattaaaaattcaaacaaatacattgaaattctcagccaatgaacataatgcttcctctgtactttcactgtatagataccgcactgattggaaatttccaatgacatcataggcttggctaaccaatctgctctcaaaacttgattatttataacacccctttttatgttttattc

SEQ ID NO: 4783 - DNA, 1800 bp, mus musculus
atgttgcttggaagtagtagtgaagacttgagaatattgatatttgtctagatcataaaacaacaatttcaatcatcttatttatacctcactttcatctcattttgttgatattatttgtttttacatagatatcttttacttgatttgttaatttgatccctgtatatcccataacttctaaaaactggattactgatttattttcaagtagttgtagaaatgaaataaatatttgcagcaaaactgattcaacaatcaatttactagctaaacttttctttagttaatttctttcagtgtactgtgtgttggatatgttttctaaatttgtcatttaaatcacgaggcaatgccataaaatatcattaagagtaaatagaaagtcggaaaaccatgggcataatttgtgaaatctggccctaattataaatgagtttgaattagacaaatgccaaaagatttgaggttgaggatagcaaagataataaattattattatcattagtattattattattattttatttattcattttacatcttaattgcttcccagttttgactctcttcttttacagtccctctgcacatcccctccctttctcctctaagagagtagaacctcgccaaccctgggtattcccataccctggcacaccaaatacttgcagggctaagaacttcttctactggggccaaacaagacagttaagttaatggaacagattccacaggtagcccccatttccagttttgtggactcacatgaagaccaggctgcacatctgatacatatgtgctggggcataggtccagcctgtgtgttctctttgcttgatggttcagtctctgagagttcccaaaggtccaggtacttgactctgttggtcttccagtggagtgcctactctccccaccacctctacttcagcttccttaatctcgcccccaactcttccataagagtcccaaagctcgatctaatgtctggatctgggtttctgcatctgctgagtcagctgcatggtggagtctttcgaaggacagccattctaggctcctgactgcaagtataactaagtatcattaataatgtcagggattggtgctagcccatgggatgggtctctagttgggccgggtttgcttggccattcccttagtctttgttccaccacctgtccctgcatatttagtaaaaagaataaaggtcaaaagttttgtaggtgggttggtgtacctatttttgattcttgtcatggaaaggtttaatttctgtcatctgtcctagcttcctattttttcaggagtctacattctcttttatatgacaaaaagcagtcaagttctactccatacattctagaagttgacatctttaaaagtgtagaccaattaaaatccatgcctttattagaagattattttggggtttctctgtggagccttgggtgttctggaattcacaaataatgttacagtcatgaaacttggttttcttgtgggacttctaacagtggtacagggggctttctctgactccgttccctgccattggaagcctttactccttctggcttgtctcttctggcttcaataagaaaggagatgtctagtgttactgcaacttgttaggtcatggctgttggatatatatgggaggcttgcagttttatgaagacagatggaagagaagtgggtgtggtaggagaaaacaggaaaagggactgggagaagagtaaggagaggaaatgtggtttggatgtataagtaagtaagtaagtaaataaggaagaa

SEQ ID NO: 4784 - DNA, 1000 bp, mus musculus
taatatttaaaataagtcattatttagaatataatgagatatgccttaattaaaatctatatatgtttataaaatgaatatttaaatcacactattaaatcaaagaagagagaaagacaaagggggcagtaatggagacagagaaattgcaaatagagattttaatttcaagaggaatgatgggacaatacaacaaaattgaaaatccatggaagagctcagctcactgtcttccaaagccaaatgtctccacgaaggcagatatttacatatggtgccacagcatgatgaacttgagggttaaactcactagtagaaataacttcattaaaagtctatattttagaaaatggaagacctttagaccagtaatgttaaatggagaattaaggcaatgacccgaataattagagtaaaacaagccacatgtatatgagaaaaatagaactttgagttttaaatcatcacaaattactgtctacatatatcacattgatagtgtaattactcagcttgcagtttaaatacaatataagattttaaaccaatgtcatttatgtagacagacaggcaccgatttactgattttaggccacgttttctttcttaataccagaatgattattgtatttaatttaacaaattctgatgttgaaagagaatcttttgttttattttggttttatttatttctttatttacatcccaaatgttgccccttcttcctgtcccctccccatccattctgccattctcctctgagagggttttacctctctctgtatataccaaccctgtcccatcaagtctctgcaagattaggctcattctttcctagtgaggccaggcaaggcagccctgtgaggatcgaattccagtcaggctactgttttagggacagcccagctccagttttgtaggacccacatggagactgagatatatgtgtgctgcatatgagccaggagcctcagtacaaccatttatgctctttggttgt

SEQ ID NO: 4785 - DNA, 1200 bp, mus musculus
actgttattttgggaccttaggtctaaaattcaagaataatcccagttactctgatatatattcaccatcacttcaagaaatccaagggcattaaaatacatagactttcaatgtttcttagttatgaattaaagaataattatgtttcattttcatttattttatcttatcatgcattcatattatgagataatatttagatagaagggagagagagagagagagagagagagagagagagagagagagagagagaggagagaggagagaggagagaagaaaaagagagagagagagattaattaaacacagattcctgactgtagttgataaaggagtttgagcccaaaatacagacattaaataacgctggtgttatggtttgtatgtgctaggcccagagcgtggcactattagaagatgtggttctattgaagtagatgtggccttgttggaggaggtgtgtcactgtgggcaagagcttaagaatgtcatcctagctttctggaagtgagtattctgctagcagccttaagatgaagatacagaactctcagctcttcctctatcattcctgactagatgctgccatactcccaccttcatgataatgggcagaacctctgaatctgtaaaccagccccaattaaatgttgtccaaataagagttgttttagtcatggtgactgttcacatcagtaaaaccctaactaagacagtggtcttagtaaaaaatcatctcttttgaaagttctcctttttaaaaaaaaatatgcaagtggtatatatcatccattacaaatctaacttgaaggtattaaagaaaagatttgttttgaattaatgatgcagaaaagaaaagccacatcgattggaacaccaatgagaccagaaatttgaagaaactgaaagcagtctaaactggtaaccactggaatacgatagatcttaaaaagtggtacacaattttgtaatgaccatgtgtctccaggagattatgaaatctacagtgtgatggacctgaaactttaataccgatagaggggaagtcctttgtcttgtcccattatgacttcctctcccacctttcatttagcactggtatagatgcccattatcacaagtcacatcaataaacctttgatcctactttttataaataaataaataaataaataaatgaatgaatgaatgaatga

SEQ ID NO: 4786 - DNA, 1600 bp, mus musculus
tgaaatattttctctataaataggtttggaattaagaggaaaaataatacatattcatacttagaaacttttgttctgaaagacacagataaagaaatgcactgtaaagtggatccatcacaatgtgagttatagtctgtgacaaaagattctaaagttcttatattgaaaagaatgtaacattttcaaggtcaatggacttaaaatgctaaggtacaattcgaaaatactttcagaagaatccacataatgcagcattgtagaaaattatgtaaatgtgtgatttttaggcattatgctggacaaattactaaaaaagttctttgaagtattttgctagggagaaagaagcaagcttttggtttactgcatttcatgcataacctttgcagaatcagagcaatcacaatgtaaaataattcgtcaagtccccagaaaatataatgactttgcataatgatccccataatcatattatcaatttacttaacagaaataaataatagtgattcaaatatcaaatggggtagttatttctgtatacacaatttactttttagctaagtatctttgcaactaaatgacatatgaaagttattgaagaaaaaattttcatgtttctagtcttgacattaactttaagcataaggtatggaaatctatgttgacttgaatgtatggtgagggataccagaagaacatgagacttagaaccaagaggacatggcaacttaatagggttcatagagcctcacaaaggtagtcacagaacctgcatgtgtctgcactgggtcctctgcagacatgctgtggttgcttagcttggggtctctgtgtaactcctaacagtgggagtgggatgtctctgactcttttgcctactctagtgactttccctcctattgagttgcctcatccagccctgttttgaaggtttgtgcctagtcttattgcgtcttgttatgctgtgttcagttgatatcaatgagtggtctgctcttttctaaagaacagtggaggagcagtggatttgtggagggcagaaggtgtaagagaagggaaactgagaggagtggcatacgaggaggctgagttcagggtgtgttgtatgagaaaagaagttatgaaagaaacatattttcaaataaatgtggttttatattggttattttatttatttacatttcaattgttatccccctttccagttttccctccacaaataccctattccctcctccctacccctgtgtctatgagggtgctcccctacctgtcttcccactctctcctcagcattccccctatgctggattgttgggagccgcgcccacattcgccgttacaagatggcgctgacagctgtgttctaagtggtaaacaaataatctgcgcatgtgccgagggtggttctccactccatgtgctctgccttccccgtgacgtcaactcggccgatgggctgcagccaatcagggagtgacacgtcctaggcgaaggataattctccttaatagggacggggtttcgttttctctctctcttgcttcttgcactctggctcctgaagatgtaagcaataaagctttgccgcagaaga

SEQ ID NO: 4787 - DNA, 1400 bp, mus musculus
atgctagaaaaatgataagccaaatcttggggcagtgagtttaactcttgactaaagtcattctacctatcaaacattttcttctcactaggaagtatcgtttcttccccagccacactttccaattgttttcctgcaatgatgtaagcacagaatgcagtaagagcaaagtggcagaaaaatgttcttttctctctgccatttaagccctaatcacagctcccatgacagatgacattttccacagctgactctacacatcaagagaaattgtagagaaatatgaacttaaatatggaaatatatgaagaaatattaggagagatgtcttatttactagtgggatactaaaacttaaatactgtttctgtgtgaatttaaaaaacagaaacaataagacatttagctcagatattttcaagtataacaaaaatgatgtaagataaacttaaaaatattttaatctcaaaattatcacaagtacagagtattaccataactagagcatagagaaagaatatccacaaaactatatttatattaattaaagtgtagcttccctcagccctgaagcggctgatccagactttgaccttgctgccactgagaaggaaattacctaaggtggagcctaggtggctcttttgttctgccacctgccactgctctctccaagacactgctacctgctgagaagcacctgaggcattcaggaggaacatcttattctgcacatcctacaggctggctccagacaccaagaatggactggcgggggatgggccttcccttttataagtagactctgttagtaaactggagggccttgagcagaatcatgtcttggctccattaatctctctccatctaagtctcttttagccacagcctgcctccctggtgtacctggttcaagtatgccacaggccagcatacaacattaaagattataaaaactttaaatatcatacagttatataagtgaatacataaacataaggtatacttaagttttatatattattcctatatgaagattcaagccaaaccactaagtaacaatttgccttaatcttctacgtattaattttatttatatttttgtgaattcaaattattattccataggatagtttctctatgaggtttattaattcaaaattcattactagtttttctatgtaaaaatcactctttaaatagcccatttattatagtttatagagaaccatatgcattaaggtcaatggtgagatggcatcaataacacagatatgagagtaagaatatgtacctgagaaggctttttatatgtcattaagaaatataagtaacagtttctaaaaatagacagctaaataagaaatgtggggaatacaacaaaggaaaattaataacag

SEQ ID NO: 4788 - DNA, 1200 bp, mus musculus
gcttggaaaacctacccctttgttgtaatttagtatttctaccaaaatataaggaaagtcctttgatttgcaggtttttaaatatttgaatggaaacattaagtaagtagcttacagcacaaagtcaggaaggatcttcagccccaggtactgctaggattctgagttttttggatgactttgctactaatctatttcaaaagtttttatcaattagtcaaaggattttagctcagaattggaaatgtctgtttaggatgtgtcctacatagacaagacatatctgaatggaaagctaagagttctttggaaagtcagttgtgttgcatggtgttttgctagggcaaacatgtgaagtagtgctttccagaagtgacacaggtgaaagactaaggcagacacgtgaaggaatgtttcactgaagcagaaaccgggaagaggaagttctctaaagcaagcttgggaaaggatacatgagggaaggattcttcactcaccccaggcatgcaatgatcaatcttacattgcatagctgaactctatatgccaggactccatagagagaaacacaccaaaaaacttcaggcggtgtgccacttcctcagacttgcgctgattggcagagtgaagacagacttatatgctgaagcaagagccatggaggacacatggtgtttggagggagtataaatgggacttgatgagccctggaggaagttgagtttggcttgcttataaaggtagctatgcaaagcttgttggtctctcatctttgcttacctttgcttccctgaaggaggcacagccaagaactccccccttccccaccccgaagtttctcccaggtccttccttctgactcatgctaaaactgaggcctggctatatctggtacatcatgctactgctgctcatttgtgtttgctgttctgactttaccaagctgaacttctggggtatctgtgaagcgttcgctagtggatctagctgttgatgctaacctgtgagctgatctgctgaattccagacaacacagacaggattcgctcccaagaaccatccaaagtaggtccacttcccagtgttctttcttttctacacttctgatgggcggtgggctacaagagattataaagcatttaagagccatcattaaaaataagcattgaaagaattaacattacacatatctatttaggg

SEQ ID NO: 4789 - DNA, 1000 bp, mus musculus
caattctttaaggtcttctacctgtttagcagtgttctcctgtatttctttaagtgagttattaaagtccttcttgatgtccttcaccagcattatgagatatgattttaaatccaaattttgcttttcaggtgtgttggggcatccaggactggctgaggtgggagtgctgggttctgatgatggtcagtggtcttggtttctgttagtaaattcttacgtttgcctttcgccatctggtaatctctggagttatttgttatagttgtctctggttggagcttgttgcttaagtgattctgttagcctctgtcagcagacctgggagtctagatctctcctgagtctcagtggtcagagtactctctgcaggcaagatctcctcttacagggaaggtgcacagatatctggcatttggacctgtctcctggctgaagatgaaggcctgaaacagggcctgtcctagaaaagatattgcctctgtagttgcatgctcacctgcacagactggtctcccgggtacatggaacacaaggtggctctctcaactgctctactggtcagagctctcctgggcagacacctctcctctggcagcaaagatatcaggatatctggagcccaaaatgggggtctgtcccagtagctgtgtcatttttacatgtcccagaatctgtgttgcttctgtagtctacactctcacgtgagcacactagtctctgagggatctggaacccaaaatggctccctcacctgatctgaaagagccctccagagtggacacctcccctctggaggggaaggtgcccggaagtctggagcccgaaactgggtctgtcccagaagctgtgttgcttgcttctgcctgtcccagaagctgtctcttctgcagtctgctcactcaccttttgcagtctgtgagctgacttgtgcagactggtctctgagggacctgggacccaagaaggctccctcacctctaagtggtgaatactaatg

SEQ ID NO: 4790 - DNA, 1400 bp, mus musculus
tgtaggcaaatgaattgactacaaaatatcatcttgagttagggaaccaagaccgaaaaggacatgcatagtatgtactcacttataaatggataatcacgacacaaattcctcagtttgagtggaagatggttgtctaagatagcaagcactgaggagttggtggactagagaaaggcattctattgcaacaatttcagtggttacaaaatggagtaactatttcaatgccataatctaagggataacagcaaacacagaggagccaaatatccagtaaaggtgcaaagaagaatggttgaatcctcctcagaaggggaaataaaaggtggatggagggagggaagtggatgggagaggggaagagaagggtcaggggcttggggcaatcaagtaagagtagagtagggaagaaaaaacggaaatcagcagtgggctggatgatggtaggggtatttctcagacacacaagagaactgagacaggggtagaagcctggggtagagggtgctatgggagcaactctagctgagattcctagaagtaggggatatggattctgatctggccacttccagagtagggatatggagagcatccaacccacaaaacttttgacctgaaatgtgtcttgcttgtaggatgtgtagcgacaaaatagagcagagacagagggaatggccaaccgatgactggacaaaactgaaatctactctcctggcaagaaccaactcaggtcactattaatggtactctgttgtgcttgcagataggatcctggcataaatgagaggctccacccagcagtcaatagaaatagatacaaagacatgagatggagttcagggagtcttgtggaagagttagtggaagaaccaagggacccgtttccctttaactttcctgtcttgatgaatggggggcccatattgccagaagctaccagcttttgtcccacagccaactctatgtccactttaagcctgatgtcaaagctggtctttggcacatctatgtcctttaccatggttttcgttgaattttcattaatctaatttcacagtttatgagtttccccacatttcaagatataatttcctccatcatctaatttaaatatttttcctacctttgttggaattgctaatgttaattttagaaaataaatctaagtataacatttctattttctttctttcttactctttgcctatgcaccattcttctggggtcagagcttattgcttctttcaattggatcttgctgatagcagcaggcaattaggaaaataaatgtaattacgtgggccagtaatcaatgtaacaggtaagaaactctgtactccataatctcttggggggagtgcatcaagaaaggaaaagaaagagaaaatcacaca

SEQ ID NO: 4791 - DNA, 1200 bp, mus musculus
tcaaaatttactttgcatcaatgtttgtataccattttcaactgcacattttcaaacatctgttcccattatgctttctcttttcacttttttttttctgcagctgttctatcattgactctgataccagaagtttattttccttgattcttctcaaatttggtttttagtttccaaaggaaatccttcataaaagtttagattaagccaatcaatttcttattatttcagttctgtatttatgtggtggcttataatttgctgcaaagagaagtgaacagtgttgatcagagcacacaaggaaacaaaagccacagatggatcttcagggagatgggtttaggcagacacctggccaccgcagcttcagagaagaccacaggaagcagaaatagaggactgggtgccttgaagaagcacaaaagcccgagggaattttctgctttctcctaatgccatgaccaacacatgtttttcagcatccatttctgtgttttttaatacttacttgagacacaagtaataaatgtcaattttaaaccaaaaggaaggaaggagaccaatcaaactagcagcataatagtctttaacagctgtatacttccattatatctactactaatatatattttgattttattcaatttttatccatttcaaatgaataaatttcaagtgaaaagaacattcagccctttgaacatattttcaactttccattattagcatgtacatcgatgaagaataggtgtggatgatgatgtcgtttagcaggttaaagagatttaaagcgatttttggagtattataactaagatttccagtttaaaggcattttgaggaatctaaacaagtaatattatcattaaaatgctgttgaaagtaggcatatttgaaggcataggtgatttctaattgcccagtatcacaaccatattaattcctgaaacaagaacaagagcaaactaatgagtgctgtagcattgactgaacatagatttttcctcttaaatagaaaaaaaacaatataaatgttagatttctagatatttttccagtttagtacaatttcaagagttcttttcaacagtagggaaatcataaatgtttatttgtctgagaagtagttttgactcttagataatcatttcttttcaaatggagacacaaagttcagatattttatagatgtgtttcctg

SEQ ID NO: 4792 - DNA, 1000 bp, mus musculus
aacttacaggtagtctctatatagtaaaggaatttattgatgatttacagtctgcagtgcaactcccaacaatggtcagtagcagctgtggatggaagttcagggatctagcagttgctcagttccacacggcatcaggcaatggagagagagagagagagagagagagagagagagagagagagagagagagagagagagagagacttcgttcatccaatgtccttatgtgggtctccaacagaaggtgttgcccagattagaggtgtgtgccaccacacctttaatatcagatgatcttgaactcagagatctccctgtctgtcttaatcttctggaattcatagccactatgcctcaagatcaccataccaagataaatgtcagaaacttctatctcccagactctagattaggatcactggtatacctttcaattctgtattgtagttcgttccagatatagtcaagttggcaaccaggaatagccactacacccatcatactaataaattttaaaatttattttgtttagaatttgagattattttttgatcacagtacaattacatcattttgcacttcatttttctctactcatacattctcatataactctttttgctctccttaaaaattcatgggctaatatccacttatcagtgagtacatatcatttgagttcttttgtgattgaaacttagtatacccgagatataagatacaatttgcaaaacacatgaaactgaagaagaacaaagaccaaagtgtggacacttttccccttcttagaattggaaacaatcacccatggaaggagttacagagacaaagtttggagctgagacaaaagattggaccatctagagactgccatatccagggatccatcccataattagcctccaaacgatgacaacattgcatacactagcaagcgttggctgaaaggaccctgatatagctgtctcttgtgagactaggtcggggcttggtaaac

SEQ ID NO: 4793 - DNA, 1200 bp, mus musculus
caggggagtgggggtgggtggatatgggggacttttggtatagcattggaaatgtaaatgagctaaatacctaataaaaaatggaaaaaaaaagagatcatgaaattgattggtagtgaagatatacatttcaggggttgaacagagatatgttaaatttaggtgaagaaaataaccaaaaccacaaaaaattagttttcttaagatggaggtgggaggttgtgggattctctagaaagtaccagagacttaggaggtgaagcactctcaggactcaaaaatagggaccttagatcaagttcccaacagtggagagagggaactcatagagtctgtccccagtagaaagacaggacatcatgtgccgtgatggggttgccatcccatagccaaaaactctgacccagaattcctcctgactaaaagaactgcagggacaaaaatggagaagagactgaaggaaaagtagtccaatgacctgtccaacttgggatccatctcatggggctgggcaccaaggcctgacactactatgctatgctgtgcttacagatggaagctttgcatggctgtcctctgagaggcctctaccagcagctgattgagacagaagtagacacttagacccaatcattgaactgaagttggagatccttgtggttgaatttgggtaaggattgaagaagctgaggaggagagtgaccccataggaagaccagtagtgtcaactaatctggacccctgacatctcacagacagtaagacaccaaccaggcagtatgcacaagttggtctaaagcccctgacatgtatatggtagaggactgactacctggtctggcctcagtgggagaagatgtgcctaaacctggagagacttgaaactccagggagtgggcagaactagaaaggaggtgttggggacatcctcttgaagacaggtgaaatgaggaattaaatgagaaactgtgggagggggactgggagggggaaaccaacagttagactgtaaagaaataaaagtaagaataaaaaatagcttaaaattaagtagcagatatttagttatattttcatagccttacaaaaaaataaatatttgatatatttaactattcacacttaatcatatttcttttatagggtctaatttatgctaccattttaaagctaaatgtttgacctgctcataaagatttg

SEQ ID NO: 4794 - DNA, 1000 bp, mus musculus
ggacaggggaaacgtcaaccttttgtggatgaatactccttctagtgcactatttactgaaggttctccaaagcatgtgtacaaggcaacctataaatcagatgaccgagaacctcttgatttgtttctctgagatctactcatttgcagattatggtcccctaaataattcccagacaataataccaggttgttgtggatagcccttggggctaattatatttgatgctaattctgttctcctgtgagtggttgtgaacaaggaatgggtcaacactcagatgattccctgtaaacctgcttcccaacttaattggtaaaataacggagagctgatgattgggtagataaaagggaaggtggagcagaaggtgggagagagaaggagaaaatggaagagggagaggacacggaggaggaggaagaagaagaaaagcagggctgaagcacatggcctggagaaaccacaagttctaaggggtctcatagatgtggaagatggtagtatagtggtagatctgcccagtctaggtgcacaacatgtaatcatattaactgagtcgtgttttcattgctgggtcatagttgggaggagatttcatgcaacaccaggtgacatgacaatctagaagacagatatctcacaagtccctactacataataaagatgacaatattttctcatattcaatatttgtaaaagaattctgagatataaactgagtgtgaaaatgttatgttaacaaacttaagtaaaccataatgagagatacagtatcctcctcactgaagaaaagaatcaggcgtttttagaatacgttgctactgttcattgtttggcctctattaaattcaacatatttatttttactgattaattcaaacattacaataataatgtacataattggactaagtgagaatatttactatagttcaattttaaatagagatataattcaaatgacttataaaggaacagtcaaatgttgaggtactg

SEQ ID NO: 4795 - DNA, 1200 bp, mus musculus
taattataatttagaccggataggtgccatagaagataatttttaaaaaatgatctttaatctttttttttttttacagtctagtcattacgcccctccttgtctgccctctgatggttgcacattccattcctcctcccctgtgtccaagcggaagtgcccaatcccttctacccagcccaccccaccaggcctccagacttcctgggccctaaagtctcttcagggttaggtgtgtcttctcccactgaggctggaccaggtcgtcctctgctgtatatgtgtcagaggcctcagaccagctgctgtatgctgcctggttggtgactcagtgtctgagagatctcagggatccagattagttgagactgctggtcttcatcgggggtcaccctgcttctcagctgcttctagcctttctataattcaaccacagggttggttataagtacctgcatctgtctcaatcagctgcttgttgggcctctctgaggacagtcatgctaggctcctgtctgtaagtacaccatagcatcagtaatagtgtcgggccttgagtacactccttgagctggattccaatttggacctctaactggacctcctttccctcagtctcttcttcatttttttggccctgcagttatttcagacaggaacaattctgggtcagagtttttgactgtgggatggcaatcccatccctctacttgatgctcttgatgtccacctccagatgaactctacaagttccctctccccactgtttgacatttcatccaaggttcctccctttgaggtcgaagagtctctcgcctccgagatctctggtacattctagagggtcccctgccccctgactttccaccacctctggaggttgcctgtttccattcactctgctggccctcagggctttgctcctatttttcccacccaatacctgatcatgccccccttttttcctcgtctaaatctcattatacatttgacatgtatgttagaaaactctctaatgtactagtgaataaattaattttaatctaaagccagcatatctgtgtttctacatgaaatgcatgtggcaaatatctgaattttacttataaattttcatatttatcatgaaggcaaataaaacctcttgaaaataatacatacccacgtaaatatatgtacatatagttgccgtatgtatat

SEQ ID NO: 4796 - DNA, 1200 bp, mus musculus
tgaccaggaaatctactgtgagcttatgtctcctagaaatcgtagaagagcttcattcgcaatactgaaacagaatttttaaatgaagaagcacacatggataaaagtgtttaaaacaatgatcaacatccttacctattagggagatatcaattgaaaacatgtcaatacacaccatactccagcctaaattactaagatatatatatatatatatatatatatatatatatatatatatatatatatatatatgtaaatgaatgtaatgtggacgtgatgttcatctagtgtcaactctagccaagaaattattggcaatggatttttcttaggggaaggttggggagggagaatttattttctgcaaaagtgtaatcccataaagatattaattctacttccaactggtttttgctgctggggcagaactactagttgttctactccagtgaaggctccatatccaatctatcctagaggacccactgcactcagaacagttggaaccactgcactcagagcagttgagcagttgatgaccctctgcactcagagcagctgaaggtcagctgcactcagggcagttagacaatagcttgactgctccactgaagacccaacagtctgaaggcctcccaggagatctactgcaaccacagcaatagatcagcagcttacctgcccctgcaaagagcccccagttggaaggtctcacaggtggtctgatacagccagggctgcaagcctaccaggagatctgaagcaaccaggaacaaaagaggcagattccatacagtcacccaaaccagcaaacaccagggttatgcagatggcaaaaggcaagggcaagaccataagcaacagaagccaaaatacatgggaattatcagaacccagttttccaaccacattaagccctgaatacaccaacacacctgaaaaatcaagaatctgtcctataatcctatctcatggagataatggagtcctttaaggaggatatcaataactcactgaaagaaatataggaaaatacagataaaaaggtgaaggaattgaatgaagctatccaagacctaaaagtggaagaagaaacaatgaagaaaacacaaatggaggtaaacctggaaatggaaaacctaggaaagaggtcaagaattacagatgtaagtattaccaacagaatacaagatctag

SEQ ID NO: 4797 - DNA, 1800 bp, mus musculus
atcctgagtgaggtaacacattcacaaaggaagtcacacaatatgtactcactgataagtggatattagcccaaaacctaggatacccaagatataagatacaatttgctaaacacatgaaactcaagaaaaatgaagactgaagtgtggacactatgcccctccttagaagtgggaacaaaacacccatggaaggagttacagagacaaagtttggagctgagatgaaaggatggaccatgtagagactgccatatccagggatccaccccataatcagcatccaaacgctgacaccattgcatatactagcaagattttattgaaaggacccagatgtagctgtctcttgtgagactatgcccgggcctagcaaacacagaagtggatgctcacagtcagctaatggatggatcacagggctcccaatggaggagctagagaaagtacccaaggagctaaagggatctgcaaccctataggtggaacaacattatgaactaaccagtaccccggagctcttgactctagctgcatatgtatcaaaagatggcctaatcggccatcactggaaagagaggctcattggacacgcaaactttatatgccccagtacaggggaacgccagggccaaaaagggagagtgggtgggtaggggagtgggggtgggtgggtatgggggacttttagtatagcattggaaatgtaaatgagctaaatacctaataaaaatggaaaaaaaaaaaaaagaaaaccacatgtgctctgctatagtgcaaacttctgcttattccacaccaggaagtctttattggctaaaccccatgaaaagctatcatcaactcccattgtctctgcttttacaacagcattgaggacagagaaacacatccgcttgtcttcagatataatgatgtggggattcaaagatccttgctttcctcccacagttggaatatggagaaatgcagccttactgctggtactacttgagattctcgcttcagtctgccctaaggattaacagattctgcaggcaagacagaatgaaatgcaaaattgcataggaaacttgatgtttctctatgagacatttaaatctatcttatttagtatctggattagtgtgcagcaaaactgtatatttccactctcatttcaagacgttgcttgtaaactgttttgccagcggtaagatggaggagattcattgggtttttattattttcctataatttatattatctttctgatctttcaaatgacagtcttgatcctggtttacattcttctttacagataattaagtttccttcagagaaaaagaggaagttctaactcttacatgtcaatgtaattgattccccaagatattcatttgaaaaacaaaacatgaatcattcatgctactaaattcacagctcttgtatggaattttaatagctattgttcatgtgaacctgaaatcttaaatactctgtctaaaatgttctccagtcattttcttcttgcttaaataatgcaggcagcactgaaatgattcatcaaggggtatttgtatatttgttcagttgtgtgtgtgtgtttgtaataacaattgttaaagaagagaaggctatgaatttaggagggagggatgtgagggaacatgagaaatgtagaaaggagaaaagggagaaagatatgatgtaaaaattatatttaattaaataattttgttgcttcaagattttttagggaacagaaaaatagagttaattttgaaacctgctatagttttatttgttgcaaagagaaca

SEQ ID NO: 4798 - DNA, 1000 bp, mus musculus
gtactcactaataagtgtatattagcaaaaaaaaaaaaaaaaaaaaaaaaaaaaaggaaataaagacagaaaaaagaaaaagaaagaagaaaagaaagaaaagtagggaatacacaagatatagttcatagaacttaaaaaaaaggtcaacaagctgaagtctccatgtgaggaagcctcagtcccacttgggagagagaagaaagcaatcacaagtggggagggagagaggggactgggaaggaaagtggacagatgggtcaaggaaaggggaacctggtggtattgggttagggaaaaggactgcacccctggtggccagcaaaaagaatgcaaacaggcaacttcaggaggtaggagattgaggggaccttccagaatgcaccagagacctaggaggtgagagactctcaggactcaaagttagggaccttaggtgaaatacctgacagtagggagagggaacttatagatcccacatccagcaggaagtcatggcatccagtgagggagggggtgaccatcccacagtcacatttctgacccatagttgttcctgtctgaaagaactgcagggatgtaaatggagaggagcctgtggaaaagaagatccagcgacaggccctgagtcaaatccagctcaaagggaggttccaaggcctgacactattactgacgctatggaatgctcacaaaaagggacctgtcataacaatgacagcactctgtaatactcaacaagcagctgaaagagtcaggtgcagatttttgcacccaatcaatggacagaacctgctgaccccagtggttgaattagggaaaggctggaagaacctaaagaggagggagaccctgtaggcagaccagcaatctcaattaacctggaccccagagatctctcaaacactgaaccaccaaccaggcaacatataccagctggtatgaggcacccaacacatatatagcagaggactgctgggtctgggttcagtcagagaag

SEQ ID NO: 4799 - DNA, 1200 bp, mus musculus
tctgggatcttatacggatgctagtttacattttttttctcattgtctttcagtaggcttgactgcagtgtgactgttctatgctttccacgaccttggctctcctaataaggattggtagtctagtttgaagttataccttctgctggaatttgtctgctcttttaccatctgtggagtagggaaggagggccaggcagtcaaggttccttttctaccacactaatgacttgctgccctgaactacaatgaccctcacccctttcctccccactttctccccccttgggaaacttgaccttgaacttgacttgaactttgcccgcattcagtgcagatgatggtcatccctggttctagaaccatcctttgctctgagaactcttgcgtgtttagttgcacagggagctcttgggacgccgctgtttcaggccctctcagctgacctagctaggaagcccatgtgtgcatattataagccttgtacggactgagttttaatccgccattaaataaaatggatgttctgccttaacatcgaatgttccggaatttgctcggtatactaaataattcactttaatccattctcttttgcattgttaaatgaaaatagtacgttataatgacattccgttctccaaattagtaacaattaatcatcggatttctacaaagtaaagcaaaccgagtttgatccccataacccatgtggctgaaggggagatgctatgcatgtcatctcagaatgctcccctacttcagtaagtaactatataagctgaaaatgaaactatctgattttaatcatagttcacaataaatgctagtctctaaatctcccttcaactctctctaaatatgcatcataaagaagaatgcagagagcaagttgtactcaaggagcagcagggctttgtagctgagttttagaagtactgaggttttattttgtttctattattttggtcaatgtctcttctaccatgttctagattcatgagtttgataagacattgatagtcatgatgcaataagaacccgctgccagtcaaattggggttgattcaggtttaaagagaagaaaagtggttttgtgattttatttttctgaaagatttcaatgtatctttaatgttcagatttatatatttgtaatatgcaagttgacttcatgattccttaagcaagggcaattgc

SEQ ID NO: 4800 - DNA, 1000 bp, mus musculus
acattcatgagtattcaataaactctctatagaatgaaactcgatccagattttcctggtaaagcctcatgatctgaccttggatcctaacgtatgagcacagttatctcagctatgcagtgttgttggccagtaaactgtggcaccctgatgttttctgaagcacagtagagacttgtgtgacatcataatgcctgtgggatttgtcaccaatatccaggtgtataaaaggtccttggcaggtggtttcatccagactccagaaacctactgcttttcttcctctgaacactccactcctgacaccatgtgttactatggcagctactgcggaggcctgggctatggctatggtggcctaggctgtggctatggctgtggctatggctgtggctatggctgtggctatggtggctatggatatggctgtttccgcccactgtgctgtggaagatactggtcttatggcttctactgaggaccttatgtagagacccagcctttctaaccagaagggcttccaagtgattttacaccaggaactcaacaatgtcttcaaattttctaacttcagcacaaaacatcatgttttatgttatctttatcatactatgtaaatgatatcaagtttgactctcaatatttattaaaaaaaagaaaaaaaaaaaacaaaggaaggaagcaaggaaaaaaacagaaaccaaacacctgtgtagcacatataactaaataaagtttacaaaataatttctgtatgttctgtgcttttgtatctgattggtcccatgtgtggaggtagttgtgggaatgtgtgagggaagtaaatgtgtgagggaagagacagacatggacaaggaaaatgggaggggaggaaaggaggggagaggaagttagagtgagaaagaagtaagtcttaccagtgttcaaacacaggtgatcattttcttatatttataaattgactattatgattattttaataataggcttggtagggtaa

SEQ ID NO: 4801 - DNA, 1000 bp, mus musculus
gaatgttgcttagtagcttcctcctcatggcttgctcagcctgctttcttatagagcccaggaccatctgcccagggaaggcatcactcacaacagtctggaccttcccccattcaatcattaattaagaaaataccctatgggctgcctacagcctgatctgatggaggcgttttcttatcgaaggtcctctccaatgactttagcttgtgtcagttgacaaaactaaccagcacgcacctcgatgaatgtaacccagataatccctcacacgcatgtaaaaaaggctggtttcctagttggttcttgatcctaacaagttggcagcattagcaacaataaatatatttctttctcttgaaatatgctgtgcctcagggccagtgagatggctcgctgccaagcctagggacctgaatccaatctccagaaactccatttccaaaggaaacaactgattcacaagagttgtcctctagtgctgtgatgcgcacactcctacacacacacacacacacacacacattaaataaatgtaactttttaaaattaagtgttagtcaagtcattttttttcctttgctatttgtggtgatttgaatgaaaatagccttcttaggctgctagctagtggcactcttaggagccttgttggagtgggtgtggtcttgttgaaggaaatgtgtcactccggggtgggctttgaagtttcagaagcttaatccagacccagtggctcctgcttttagaatctgtccactaaattcacagctggagaaaatgtttccacgtcaaagtcaaagaactgagttcccctcaagttctcctacttcaaagtccctgttgtgcagccattccgaggccattactgtgtgcacactcaattagttttaagcatctgacctccggtgacaccggactcctgctccaacaatgttttctgctggccgagcatttctgagagtcccttgtcagaacttctgtcattttgactttcagc

SEQ ID NO: 4802 - DNA, 1200 bp, mus musculus
gggattctatggctaacggggtgcacgggttccatcttctcttggtaccctcagcagaaggattccaagatggcctcagaactacacccactgacagagtggagtcatatttgtgaacagctgtatttaaatcatcggtgagtagcctgcaatacctaaagcaacatagatgctatgaaaacggctgaccacgtgacactgcttagggagcggtgacagggacgaaggggacgctttttcttaacaccccatcacctggcagattttcagtgtgcagttggtagaatccacagatgtacagcctatggatatggagggcccagaacacagttatctaggctgaggagagactctgaggatacaaagatggagcacagggctcaaaagcagccggaatgcatgctaagctcttggaaggccaaaagagacaggcgagacatagcacaggggagagctgacagaagaggctggatcgaaattcaacttctgcagactctccaggaagtgacacattcggggaaaagccacttctgaggatgctacaggttcaggcacgcctctgagcgctgataaccaaagctctgcttccttcaggccccagcgctccccagaggatgaaaagcaaccactctagttagaactttacagtaaccctttggatacaggctcagagtcacacacccaacttcgtgaagtaaaacccacttcccgggaatccttcagaaggaaacaaatcctttatgcacaacccctctgaaaacatgtctctcaaaagggaaactgagataaacaagggccactggggtagggggtgggagatgggagttggcaggtctgtagatcctaacactaggggctgatgcagaaagagttaagagttcaagtccagcctgagccacatcgggagttccaagacagccttggctacagatcaaggtcctgtctcaaaaactaaaaagcaaaacaaaatggcaaaaacaaacatccccagctccagtcttacctttcttggaagctaacccggtttccttgacactgttcacgtagagccttcgaatgccatcttcatccacagaagaaagcaaaaaccctacagaacacaagacagaagccagggctcagagctcagaaggtttagctgacagcaggaagtacctggtgtgtacactttggatttttttttcctgttgttcagattgt

SEQ ID NO: 4803 - DNA, 1200 bp, mus musculus; identical to SEQ ID NO: 4802

SEQ ID NO: 4804 - DNA, 1000 bp, mus musculus
gctcagagctctccttctctacatcctggtttctcccaagacagagttaatgttgcctagcttgcctcaaggaagcagggcagagcgatgaaagcaagagttctctttttgattatgaatcaaacacccattggctgagttacctcggccacattagtttaactaccatgtgctacagttccttatcagcaaaatgggcatgctgggtaattactccatacaaagcctggtctataataatcaccactcagatgttgggtggctattatctcttaagattctcctctgcagtaagattcactcctgagtctacaagttcaagtatgaagggaagaaccttaattacagagaatgcagccagctcctacctgcacagactggaaatgactagcagggcttatttaactttaaagatactatccgtgctgcccttgactccacggtcccaccagaagactgcagtctcttccaggttgtgtgcaaacctgctggggctgatgctggctatggcccatggaccaggactgtgcttatattatccacagactgtaagtggaacttgtacaagaaagtggagtcctctctgtctcctggaactttaatccccaaagttcagcagggaggatttggaggtgtgtgtccttgggttcagcaaggtgcttgagctgtcatccatcctcacgtacaaactgtgctcaagtttcagttggtgcacatctcatttcatctccatcttggtgttgtagtcatttgtttggggtcacaaccataccaaaaggaaaaatgaggctaaaagatatcctcggtgtccatcaccccctggcagccaggtcttgtttcctgtgcaccctcctgaatgcttcagtgatgatgctgtgccccttcctactggagagtgagattcagttctgcacggggcaatgtagcctttcccctgactttcctaggttgagatctgcctccacctccaacatagctggagccattttgttccaggcct

SEQ ID NO: 4805 - DNA, 1000 bp, mus musculus
ttgggcctggttaaaatttccaagaaggcttaaccatctactgccaatggattcttagctcagaggagatgagagagtagcctcccgccaggacaggcctctgcttgcatctggccggctgctttaatgtcaggtggctttgtctgttgcctgcagcccctgcctttggcagtgtccagtgctcacataggccagttcagacttgagaagtctgactgctcctgaaagaaagggtgttggcaccacagccatgcctacttcctgttatttgcaggtgacggagtccctattcagcttgcttcaaccctctcggctggagcagagagcccaagagtcagcttgaaggagctgtgacttgtgactgtgctagattccacttctgggatgatgtagtccctcttggccccagaggcacacagatatgttcaagatccaaggacaaacctcacagctctctgaggatgtccataaagtcttttcaggatagtgacgtgatgtttgtgacgtccataggtacatgactcgtcagcagagacttgaactaaaattacttgtgctcatcagcaatttgtgaagatctagagcatttgctggtgaaaatagaacagaggtgtgcattcagcatccatccctggctcttctgcttaatcacccttcaaagaagcctggcctcgggtgtgaaaggatgccagtcctttaggggtacacatcagagatctcagaaagcaccctaactcagtacctccagtccagttcgtaaaacccaccccttcgtccttgaacaatagatgctcttgtttaaaacccaaatggtgagttgagaagatgactcagtgagtaagagggcttgctgttcaaacagaaggacctgagttcaaatccccgtccggcacctgcattaaaaagtctcacatagttgtgtatggcctgtaaccccattgtggagggcagagataggatttgctgggttttgttgatctccaagttcagagaagagacc

SEQ ID NO: 4806 - DNA, 1200 bp, mus musculus
gcactgcctgtcattgcttcttattacatttggcatccaaaattctacagggtagcattcaatttggcccagtaaaacagttgtgttcttagtggatggggtaaaatctaagcatacttctatatactaacagtaatcacttagaggcaaaaatacaaatttattaattccctcactagaaaacactgccaacttcacttttaactgggaacatttctatgggtttatctttcttttttttttaagtttatttttatatgtttgagtgctgtacctgaatacatacatgtctgtgccctgtgtgcatgcctggtgcctgtggaaaacagaagagggtgttggatgcactgtacctgtagttacacatggttgtgagctgtcacgtgggtgctgagaactgagaccaggtcctctggaagaacagccaatgctctgagccccagagcccctcgcctgcctctagcccaatgcctgtcttttagctcctcatttcccacttggaaactcagagccatcagccctcaacagcagaaaccaccacagtgaaaaacaatcagatggaagggctatcgctgaagatttaatctgttaaagttgcactttccacatctggaaaacatggacaaagcataactggaaaggaataaagcatgtgactgcctatgacctgaaggaaatgcatgaagaggtgcctcagggcactgcagccaactgggaggtgcaaggatattttaaattgaagaaaacacctagggtttcaacatatactggatcccaggtaaactattagcctgaagtggttcagagctcatgactgcagggagtccattctgcgatccctgtctatgtgaagctaggtatctagcagtccctgtggtaaaaggcaactcctaatcaattcagcagaccaggagatgaggacggcagcactccagctgcttccaaggtgtgacagctgcctggaactcaccaagtgtgcacagaccactaataaacaactgcggttatttatgaagaagataaattagtctctacttgtttgtgttactttgtttgaacaacagctaaagttattgggatttaaatatttattgtttagctctaacatcagcaattagggctgaggcaggaggactaatgtgagcttgatactaaattccaagctaactagggctagagtgagacccttttgctaaaaca

SEQ ID NO: 4807 - DNA, 1200 bp, mus musculus; identical to SEQ ID NO: 4806

SEQ ID NO: 4808 - DNA, 1200 bp, mus musculus
attgatattcacaagcaaagttcatgggcgtttctgtgggaggcctgaccttcgctctctctacatgtctctctctattcttcctctcatctcctctcctctcaccaccttctctcctttatccttcattctctttctcacctcgctccctcccatcgttcctttaatccacccagagagctcaatcctcgtgctaggcactgtgccaggtctggaaaacctggctctccctatacagaaacttacaccggggtgtgtatgtcccaggaatgctaggatgtttgtgaagctacaccgctgccttcctgtagcatcctcagctctaacgattcctggaagctgaaactgttgagtagattaggagaaaaagaacagcttccccagctgctcccgccggtccctcacgactgctcctggcttctaagccacagggaccacttgcttgtgctcactcagtcttgtgactcacactggagtcaccgctgaccctgacctatatggaggatggtcatttatttaccctttgaaacttgatcaggtggcccattaattttgcaacattaattctaagaggaaattagattccaaccagagtcatttgtcttttgaaaatagagccaccagaagagaacatcgataatcacaatgtaattttctgagttaggaagtggccagagcttggtgtcgaggcttctgcacatctaagggtttcatggcattttcttaaatgaaagaatttgttttgagacttgagggggaaaaccacttcaaagggccatttctccctaagatgtagctgagagcttcgtgtgcaaatgaaaaagtcatctacacatcgttggggattatacttctgcagtacacttgttatctccccgagtctacagaggctgggagatggcttggctggtgaaatagtcacagtacaagagcaatgagaggagtttcatttccagaacccacaggtaaaaagacaggcatggtagcacatccttgtaaccccagcacggagggagtcaggcagatccttaagactccctggtcagtcaccttcacctactgggatggagtacctcaggtgccagtgagagatgctatgtcaaaagtgaggtagatggccttcacttaaggaataatacctgagggtgacctctggccttcacatacattagccccatgtagaccttcacacacacacac

SEQ ID NO: 4809 - DNA, 1000 bp, mus musculus
ttatgtaaggatgtacataagccttacattttactgtggtttgcataatcgcacacattaaaaatgcatgcaaccaaatgggagagcggcctgtgtggggctattattgctaaacctgcctagatctctgtcatgggaaccccaaatcaccaagtacttcaaaaggacaagagtcatccaacagggagcagagcggagcggggaacaatgttcgcacacagctttgactatgagtcagggctactggggccattaaacatatcagcagaatgtctttaatcttcttctctgatctcggagagctttacctgagagtgaagcaacattctgaggatctttggggggtaaggaaaaaagttccaagccccaacttgcttcaggagagtattcacttcatatacatgcctccaaaatcctgcccagggaataacaggcattaactggtacttaactaaatattcaaaatcttacagagtccaaagcaatcagcagagggaagaacaaagaaacacaagcccagcctttgcccccacagcagttaatctgtctcctaaaccccaggtagctgtgaggtggaaagtccagggacagaatccagcatgcctaacctcttttataacaatgctctcgtttgaacccctgtcatccggtgaaatggctggaaacagtgacaaataaacagaataataattgatttttccagagatgaaaaatttgaaattagtgaccatttcccgccccccccccccaagatcattggctgattaatttaatgtttgtcttagtctttcaaagacatcctctcccggagcatctgctctgccaggcactgtgatggtttgtggttaaagcatattgcacagttctgcagttttaaagtgaatgtcgacactgtgaggagggacgcagccaacgccaagacttaagtctcccgggattggaacctggcttgtcagacagaagtcaagtcggcgattgcgtggttaatgtgtctctatcc

SEQ ID NO: 4810 - DNA, 1000 bp, mus musculus
acatgatggctcacagcacttgggtatggcaggcacatgatgcacagacatgcatgtaggcaaaacacccacacataagtcagtcaatctcaaacaattttttaaagattagagatgaaaggagaggagctcttgtagattccaattaaatacagagacttattatgaaatgctataacaagccctactgcaaacacgagaaaatcctagtgaaataggtaaattccaagacccattattagggttcaggagttgcttcacaaaccacatggacacggatctcagtgagacagggagagtttattgagcatgtgccccaagactggtcaaccagggccatggtccagacgcagaatctgagccatgatcctgagttaagattctataaaagttttaagtcccaaatccacaaacatctgtgacaagttattccaccaatcaggatgtaggggtaggggatttccataggaacacgtctttgttggacactcatcctgctcccattggtgggagtattcaaaggaggcggggtcttcccttgcctaataacattcatgtcctcacttatctaactgaacaggacttgtctcagattcatgtcttaacttgccaactaggatgtcagttacacacgtccatgtctctttctgccaagtaggtgtccgttcccaggaagggcttgggaacctgatctttacaagagcactactcaaaatggaagtcttattccaaatggtttgtgtctctcttatgttggggtctgtcccaggggcagtttgtatcataaaatcttgtacacaggtacaggaagtgctggtggtggttgcttctggtccagtcttgttgtgggtaactatgcagagcagttccatgacttctgtcgtgattggtttccatgggcacagacagaacagaatatgtcacctatcctggcattaggaagggtccagtaacagcagaaacctgtgagaaatcttccttataatggcaggctagccaa

SEQ ID NO: 4811 - DNA, 1400 bp, mus musculus
agtcaatttgataaggtcatagggtgagcccttatctgataggactgtgcccttggaaggaaaaaaaggtgccctccctctgtctaccgtccaagcacccacgtaaagacacagccagaaggcacttatctgcaagtctccaagagacctgaaccagctgtccctggatcatggcctatggtactgtgaggtaaatctctgttgtttaaagcacacacgctacattatttttttttaaggcagccaaagagactgatgcagaaaggttggagttaaacctggctgcttttcagtccatacaactgtttggacatgagcaccagccttcaggctggcatttgagactaatataggcgttcctgtttgtcctttagtgggccccaccccctccaagctttattgacacacagtaacctgagcattgttataaaaacccaactgagccacgacaccaacactgcacctactaagtgtgatttggtggggttttgacatgcgtacaaccccttgagccccttgccactgttaagactgtgtcagtcccctccagaggttccctcttgatatattttatatccatatctctagacaactgtctgtcaccctcctttctgtcactgtaaatgagtttgctttttaagacgctttctgtaaccagccaggtgtggtggtaaaggcttgtattcccagcagctgggcgatagatgcgggggacttaacagttcaagtccagcctcggatacatagttttacagttggactgggctacctaagactgtcctcaaagtaaactaaatgaatatttgtataaatgggcttgtcctgttactcctgctctggcctttgtcactcacccaggctgttctgaaggtcagccaagaggtagacactgataattcatgtaccttgtactgctgagtaagatacacagatacacaggatccatttccatagtcagttgagttccttccagtggatatgttttaattttcttttcaacaatttgtgtgtctgtgtgaggatcccctggaactagagtcacagacagttgtgagctgcggtatgagtgctgggaattgaacccgggtcctttggaaaaacatccagtactcttaaccattgaatcatctctccagcctgtcttaattttgtaaacatttctttgtgtgtgtgtgtgtgtgtgtgcatgtgtgtatgtgtgtgtatatgtgtgtgtatgtgtgtgtgtgtgtatgtgtgtgtatatgtgtgtgtatgtgtgtgtgcatgtgtgtgtatgtgtgtatatgtgtgtgcatgtatatgtgtgtatatgtgtgtgtgtgcatgtgcatgtgtgtgtatgtgtgtgtgtgtgtatgtatatgtgtgtgtatgtgtgtgtgcatgtgtgtgtatgt

SEQ ID NO: 4812 - DNA, 1400 bp, mus musculus; identical to SEQ ID NO: 4811

SEQ ID NO: 4813 - DNA, 1000 bp, mus musculus
cgggcctcagattctccagatggcaggaatctctccaagaaaacgtgcagagagctggtttgtactcacccaagctctgagggaacggagggctctctgagtgcataatccacaaccatggcccctgtcctcctgacccactaagttatacaagggcaccaggcactggaagctaaaattaacgtttcatggggcatgccagagagttcttatgtctctggtggagactttccatgctcttgtgacaggccgatttccactgatgtccccacagggaggggaagaatgacgttccttgctttgtttccccactgcatagaaagtcgccacgtggacaccgtgctgcagcgaagcccacacagtcacgtgggcagcctgcttggcttttggtaaaactcccactatcactcaacaaatatttactggtcatctgtgatgagcctggctcgactcggggtgctgagggtgagagacaggatgggctatagcatgtgctagagcctggagcctgggcctcctgggcccccctccctcagcccctggccacacagttccctgccaagtgtgataatcatggagtgtctaagaattggaagaattctgagtgaaaacaatgccctaccccacgtcaggaggagcttaaattcccagctctcttccttctcagctgggcagtgggagccagaggccatttagatatggtcagaaaggaaaacgaagtacctggcataggggcccacaggggagagcagagggaagacatggctgaggcggcttcctttctctaccctgggcgtgtctttcacaccctgaaacagtatagccaagttgtaataggaacactactagatgaatagctcaccagagttctgtctgacatggcagcacagaacatacctagcaccccagatgctggaggctgtaatgtgaaaatgtccaacatcaaattgcaggacttctgtgacgtggccacagtccgtcttacctggctgcaatgatg

SEQ ID NO: 4814 - DNA, 1600 bp, mus musculus
aagctaattagccttcttgcctgtcttcaaccctgcccagcccaggtggcagagacaagcctctcagggcaaaggcctaactaatcaacactcccagtatcagctgtgactttgacaaggaggagcgggggtcagatataaacgctgaaaggctagtgccagcagcagccattaaaacctaaaaaggcagagtgggtaccagattttctcacccaagtcaactctaccctcctgcaggctccatccttgcctctgatcagggatcctggcagaagtagtgtgttaggatgtgggattggttcaggcaggtgaatggccacagattgggcaacagggagagggaggctgagctggtatgggtgtctgcagagcccagcctggtcagagctagaacatccctcccgcactacaaaatgtataagcccaaaggtaatgctgtacagcaaatgaagtggttggacccaagagatttagcctgtgggctttgctcactcagttaaagtggatacggatagagcccacattggtggctcccactgctgtcaacgagaagaacccatgtttccagtctccagttaggactctttgtgacaaaagagctctttgatccatcgggccatgccagggttcactgacatcagggaacctgaagagacaagagaatatgctactttctgctcagcccctgacatgttcacatcagaatggccgaagagccacagggactcacaggccaagcgttccaaattctaagcaggaccccagataccctcgcctatagccagccacctcaagaagtcctctcctggccttgacgacaccagcctcaagcccagtcctcccaagtcaaaaggccaagggcctctaatgcccacccctgggcagacctgggaagtggcaccgatgtgagacggtccagtcagtgggggagtggaagcagtggtagtctcctggggccaggtagatgactcagtggtagagcgcattcccttctcgggggaccagctggtttctgaaggagtcactggaggaagctattgggtgggacagaaagaaggcctggcttttggacaagctccaggtgccattcatcccacagtgagcacctgtacatggcctgcatgtagcctagctgggggctccaataatgacttttggctacatagcagcctgctgccccaaagcttgcccagcctttattccctcagccccctatgccttttgttactagcctttgctgtctaccccagctccaatcctgacttgccgcagaccctctgggcccctttgtctgcgtggaacgggtctctcgtctcgggtgggcaaaacgtcggatgagtaacaaacagacacacacaggagagtttgtgttggatctgaatgtaatgtcaaatcgagcatcacactttttatacagaagacaataaggaaattgggtgacacactcgaaaggtacaaagaggttactggattcttacataaaacagaggaatgtaaacacagaaggtctaacaggaaccacctgggatagaattcattgttaacaactgggatcaaaaagggctccacctaagattcacttaatcttagaagccagggt

SEQ ID NO: 4815 - DNA, 1200 bp, mus musculus
atgagactctactgcaacccactctaggatgtttgaaaaagcacagttgattaaacaagctaaggctgccatctgagccttgctcaagagaagctgagtcctgtgtctcctagaaactgagcaaagcaaagaacaaaaggggattgcaacagagaactggtgagcggcacaggctaagaccacagcacaccaactgtcctgctctcctcctttctcttccacaggaccccagtatgtctctaaaaaacaagaggaggtggcagggaccaagcaaagacaaatcagcattctcctgtgggctgcccttcccaagtcactgcagaagagcggatgccagtccagaagagcttgggggaggatctggtagaggaagcaggggtctagggaggaaaaagggggcctcggtgcccttgccaaagaccaagacacaggatagaagcccactgcttcccctgccttaccccattcccccagccagagccatgggtacctgaagtgagtctcctactcggggcacagaggactccctctccagacccctttagccactccctcccccctgaggccactggacttggtgtctgaccctcctgaaattatgccggggtacattgagggttaggtctcatgggcagcatctcactatttcgctgctgcttggagctccggttctggatgcttctctgactgacacatcttgggtaggcacagggagggtgtgggcctccacgagagtgtgctcctgtgcttgctggcttgcttgctcacttgccttttttttttttttctccttactccccttccccctcgccagagaaacttcagtgtggtcactgctccagttgttggtggcaatgcttctagtttccgttcactcttggtggctcacaggcacaggttagaggaccacagctattacaaatagacaggcaccaaacacctgtttagacctcctgttcaggtcacctgccagggtgttgccagggcagaagcccttgtacttgggccagccctatcactcagctttggtcaccctgaggcagggggattcccttgagtaaggaagaagctgaggcagggggatgacatggttatgtagccacagcctcaatctgcctgtcaatcaccggccccgcccactcagctgtgctcgccaatcagaaaaaaaaaaaaaaaaaaaaacagctgggcggtggtgac

SEQ ID NO: 4816 - DNA, 1200 bp, mus musculus
ttctgctcaccctctcagcaggtacttgcggctgagggctgagtagactctgaagttcagtcatccctctctaagcacacggaaccctgcggataatactgaagctgtgcccatgttttcaggggatgaaaagatggggagataaggagttcaggggttactaaagtcccttccaaacacgtccagagctttgcaggtctcctcggcctctccactcctgctctcagacatgaccccatgaccagtctgagtcctcaccccagctccgcttcttccttccctaccccctcttattcccactcatgtctcatgggcttcagagaactacagaagtcaacaggcttcgaatagactgtcctacatcctgacaggaaagcctgtggtccccttgcccgggccgaggagtcagaagaagggcttagtgggctatctggtctgtgaggagtgaagagaggcagagagcaagctggccattccctcttgggcaactcattcagggcttagcatagctgcctcgagatccacctcctcctgtctgtgtctttaggcttagggcctgcccagagacgccgtgatgatctcaccttgaaatctgtaacttaaccacatctgcagagccacttttccaaataaggtcacagccaggggttcccgaggctcagacaaggacgcatctgtccgttccgcccgctccatagcacagtcccaaacctgcattatttccctgtacctcccctaaaatgtggatgtcctctgaatatatcaagctgttctagaaaatcaattgaataacagcagactgctggttagggaataaaatttcatataagggtgtacgctctgtgcccaaggaattcatcttagaaaacaaaacaaaagatcaccaggtatggtaatgcatattgtaatccctacagttgggaggcaggggcaggaggatagataggtgtttaatgtcatctttggctacatggcaagcttgagtatagcctgggatacctgagagccatctcaaaacacgaaacaaaaagacgcaaaggctctcagacccttatgtctcacgcctctccctgcctctgccaccacactgctgattcctgaattcttgtctccctcatgggtacaggggtcaccctgcttcctccttccctcctcctaggtctctttccatacctccacatgcatgaacatacctgtaga

SEQ ID NO: 4817 - DNA, 1200 bp, mus musculus
aaccctataggtggaacaacaatatgaactaaccagtaccaccagagctcgtgtctctagctgcatttgtagcagaagatggcctagttggccatcactgggaagagaggccccttggtcttgcaaactttatataccgtttgctttcttataatcgttaaaaagcaggtttctgggctgggaaagtggtagagtggagcaggaggggtggggccacttctatgtaaattccagagggcagcagagctgcaaaagcatctcctgcaggaggacctgattgaggactgcctgagagaccaaggattgctggtgcagacaatgccagccaatcaggaactgttctttagaacagatgttttcttgagaccaatgtgggcacaggtggagggtattaaaagagcttgctgcagcatttctcccctgatcctggaggctgttattgactctgcagtagggtcaggcagccagtagcccagagcacaggcaccaatagagagcttacatatggtgttagagggaaaggagagagaagaagaggaagagaaggaagaagaggaggaatgggaggaagagggggtggggagggaagaagaaggaactgctttctgggaggggcgacccagtcccattgagtactttctctgtggtatacacaacacagcacagagcagttggggactgaaaacacgagttcagactttcaagaaatgtctgggacagactgggccttgtgctccagaacgcaagttggctctcacaactgcaaaagctccctgtgtcttaaagcacgtcgccaatcatgactcaaattttcacattgtttgctctgtgtgtgtggccccgtagtcatcttgaggtgacactcacgcccggtctcttgtctcttttttataaacgcaatttgcataattcacggacagctctgcaaggcatgcacaaccggaggccctgtcagaaaatgtcatttcaagagatttgtaatcgccaccagctcaagtcattctgtcatgtctcctgatgaaagcatggctggtctaaagcacaatgagggatcaggtgactggagctgagtgcgccacccaccctgggacagcagatgatttaccacttagagagagctgtgacagtgacctgctcgttcccttccttaccatcagtaaggactggtgagcaatggtcaggagacttgcagaactaaag

SEQ ID NO: 4818 - DNA, 1000 bp, mus musculus
ggaagatggctcagttagggacattcttgctgcacagctgtgaggacctgaggacaaatctccaacaccatgcaaaagccaatgacagtgtctgtaacctcaggactgaaggacacaggaggacccaggaggagccctggagcttgctgccagctcatctacctgaatgagtgtactctcatagcactgaagtcaacctctggcctccatatgtacacacacacacagcactgtggtaataattactgcaggacaaaaagtccatggacaaacatgaaagctagcagacaaggcttgaaagaggaagatcctcgtgcagctccagacatgcccctccaagggccgagtcctttgtgctgtcagcaaaagccacagcagtgtgttgtcctgggagctagagcttcacccctcccttgtgtgtggagagtgttggccacaccacttactcaggtgcattgtttatgctgagataagatgtgagggataggtgtcccatctgttctattcttgccgcaaatcagaaacactcggctcatgataaggaaacatcaaacagtagcaaataaaaaagcattccacaaaatacccaacacgaggtggacatcactgacagactcagaaactgtccaggtaccacggtccattgcaaaaggcttccttttaacactttatacattctactccaaaagaagacaggaatgagggagccgaatctatagctctgttgagggctggcagcccttgccccactgttagagcagtggcttggacaaaggtgtagagctagcagagacctggtcagggtgtgcagcaagcccccagcactggcctggcggggcatgtgtgggccaaattactttcaaaacaaacttttaaaatccagggacggctataaagcaaaccgtatggcccaagttaatacaaaaatacctcgacaaccaagtttcaggggttttctgctaacaaacttgtctttattccacacggactcactacggtt

SEQ ID NO: 4819 - DNA, 1000 bp, mus musculus
ccttgcagaaaaggttccatatctctagggctgaagcacgagacatagttgtctcctgtgggcattgcgccgtgttccaacatccttctccttttggagtgaatcctcgaggcctattgccccttcaggtgtggcaaatggacgttactcaagttcctgagtttggaaagcttaaatatgttcatgtctcagtggatacctgctcaggtatcatgcatgccacccctatgttgggggaaaaagcaatacatgcattgtctcgatgcctgggctgcctggggtaaaccccaacagcttaaaacagataatggacctgcctatactgcaaagacctttatgtccttttgtcaacaaatggaagtgcaagtgaagcatggcttgccctataatcctcaagggcaggggattattgaaagaacccatagaaccatcaaagagatgttacacaaacaaaaaagggggaataggctatagccgcacccctaagatgagactttctttagttctttatactttaaatttttttaatttgaataaagatggacccacgcagcagcagatagacatgttcaaagagtgcctggcctacaaggatatgccaggtagaacgatgtgcttaaaggcacatggaaaggaccagatccagtgttgacgtgggcaagagggtctgtttgtgtgtttccacaggaccagacggagcctctttgggtgccggagaggttggtgagacgctgcaagaatgaggctcctgatccagttgcccctgtggatgtggtggatgatcccacaagcacaaacgatggagccgagatgggagatcctttcggtgttccagaagccgataccagctcaacatgacattcaaattttcccatgcctttttgatccctgaattccccttaaagagagagccctttaacacacactctggctatctatcccttgcttcagggaagatgagcggggatgggagccctgggatatatgcttgttatagtgt

SEQ ID NO: 4820 - DNA, 1000 bp, mus musculus
actgcagggatcaaagactgccagggtgctgggaacagttgtcctgcccctccccgcgatgaggaaacaaccagactgagggttcttccacagcaggagctgaaccctgctctttgacctgcagtcgcaatctcgatgctgtgaccatgagagagcggctctgcttcagagagatcaggaaaggtgtagacactcctacccacgggagcctcataggcaggggggctcagtgaggaggacatacatcatctggaacctgctctcaccagagccactgacctctgaccctcagcaagggatttcccaccctccgactggaagggaatgctcattccagcccctcctttctcaggaactctgaggcccagaacagtcaaagacttgtatgaggaccagctgggtccagccctcgttggcatgacctttgtcctcagtagcacaagggtcaggccccaccccaggcaaagtcatcagccgctagcaattgctcagcacactctggccttgggttctattaggccaggcacctgtgcttgtgtctatgtgatcgtgacatgaggtgccctgcttgaggggcccttcctgatgctgtggcagtgtgggtgacccaaggctctgggtcgattgctgtgggggtgctagaggacacacgaaagcctagtctcaacctcacccacctccttttttccagggcatgaaggtcttcttcatggtggtggccgctgtgtacattttataccttctattcttgatagtgcgagcatgctccgagctccgtcatatgccttacgtgggtgagtgccatgctgggaagcatagggcaccaggggccacacccccagaagcccttggccctaggaagccaagagattcctcaagaaggattagcagtgttgaaagaaccctttagagtagaattcagtggcccctggtgccacagagctacgtgagctgcccgggacctgtaaggatcattaataacaatgtccttcactggggc

SEQ ID NO: 4821 - DNA, 1400 bp, mus musculus
ctcttctggtgtgtctgaagacagctacagtgtacttacatgtaataaataaataaatctttaaaaaaaaaaaaaaagggagctgaaacctctaccacaggttaggaaaccacactcttagcctcctacagtcagctaggaacttgaggaaggcaggaaacaaaaggcaggaagaaacacatcacttgaggacaatccttcctttggcagccaagagctatgcctgcggggtatgtactccggtgtttgggctgtttgctgttcacttggagagtgggaaaacaaaacaaaacaagacagacaagacaaagcaaaaccaaaagccaagcaaagcactggtcaggcttatgaagtttccatggcatgtgaaagtgaactgcacccactaccagaccaaagtgcaaggcctccatagcgaggcccatgggagatccttgaagcagtatcttcagatgcctcatgtcaaagcgggaatcatcaggactttcgtcaactcgagaaggaaccgagagagccatgttagtctcagttcccactgaagaatgggaacagagccaggatgacccaagagcaaaagcacaaggtgcactccaccctgagggttcagaggggtagggctggctagccttaccaggagagagcaagtggggtaatagttgagggctgctgtgcatctacccttacctacctagcttcctccatcttttagggctgtggcagagtggagcctgggagccatagctgtatgtgtgagagatgactgcaccaggtgcaggaggagcctgcggaggagacctaaggagtaaatggcgctctccaggtgaaaactgcttatgatgaagaggaagacaagctgcagccgaatgaatgccttcccttacttcttgttactacaaacagtcatttcacttttatggttctgtaatttcccaagagtgcctaccttgtctccaggttcaaagttttgacactccactggaggctccatcctggacctgtgtcctggcttttcacatcctctgtagtgtaggaacacacctccctgtggagaaaagcagagcacaggaaaaccagaaaagggaacggaaggggctgtgcaccacgcccacacatggcactgaggcaccaacatatttattagcacctttcatcttttaggtactataacggagcattcattttctccccccatgatataattaacatttattagaaaaaaataagagcataaaatcaggtcacgcaatttggaaaagtcggtgtcatccatcccaggggacatgcactactaattggattcttttttaaaaaagatgaaaacccaaaaaaagtcaaaacaattcactaagtgggcaatgagatgacagggacatttcgagtgttcccagtcatgatggcat

SEQ ID NO: 4822 - DNA, 1200 bp, mus musculus
tatgataggaaaaaattgaaagagagcacgtggatccatacactagactaacgcggggatggaactcgggaatgaaagattgctgtatgggtagggaacgctagactccaggaggagagcttccttgaaactcttttgcctcatgagtgacttttaagcctctcggcttgtccagttgactcgaccagagagcgtagcactcagggaatgtacaaacaggcactgcaaagcaaacagccactgactgcctgcagggtgagtctcacccagtcagggaggtaccaggcaggatccattgggccagtcactgcttaaaatgactaacgtggtcccatcagtgacagtgacagccaaaacaaaacaaaaaaaaatatgattgctgcgtgtggccacgggtgacaggggtcgcacccttgcatttcggcttgggccgagaggcaaagtcatgccacccagaggcaagtattctctcaaacacctccatgtgtgtgtagagcccttgggagaaagttctctaaacagctctcacacactgtacagtgtgttatatctagggctgttatcctttttccttgtcatctaacataaactactaatttcctggcctgtgtgctgttttctactgagattcaggcctcttccccatttaagaacatatttagggctgtgtgcatcaatctttaggccctaggagaatccagacaccaggtagttctcaaaaaaaaaaaaaaaaaaaaaaaaaagccatgcagtggtggcgcacgcctttaatcgcagtacttgggaggcagaggcaggcagatttctgagttctaggtcagactgatctacagaatgagttctgggacaccaggacagctggggctatacagagaaatcctgtctcgaaaaaccaaaaccaaaacaaaacaaaaaattctgtgagacttgctatgagggaggccagtggtccacttcattctccatggcctccagtcaagggtccagggccctttttctaccacacttcctacacctttgccacatgcctatgtgctggtctccacggtgggtctctaacacaccatgcagctggagaggccatctccacacgccatacagacctaatgctacattccccgtcagcaccaggtgcagagcagctgacagcggaacggtgccatcagccaccgagtagcacgctctgtctttacggctagg

SEQ ID NO: 4823 - DNA, 1000 bp, mus musculus
tgattggttaagacatccaactgcacattttgattggccagcagggactgcaccagccctatgctctgggtgggagacagagcttgagcagagctgtagattggtgcaatagggatgttcactgtacagggcgggttgttttcagggacacctgatgctcctgtaactgtaaaacaaacaaacaaacaaaaaaaatcggttgcaaaacagtgtaatagaactatgccagaataagacgcatactgaaatatatctgatcttttccaagcaaaatgtacccactaagacatccaactgcacattttgattggtcagcagggactgcaccagccctatgctgttcacgaagcttctcaaacccttctggaagaacatagccaactaaggagtgtgcagcatggcctgcctgttgagcatattctaaggtactgtcaaaacatctcaatgaacgtgttctaactttctgaatttggtaccatgtgcttgcatgataccattacacataaatgtctacagaactctttagtggttttgctcataaaatgcctatgtaaaataaagtggaaacaccaaaaataaaaaataaaatagaatccctagaaatgggcatattggctgaatgccctttgcctatttactgctttttaatatttcaaacagcatttaaggtacaaccaaccaataaaagcatgtggatattccatttactatccagacgtcacgtcatgaaccataaacgtcagccatgacttgcaggcaggtgctcagagccacagttggcagtgcccctgttggcagtggcgctgactctagctttgctcccttagcctactaagtggctgtgcctcttcctcagagcacattgtcagaggcccagaggcttaaaacttggtgtttaatgctgtatagcaataaataattgagcaatcaacaggatctaacaggcttattttataggttggctgacttcacccaaacagcaggatgcggccaacacaag

SEQ ID NO: 4824 - DNA, 1200 bp, mus musculus
ggaattataagatgaaatcagcctctttttccctcaaagtgccttttttcccccagggtgatttatcatagcaacagagataaaactcagatttatgaagctaaactacaggagcctccacagcgccttaccctggtctctcacctcagccgtcgaagcctgggctcaagcgaaacagtgtagatcccagaggcagctcaggctctgcctgccctttcagaataaaaccttccacaccagtggccaagacactgttactattccaaacagctattctattctattctaaaatccaataaagttccatttttctcggtctgttattatcccagtaaatcagagtttacaagtacgtttaaagggttttgaagtaaaggcgggaccaggcgtggtggctcctccctttaatcgcggtgcttgggacaaagaagcaggtggatctctatgagttcaaagtcagccaggtctacatacactgggagttctgggaactcttagtggaaagagagcttgtcttaaataaataaataaataaataataagcaagcaaggggaaaaaattgtatttttggctaagcagaccatttccttccttaagaatgttattttacgtgtgtggtattttttttcctcgtagatgtttaacatgcacgtatgttagttcatcatgggcatgctgtgcctctggaggcccaagagggtatcgggcccctgggcctggagttacagatgattaagtaccatgtggctgctgggaatcaaacccagaccctctggaaaagcagccagtgctcttaactgctgagccatctcccctgtaactctggaaaagttctcctattaaaaacattcgtttgtactgaaagacccacaacgtgaggactcttccacgttctgactcaggagaggcgacaccccaaaatcaccaacgagaaaacggtcttgctgcaaattgcaagaggatttttattcaagagcgctctcgggcccacggtcatacaccacgcaggggtagaggactgtggcgccccgagtagctgagtaaaggggtatttaaaggagaaaaaccacaactcaaggaggtgggaagggagttgttggaaaataccaaaaataccaggtaagagtcacaaggaagtacaaagtcacaggtgtcacaaggaatacctggtaattgttaactctcaagacagtttctaa

SEQ ID NO: 4825 - DNA, 1000 bp, mus musculus
gggaactagactttttaaatcaagaaagagggagacttgggcgtgccaattaaaagtatacaaagaaggggcaggcatggtgggtttcagtaagttccaggctatgcaggagtgagactttttttttgttttgttttgttttttgttttttcaagacagggtttctctgtatagccctggctgtcctggaactcactttgtagaccaggctggcctcgaaatcagagattcgcttgcctctgcctcccaagtgctgggattaaaggcgtgcacaaccacacccagctagactctttttttttaatcattattaatttatttgttcactttacatcacaatctcagcccccctcccccctctcctctcagtcttaaccttacaagcccctccccttctgccccctcccttgggaagtgaagtcccagcaggactaggcacatcctctcacactgaggcctagccaggcactccagatgggggaaagggagccaatggtctgatagcccacgctccaattgctagaggacccatataaagacccagctgcatatctgctacaagtgtgcagggggcctaggcccacccctgcatgttctttggttggtgattcagtctctgtgagcttccacgggcccaggctagttgactctgtagatcttctcatggtgtccttggcccctctgcctcactcaatcctatcccctactcttccacaagtctcccagaactccacctaatgtgtggctatgggtctctgtatctgtttctatcagctgctgggtgaagcctctcagaggacagttatgctagggtcctgtctgcaagcatagcagagtgtcactaatagtgtcagggattggctctgtcccatggaatgggtctcaagttgggctagacactggttggctgttccctcaatctctgctccatctttatccctgtgcatcttgtaggcaggacaaattttgggttgaaggttttgtgggtgggttgatgtcc

SEQ ID NO: 4826 - DNA, 1400 bp, mus musculus
gtgggtggcaccatcccctagacagggcatgaattgtatgagaaggagaaatggagtggggcaagcaagtaagcaaatatgcattggttcctctctgctcttggccatgggtgtgatgtgtctggctatttgaagtttctacctggacttccctacaatattgggtggtaacctggaattataagatgaaatcagcctctttttccctcaaagtgccttttttcccccagggtgatttatcatagcaacagagataaaactcagatttatgaagctaaactacaggagcctccacagcgccttaccctggtctctcacctcagccgtcgaagcctgggctcaagcgaaacagtgtagatcccagaggcagctcaggctctgcctgccctttcagaataaaaccttccacaccagtggccaagacactgttactattccaaacagctattctattctattctaaaatccaataaagttccatttttctcggtctgttattatcccagtaaatcagagtttacaagtacgtttaaagggttttgaagtaaaggcgggaccaggcgtggtggctcctccctttaatcgcggtgcttgggacaaagaagcaggtggatctctatgagttcaaagtcagccaggtctacatacactgggagttctgggaactcttagtggaaagagagcttgtcttaaataaataaataaataaataataagcaagcaaggggaaaaaattgtatttttggctaagcagaccatttccttccttaagaatgttattttacgtgtgtggtattttttttcctcgtagatgtttaacatgcacgtatgttagttcatcatgggcatgctgtgcctctggaggcccaagagggtatcgggcccctgggcctggagttacagatgattaagtaccatgtggctgctgggaatcaaacccagaccctctggaaaagcagccagtgctcttaactgctgagccatctcccctgtaactctggaaaagttctcctattaaaaacattcgtttgtactgaaagacccacaacgtgaggactcttccacgttctgactcaggagaggcgacaccccaaaatcaccaacgagaaaacggtcttgctgcaaattgcaagaggatttttattcaagagcgctctcgggcccacggtcatacaccacgcaggggtagaggactgtggcgccccgagtagctgagtaaaggggtatttaaaggagaaaaaccacaactcaaggaggtgggaagggagttgttggaaaataccaaaaataccaggtaagagtcacaaggaagtacaaagtcacaggtgtcacaaggaatacctggtaattgttaactctcaagacagtttctaagagcccctaacaatagcacatttgca

SEQ ID NO: 4827 - DNA, 1000 bp, mus musculus
gagggaactagactttttaaatcaagaaagagggagacttgggcgtgccaattaaaagtatacaaagaaggggcaggcatggtgggtttcagtaagttccaggctatgcaggagtgagactttttttttgttttgttttgttttttgttttttcaagacagggtttctctgtatagccctggctgtcctggaactcactttgtagaccaggctggcctcgaaatcagagattcgcttgcctctgcctcccaagtgctgggattaaaggcgtgcacaaccacacccagctagactctttttttttaatcattattaatttatttgttcactttacatcacaatctcagcccccctcccccctctcctctcagtcttaaccttacaagcccctccccttctgccccctcccttgggaagtgaagtcccagcaggactaggcacatcctctcacactgaggcctagccaggcactccagatgggggaaagggagccaatggtctgatagcccacgctccaattgctagaggacccatataaagacccagctgcatatctgctacaagtgtgcagggggcctaggcccacccctgcatgttctttggttggtgattcagtctctgtgagcttccacgggcccaggctagttgactctgtagatcttctcatggtgtccttggcccctctgcctcactcaatcctatcccctactcttccacaagtctcccagaactccacctaatgtgtggctatgggtctctgtatctgtttctatcagctgctgggtgaagcctctcagaggacagttatgctagggtcctgtctgcaagcatagcagagtgtcactaatagtgtcagggattggctctgtcccatggaatgggtctcaagttgggctagacactggttggctgttccctcaatctctgctccatctttatccctgtgcatcttgtaggcaggacaaattttgggttgaaggttttgtgggtgggttgatgt

SEQ ID NO: 4828 - DNA, 1600 bp, mus musculus
ggaaggagagccaccagggaagccacgtctctgctttctgccatgtgggctatgccaaaagcaggtgaccccaactccagatagtgcctgggttctaatccagcccaggtgacctgttggcaggccaatatgtttgatctgctgagctctacaggacccatgtcccctcctctgtggctgtaggctccatccacgatgtcccccagactgtcccttttgttttgagactgtggtaagcttaatcttctccctttgggaacatactctacagcattggctcccaaactgtgagcctcctcccctttggcaaagctctatctccaagcatatattatgattcataacagcagcaaaattacagttatggaatagcaacaagaataattttatgggtgtgtgtgaggggggggtctccacagcatgaggaactgtgttaaagtgtcgcagcatcgggaaaggatgagaaccccctactctagatatctcacaacctgcctctgtctgcagccttccacctgctcccaagaaggataaaaataaaaacagtaggggtctctgtctctccagcatggagtcctgtatgcagccagtgagaaacttgcctttaacttgctatcccagtcttgcaggtagattccctaaacatcacatttgttacagtgtgctagactctgcacacagagctttaaatgactgtcaacccttccaaaatgagtaataaatacaacccggttttacactgagagacacgaggcttagtcaggtccgggcctctcctggagatgaggatgctgtgcttcagttggtctcatcttggtttggcgactaagctctggagtaactactccaggtataagctgtggctggaggagagtcacggggctcttggaatacagactcccataccatggagttttccccgggaatgagattcagaggctctggggcatctctgctgagcttctggtgataagggcctgcagatgctggtactttcccaatggcttgtgtctttaacatgtgggatggactcagcagggcttttgaaattcccaggtacaaacaagtatctgctcacagtggcgtccctggagccaaccgcttttcttcagggctagcataaggtccatttccaaagcactttgtcctaggcagatggtgccttcatagcctagtgtatcacggaagggtgacttgctcccatgaccatgaaaaaaaccctgagctttcctccttggccaaccaacacgtcctgcagctcatagctagggaaaggccaggagtagaacctgggtttaaatgttgctaatgtcttaggctgctgcagtttcccctgtgaggacacaggtgaaggcctgatgaagtagtgttcaaggaagggaaacccagaaggacggcacttagcagtcagatcaagctgatctgatggtggtactgaccaaaggctaaccacaagccaggcattgtcccctgtagagaggccatgttgctatttaatgttatctttaaagcagctctgtagaatctgtctccattaaagataagggcattgggtagtgagatggcagagaagggtgtggtcagaaggggtaggccaatg

SEQ ID NO: 4829 - DNA, 1600 bp, mus musculus; identical to SEQ ID NO: 4828

SEQ ID NO: 4830 - DNA, 1600 bp, mus musculus; identical to SEQ ID NO: 4828

SEQ ID NO: 4831 - DNA, 1000 bp, mus musculus
gattcttaaacatgcttggtttaaaatgtatcataaaccattgccaaggggaaccctcagtgaccccttaagggcagcatctgcctgccagtcaccccttggtcccctcctcatcctgctcttctgatgacatcatctggtcagtcctagctcctctttccatctcccgtcctgtacagctgtctccttgtggatgtctccactcctctccaacatggttcgtcacttctggaccactgactcttgtccaaacacctgtccctaagcactttacttcctcatctaaggactgtttccctacaactcaaacccattgggctccaagatggcagctgctctcttcccttcctgcaagctagctgctgcggccactatcaagagtgtcatagtttttactcttctgctatttctacagggagggcacctggctatccccaagtgtcagaggctagggtaggcatatcacacagggcagagtgcaggtcctttttgatcatgctatcatctcagaaccagagggaagtgcccagcttacacacacaaatacatttagggcacaaaggacagtgagctgcatctatgcatgatccatgctgacctttgccctggcatgcagattttttggaggaaaaaactttaaagcagaaatcaatcactgtttgctttttgcttctgaaagtacaaagccatttgactggcacctgtttcactgaccgtgaagcctaataaggcagaggacacactgtcaaatttccactcctgcagtgcaaaagcagactgagtttggaacccagtttcttcaccagaatgtagctccatcttcctgtactgtctcacaaatgcccgcctttcctggccctggcactcagtaccaccctcacaaagccttaccctcttatctcagtatttgagcatttccaattaaccttcttattttcattatttcccaaacttttatagagttgctataattgtccttaataatataaacatgatacta

SEQ ID NO: 4832 - DNA, 1000 bp, mus musculus
ttatgtgaggagcgaacaggcatctcatctgttgggaaagcaggttaaataaatggagcacccagaaggagtcagacttcatgcacttatgaacttgaaaaaaaaaaaaaaacccttcaagcagctaacagggcaaagtgtatttttagatgagacatgctatgtcttaaatgcactgccatggcatgtgagggttgctatagcaactgcatccatcctccctcagctgtcagactgaatgagcagttaggcagagattcactgctgggagattgaagagattcctagagccctcggggtacctagccccagcaggaggagcgagtgtcctgtgacagattgttaaactgagggaggataaaaatggtgacccatattgccacatctgtcccttatgtgcttaagtgcagtcggaggccagggaggacattgaacattcttctctagcagtctgaaccgttaagatgagtctctcactagagcttgagctttctggttttcggctgactgcctggccagccagcctcctctccctttccccagtgctgggtttacatgctctgacttggggatctaggctcaggtcacatactgttcgtgcagcaagtggatttacccactatcccatctccccagcctcacacagcactgttcttgacatgtggccaaagctacatgcaactttccatgttgtaaaggaacagacgtccatttggatgcctttgtgtggatgtgctgtgctctggagacctgggcgggagccagctgcagggactctactctcaacactccccactggggtggctgcaggcacaggctttcaaagaaactactccccaagaagctggtttatcttttaacaaaaattatgctcttacctcttccaaattatctcaaggaaggtcttaatgaaattatctcaatttaaattatcattccttgttcaacagagtcgctcaagttactcactggatttgagtgttcacgtgtgtgtgtgtgt

SEQ ID NO: 4833 - DNA, 1000 bp, mus musculus
aatggggcctaccttaagtaccatgccaccctggggcatctagtcctagcaggtctaggcacattctttcctactgaatctggacagtcttgtggaagagtggggatagaactgagcaactcggaggagtcaaggacaccacaagaagacccacagagtcaactaacctgggaccatggggctcagagaggctaggctaccaaccagggaacatgcaggagctggaacaggtcccctacatatctctaggtgaccagagtttaatcccagatcatacaaggtgccaggagacactcccaagagttgtcacctgatttccacttacacatgcacgctatggctcagatgaacctgcacacacacacacgagtcttagggtttcctaactaagtgtgaagagacactatgaccaaggcaactcttataaggacaacatttaattagggctgccttactgattctaaggttcaacccatttatcatcatggcaggaagcatggcagtatctgagcaggcatggtccaggagagctaagagttctacatcttgatccaaaggcagtcaagagcagtatgtcttccaggtagctaggaggagagtctcaaagcccaccccctaataacgccatacctcctaacagtgccacttcctgggccaagcatattcaaatcactacaataagtaaatatatatatatttttaatgtttaaggagaaagtaggttcctttggtttcagaggcctgagggtcggtcagtctctctctctctttctctctctcaaccttctgaccttagcaggtcccctccatccctcacatcagcctccctgatgagccaagatggcccaggctctggacagcatctcacaagcaccttggtggcattttcttgttgtgttaccaaccttgctcaccctgggcttcattttgtgggttagaacaggatttcattacgtttcctaggattcaacccccaggctcagataattctcccacctta

SEQ ID NO: 4834 - DNA, 1000 bp, mus musculus
gtagcccaggtcttctgcccctgcatgcagcagtaccccgttggcctcatgcttggtggcattctcctgctgccatgctagatcagcttcttggaggagtgtggtccagggtggctgccaagttgcaaagtgtacatgtgtacccacatctggtaggactggatcctgctaagatgaggtatttaaatttatgatttctttcccctgccaaattcaaggcacatgcccatgttcattggaaggctgtggaatgaggcaactgctctgtcaacaaaaaagactggctgagcttacatccctcgaccggttctaatgagccttcataggaatgttggattccatgaaaaagcgtggggctcattgagaacaaccaggcaagagagtcgaccgtcttcacgtctctgagaactctgctcccttgagaaatactggattccagaggaagaaaccattcgcccctcccccttttctgtcctagaacttgctctgtagaacagactggctctgaactcagagatctgcctgtttctgcctcctgagtgctggcattaaagttgtgtgtcacccccaccccaactatttgcccctcttacttggactcaatacctagcacttcccattattcacattaatccacagacaaggatgatgtgtggggattcccagcatctgcatcagctgcaacggtgtttgtttctgtgccagtcactgttctaacaggaatgattgttagaactgctcttagtctaacaggcttattgaagggctgtgaccagttaacctgtagactgaacttgagttctcctgagtggctgctgagtgcctcagcctcatccctcagtttgcttttgtcttccctgtcctgaggggtccttgcctgtggtcagcaagtccaagtggttgttactaagagtcagtgaatgggtcccttatctcctgagtgtctgtcactttccttctcctcctgacagaaggcttgcttttgacctgtgctttgagg

SEQ ID NO: 4835 - DNA, 1000 bp, mus musculus
aatttccaaaatgggcttatacacattatacggtttgtttgtttttaaatgaatgagctgcttacacagttctgcttcaaacaatatagaggaagtgggaggggcttctgccccccccccagagtgctacccttcaagttttagtagatcgttggctagagaagacacaccaaagagagttggatatggggcctaaatatatagaactggtcatggatatatccctagggcatatggtggaacccaaaggatatctctggcctaacacagcctaatacagccaatcctggtgtatggagccacccttaaggcaaagatcaggcattagggctttgcttctggtcttaaagcttactgctttgtctgattgtatgaatgagtttataaacaaagaagccaactgctgcagtgtaaacaagatatagaggtgaggctcataaaagtccccaactccttacctcctgggtgccagtgcagaagactacgcactttcctggaagacagacaagtgaacatttaaaaattactcccaagggaggatcaagagtaaggattcactagatagactgtatccagctatgaacagactcactgtgaccccacagagccagcctccacctctggaccagccatgctctgatgttgtgttaaatgtgcgtggggtgagagctcttccttcccagcaagacagctgccatgagtgccaagtgacccaacaaggtgccaactgccaattgggaacactccaaagccctatgtttccttaccaaccagctagtagtgacctactgagcccagagagaacagcactgaggacggaagagagagcttccaaaaggatgcttctatcctggacaagaggacttaccaggtccattcagacagttcccagttgagcccctgccacatccccacagttttgcctcatagacaaggcacacacgggattcctcctttacctggaacagattatcaaagttctcttaggaccaatcaataa

SEQ ID NO: 4836 - DNA, 1600 bp, mus musculus
actcaacactaaacacacagtaagttcaaagatagtctgatatacaaagccaagacccagtcttaagcatacaaaacaaatacaaaattataaataagtatataaatataatttccagcatactaaggatacaaagaataaggaagccgggtgtggtggcacaggcctttaatctcagctcttgggaggcagagacaggcggatttttgagttcaaggccagcctggtctacaaagtgagttccaggacagccagggctacacagagaaaccctgtctgggaaaaaaacaaaacaaaaaacaaacaaacaaaaaaagaataaggaacaatttcccaacaaagaagttcaagttgaggcattggggggggggggggtgttcgagacagggttgagacactacacccagctgaggctttttttttttttttttttttttttagtttaaaaatttttttttttaatttttatgtaataaaaagtaaaagtccttgaggcatctgtcagtctctcacacaggacactaaagttaatggagaagaacagggagcccaagtctgagattataaatatgagaaaataaaagatcttctgtccctggggtggggaggtagatgagaggatgggagaacaagactgggtgagacccagctgggacagagcaggaacctcccccacccctgctggaccccagcctggccctcttgaaggacccttcccattcaaggtgcttggcaagaattccccaactcccccagctggtcccagctgctggagggaagagacatagatcacttccctccactcaaggtcgtctcaggtcctggtcaggacaaccttcagttccccagggagtggaaggggagctgctgggagggatgagattgaactggttggaggggaaagcaagaaaacaggagcattagaaccggagcagctgtccctgtcaatgcatccacggggtgaggggtgtgggaaggagcagcctcctagaggagtctcagggggctgtcagaagcacaggtcaattactgtttcccagtaggccagagccttactcaggggcccagctcagccccgccccacccccaggttgaggcatttttttttaaagatgttttcaaattttaaaagtttttaaaattataacaaggttcaactatttgatttggacactgcaggaataaagaacactccagatgcaactacagaaatctgagttgtgactcttgttaatgtggtgtcactaacaaaatatattaattttgaaagatacaaactttaaagatgaaatatcaatgtatctctattgtattttaaccaatactgaaaatacagctaagcagaagtaacacagatcagctatagcaatgctcagaaaatcttcactatgtttgctaacaaagatttgatttaacacaagacatcattttgaaaaacatctcaccaagccaagctagttaaattctaagagtcaacaaaagcaagaatttcttcattcttttcaactttcatccaaaaaaatcaaaaagtacaatttttgttaggcagtggtggtgcaatgcacgcctttactcccaacactccagagacaaatacaaa

SEQ ID NO: 4837 - DNA, 1600 bp, mus musculus; identical to SEQ ID NO: 4836

SEQ ID NO: 4838 - DNA, 1000 bp, mus musculus
actaaatatcaccctctctcctcccagtacactctcccacaggccctccctccatccctcccttccctcctcctctgagaaggggaggcccccaccccacccctgggtatcaccacccactagcacatcaagtcactgtaggacaaggtacatcctatcccactgaggccagacaagacagcccagttaggggaatgggatccataggcaggcaacccatttagggacagcccctgttccagttgttgcttcttatgtgaaagacgacatgttgtaagcataagccacttcagttactttggctattgaaggagagacctagggataaggagagcaaaagagatttaaggtcccgaatgaggtggaagcaggagaagtgccttagtgactggaggtgccaagttcctgctaaaggcttttgaggtctttcacagaatgactgactacgagttccagctgcaggctcatcagtgaggccaaatgggaacccttcccacaaaagtgtgaggcgtttgtagtcattactgcgaagtatactccaggacacagcagaacacagaagcctgcccaccgtaaagcatgtcacactgccaaaatggtaggaggtcactctgaaaagggctctcatggttcacctgaaaccccagccgcttggctaaatgaaaccaacagcttgaaatgtgccatggccggcactgtgctgaccatggtctctgttagcctgactactaattggctgggtgtggctagcaaggtataatggattgcatgtcatcctgcaggattccggggcaccaagatggcatgcagcagtttgcaacgggtttctcaaggacttagtgaaagttgaggcaggcagaggtggaagggaatagcttcctcccaccctccaccccccatacatcattagcagagacaataccacagacactgctgttgctataagggatgagaggagtcttcagttcccagcaggtcttaatctcctgtacccacagtg

SEQ ID NO: 4839 - DNA, 1200 bp, mus musculus
cacgcagataccggtctaaagccactgtcgtcaggaaggctactcccacaccacggctgaatgccagcaagaagagcaggacttggcagggcatgtgtccaagtttccaggtcttgcccttcagatagaaggcagcaaagaatggcagactggtggccaatagcaggtcagccaccaccaggttgaacaggtagacagcataaggcttccatactttgagacggtaaaagaaggtccagagggccacagcattgcccataaggcccagcacacactccagtgtcagcatggtgcccacggctgtctccaccacagtgctggcagctgagcagttggtgcgctccatgggcctgagcctcactgagctaaagcaatgcgaggagagagagaggccaggaggcctcactgtgctacttcctctgagaaaaaaggaaaactcccccttcctgtcacaaagcacacaagttctgcatgtattcagtgagaacataatactgaaacagtgccagaatctgaaccaagtagccagcagaatttgtttggggaaagaggatgaatggacacaggggaaggcccccaagttttgctgtttcatttgtccctgagaaagaggaaactgtgtttgactttgtatcaggggcttcaaagccagggccctagtgttccaggaaggcttagtgggcagagccatgtcccagctgctgaagaaggaactgaaaacagttcatgacatgacgatatctgcacctttagacacttcaaacagtgactggattgaaacaggcaggctgttctgtggtgtgaaccgttctgtggtgtgaaccggtcttagatggttctgcagtctgactgtttcatggggaacgtttacaattccctccctcaaatgatgacatttggtaagattcttaagtgtggctagattttacacattaggtcaaagctgattttcatattcacttgaaagagtatttcagatttcttggctacttaaagttgaacttttcatttattctatccagtcaaaagtgtgtgtgtgtgtgtgtgtgtgtgtgtgtacacacacaagagaatgtttcctgctgagactcttccctgatactcacactatctacataggacctggaacactgggttttgtgccctgcaagcaagagtttccagatgggaactacatttcatcagtgaattcttcatttt

SEQ ID NO: 4840 - DNA, 3000 bp, mus musculus
acgagcccaggggtgctctcatccactcggaacaccagtggcttcaagggggccccttgggtttcatcttctgtcctcaaaggcttgctttcctaaacattgatcatccagacaggaaggatgagacaacagagcttccgatgagaggtgacatggttccctctctccctcccccaagctccggcttctgtgcgccagagccctccctgccacctctgcagacaaacccacctccgcctaggcctgacatttgtctgcttacctgttacagaatgtccctctagtggcagtccaaaaatctctgcagtcacatcacccaaactctgcagaccatccattgtagtcctgcctctgggatcagcagtgtattggaaagaataagggtaattagtgaaaacaaaaaatattaactttttaatacataagcaaatttaaacacatcttttgaaaaagattgagaggttggagagatgggtcactgggtaaagtacttgtcacacaagcatgagtttggatccctgacacccacataaaaggccaaacactggtagagcttgctggccagtcaacttagcttgctgagttagttccaggtgtgcaagagaccgtgtctcaaatgatagggtaggatgtgaaagaagaagacatccaatatcagcctcttgtctccactcacacgagggcatgcacacctgcatagcctgcgtgcatacaggctaacacccactcgactcacacacgagtgaatgccgtgcaattcctgagtttcctcaaccatgtgtttccaaatgtgagagccactgtcacacacagcttgcagctgtgattctgggcatactggggtaggactgactcaaccaaatgacacatgttcattgctacaaccttggtcaaggggctgaataagagacctgcatttatagtgtattttcaaactgagcttaatgatatcaataagcgtttcaagttgtgtgtgtgtgtgtgtgtgtgtgtgtgtgtgtagtatatgtgtttatgtatgtgtggtatgtgtatgtatgcatgtattatagatggtgtgtatgtctatgtttgtgttgtgtgcactatgtgtatggtgtatgtgatctgtgtgtcactgtgtatgtggtgtatatgtgtgtctgtgatgtatgtctatgtgcatatgttgtgtatggtatgtgtggagtatgtatatatggtgtgtgtatatgtgtgtgtatgtgtgtatgtatgtatgtatgtatgtatgtatatgtagtatgtgtgtctgtgttgtgtgcactatgtatgtggggaggggtttctgtgtgtgatgtgtatggtgtatgtgatctgtgtgtctctgtgtatgtcgtatgtgtgtggtatgtatgtcgatgtatgtgtatgtggtatgcatgtctttgtgtatgtgatgtatgtctgtgggtatgtgtgtacgtggtgtgtgtctaagtgacgtgtggttgtttgtgtaagtgttaggtgtggtgtggtgtgatatgtgactgtgttgtaaattgtttgtgcaggtactgaggggccacagtcagttacttttacattaaaagtgcttttctttggcagaggtgtggctccagggtcgaacatttccttagaatgggaaagctcttgctttggcaccaccatctcacctcgttatcgtctacctgtaagaactactcatgtctcctaagcttacttggtcataagtactgtggcgcctgtgaggatttcataaaccgcatgggcaggaaaatggattcatgaagaccaatggccatctccagtgtctccccactcttgtgcagaacgcttttgaggctgaaaaagaagacagtgatctgctgtggctatgcctcccctggaggggtggtggccagactgcctagctaggctgtgtacatttgcacattaatgttcccgtctcccacagaagcaagactctcagctgctcataagttaatgagcagtccaaaacattcatgttctcatacaggggctgttgtgaagtccatgatgtaaagggccatagcataggctatgatatgtggctgtagcacagactatactatagaccatacagtgggtcatggctatgttgcagtcattggattgccccttgatattttccagaccaggggttccaccgtggagcacaagagctggtaacagaagcctccaacctttcggaaagagatccattcactcagaagaaccatgggaccttgtgaaaaaagcccaccagtagagcaggtgtgcacctctctctgatgggaacggctcactcttggtgtgtatcctcctagtagtggaaatttgctttgtttttatcagcttcccaggaagctgagcaaggggtttgcccagttttgattgctgccaatgtctcaaagtgccatcatgatcctatcagtcagagccagggcctggcagcaagagcaatctggtcttgcccaacacatccccacatgcggggaaacccggggacactgtttcttattgtgtgataacatcttacaccctctgccgtgggaaaaccaccctttaatttgattttattctcagtgggacgagctctagttcagcagcacagctccagaggtcatgcccatcttcaccgaccccctcaaccagagtagagaaagaaacacactaagtctcctgacccaattccccagacaggctgggcagtctgctgggttccactggaggccatgcaggtggcactgcggggcaagtatagcttagtgctgcaggtcccctccagtggaaaggttgcagattgtccctccaggtgttctgggtatctctgcatggtccctctctgtcctctccagatccaggggcttaggaaaggcccttgggctgccttgcccacatggggtaagtctgtttgttcctgtatcaggcaccctgcacatgatagagtaaatggggggccagcaagccaaagaatgaggagggagggacataggtgttatagtcctctgtgtg

SEQ ID NO: 4841 - DNA, 3000 bp, mus musculus; identical to SEQ ID NO: 4840

SEQ ID NO: 4842 - DNA, 1000 bp, mus musculus
ccatgctagcacacaactgtctctaactgcagttccggagaatctcatgtctgctccgggatctaaaggcactaaatgcacatggttcagtgataaatacatgcctaacacctctctctctctctctctctctctctctctctctctctctctctctctcacacacacacacacacacacacacacacacacacacacacacaattggaactactatgaatggttgtccgcttctcaagatctagagtcatgtaagagacaagcctgtgggcccatctctggggagtgagggactatcgtctaggttagggtagtctctgggcatgccagtgggggattatctcattactgagggacatggtggcctggctgtatctaagtgaagtccgtggcctttctttcacctgatgtgatacagagactaggtttgtcctcagtttggctgagtgaccgtgatcacgcacaggaccacatgccttgtgtcttccctgcctgggaactcggtcatcatgagggaaggaggtgggtgggtgacttctgagcttcctgtcatcagaaccagggtggagggaggaaatcattccgatccagagcctgtcacttccagaaagttctgctgtaagaatgaaaggctgacatcctccagccagaatgtggcatgaaggagatgctggctctgcccccagtgggtggggttgagggaagactggcctggaacattccccaagtcaggggataaggagttgggcagatgggcataacattggcctgtggctcagttttataggaagatgagccaggtaaattcttcttagcaactctgtgtatccctactacctatgtggaagttgggagtgctcagtttccccatgacaactaaagggactctagccaggtctcaaacgtgtctctggaaggccttgcccttctccccaattccttctaccttgctaaaaaaaaaaaaaaaaaaaaaaccattagactacattcttaaagatag

SEQ ID NO: 4843 - DNA, 1000 bp, mus musculus; identical to SEQ ID NO: 4842

SEQ ID NO: 4844 - DNA, 1400 bp, mus musculus
tgagaaggttttggggagtgagaacaaccatcagaagccagatgaggctggagatgccccaagctgccctcagagacagcaagttaactctgagccgaggatggaccacacgcagataccggtctaaagccactgtcgtcaggaaggctactcccacaccatggctgaatgccagcaagaagagcaggacttggcagggcatgtgtccaagtttccaggtcttgcccttcagatagaaggcagcaaagaatggcagactggtggccaatagcaggtcagccaccacaaggttgaacaggtagaaagcataaggcttccatacttaccgtctcaaagaaggtccagagggccacagcattgcccataaggcccagcacacactccagtgtcagcatggtgcccacggctgtctccaccacagtgctggcagctgagcagttggtgcgctccatgggcctgagcctcactgagctaaagcaatgcgaggagagagagaggccaggaggcctcactgtgctacttcctctgagaaaaaaggaaaactcctccttcctgtcacaaagcacacaagttctgcatgtattcagtgagaacataatactgaaacagtgccagaatctgaaccaagtagccagcagaatttgtttggggaaagaggatgaatggacacaggggaaggcccccaagttttgctgtttcatttgtccctgagaaagaggaaactgtgtttgactttgtatcaggggcttcaaagccagggccctagtgttccaggaaggcttagtgggcagagccatgtcccagctgctgaagaaggaactgaaaacagttcatgacatgacgatatctgcacctttagacacttcaaacagtgactggattgaaacaggcaggctgttctgtggtgtgaaccgttctgtggtgtgaaccggtcttagatggttctgcagtctgactgtttcatggggaacgtttacaattccctccctcaaatgatgacatttggtaagattcttaagtgtggctagattttacacattaggtcaaagctgattttcatattcacttgaaagagtatttcagatttcttggctacttaaagttgaacttttcatttattctatccagtcaaaagtgtgtgtgtgtgtgtgtgtgtgtgtgtgtgtgtgtatgtgtgtgcgcacaagagaatgtttcctgctgagactcttccctgatactcacactatctacataggacctggaacactgggttttgagccctgcaagcaagagtttccagatgggaactacattttatcagtgaattcttcattttaatttaattccttttaatcatgcaaaggctgaagccaatataatttaagtcttctgtctgggtccagggagaaagatcctct

SEQ ID NO: 4845 - DNA, 3200 bp, mus musculus
cccttgggtttcatcttctgtcctcaaaggcttgctttcctaaacattgatcatccagacaggaagcatgagacaacagagcttccgatgagaggtgacatggttccctctctccctcccccaagctccggcttctgtgcgccagagccctccctgccacctctgcagacaaacccacctccgcctaggcctgacatttgtctgcttacctgtacagaatgtccctctagtggcagtccaaaaatctctgcagtcacatcacccaaactctgcagaccatccattgtagtcctgcctctgggatcagcagcgtattggaaagaataagggtaattagtgaaaacaaaaaatattaactttttaatacataagcaaatttaaacacatcttttgaaaaagattgagaggttggagagatgggtcactgggtaaagtacttgtcacacaagcatgagtttggatccctgacacccacataaaaggccaaacactggtagagcttgctggccagtcaacttagcttgctgagttagttccaggtgtgcaagagaccgtgtctcaaatgatagggtaggatgtgaaagaagaagacatccaatatcagcctcttgtctccactcacacgagggcatgcacacctgcatagcctgcgtgcatacaggctaacacccactcgactcacacacgagtgaatgccgtgcaattcctgagtttcctcaaccatgtgtttccaaatgtgagagccactgtcacacacagcttgcagctgtgattctgggcatactggggtaggactgactcaaccaaatgacacatgttcattgctacaaccttggtcaaggggctgaataagagacctgcatttatagtgtattttcaaactgagcttaatgatatcaataagcgtttcaagttgtgtgtgtgtgtgtgtgtgtgtgtgtagtatatgtgtttatgtatgtgtggtgtgtgtatgtatgcatgtattatatatggtgtgtatgtctatgtttgtgttgtgtgcactatgggtatggtgtatgtgatctgtgtgtcactgtgtatgtggtgtatatgtgtgtctgtgatgtatgtctatgtgcatatgttgtgtatggtatgtgtggagtatgtatatatggtgtgtgtatatgtgtgtgtatgtgtgtatgtgtgtatgtgtgtatgtatgtatgtatgtatgtatgtatgtatatgtagtatgtgtgtctgtgttgtgtgcactatgtatgtggggaggggtttctgtgtgtgatgtgtatggtgtatgtgatctgtgtgtctctgtgtatgtcgtatgtgtgtggtatgtatgtcgatgtatgtgtatgtggtatgcatgtctttgtgtatgtgatgtatgtctgtgggtatgtgtgtacgtggtgtgtgtctaagtgacatgtggttgtttgtgtaagtgttaggtgtggtgtggtgtgatatgtgactgtgttgtaaattgtttgtgcaggtactgaggggccacagtcagttacttttacattaaaagtgcttttctttggcagaggtgtggctccagggtcgaacatttccttagaatgggaaagctcttgctttggcaccaccatctcacctcgttatcgtctacctgtaagaactactcatgtctcctaagcttacttggtcataagtactgtggcgcctgtgaggatttcataaactgcatgggcaggaaaatggattcataaagaccaatggccatctccagtgtctccccactcttgtgcagaacgcttttgaggctgaaaaagaagacagtgatctgctgtggctatgcctcccctggaggggtggtggccagactgcctagctaggctgtgtacatttgcacattaatgttcccgtctcccacagaagcaagactctcagctgctcataagttaatgagcagtccaaaacattcatgttctcatacaggggctgttgtgaagtccatggtgtaaagggccatagcataggctatgatatgtggctgtagcacagactatactatagaccatacagtgggtcatggctatgttgcagtcattggattgccccttgatattttccagaccaggggttccaccgtggagcacaagagctggtaacagaagcctccaaccgttcggaaagagatccattcactcagatgaaccatgggacctggtgaaaaaagcccaccagtagagcaggtgtgcacctctctctgatgggaacggctcactcttggtgtgtatcctcctagtagtggaaatttgctttgtttttatcagcttcccaggaagctgagcaaggggtttgcccagttttgattgctgccaatgtctcaaagtgccatcatgatcctatcagtcagagccagggcctggcagcaagagcaatctggtcttgcccaacacatccccacatgcggggaaacccggggacactgtttcttattgtgtgacaacatcttacaccctctgccgtgggaaaaccaccctttaatttgattttattctcagtgggacatgctctagttcagcagcacagctccagaggtcatgcccatcttcaccgaccccctcaaccagagtagagaaagaaacacactaagtctcctgacccaattccccagacaggctgggcagtctgctgggttccactggaggccatgcaggtggcactgcggggcaagtatagcttagtgctgcaggtcccctccagtggaaaggttgcagattgtccctccaggtgttctgggtatctctgcatggtccctctctgtcctctccagatccaggggcttaggaaaggcccttgggctgccttgcccacatggggtaagtctgtttgttcctgtatcaggcaccctgcacatgatagagtaaatggggggccagcaagccaaagaatgaggagggagggacataggtgttatagtcctctgtgtgtatgcgtgtgtgtgtgtgtgtgtgtacatgtgagtgcatgtgtatgtgagtgatgtgtgtgcatatgtgtgcttgtgagtgcatgtgtgtgcatgtgtgtacatgtctgttgtatttgagtgcatatgagtgtacatgtgtgtgcatgtgagtatgtacatatatatgtgcttatgtatatgcatgtgtgtgcatatgagtgtatgcacatatatgtacatgtgtatatgcatgtgtgtg

SEQ ID NO: 4846 - DNA, 1000 bp, mus musculus
ggtgtggccttgttaggggaggtgtggccttgttggaggaggtgtatcattaggggtgggctttgagttttcaaaaacccaatccagggcacaatctctctctctctctctctctctctctctctctctctctctctctctctctctctcattctctcattctctctctctctggaattttcagctacttcttcagcatatgtctgtctgcatgcctccatgctccccactttgagaataatggactaactgtgagccagcccccaattaaatgctttcttttttataagagctgccatggtcatggtgtctcttcacagccatggaacactgactacagatgatttagttaatcttacagctctcaggtcacattctgacactgagggaagtcagtgccggaacctggaggtaggagctgaagcagagccatagaggaacacttgccagactgactttccttctgacttgctcagtttgctttcttgtacatctcaggaccaactttccagtggcggcaacaccacagtgggctgagcactcccacgttggtcgtcaatcaagatgatagcccacagacctgcctccgggccaatcttatgacagtgcctcctcatttaagattcccctgtctcatgtgactctggtttatgtcaacttgataaaccaataaaaccacaacaaccagaaaagcacgcacatggggctaaagagaagtcatggtcctgcacatgagctcagagaggagaccacttagcagagagcaaatgaagaccgagtgcttcacaaggaccccaggggggaaatgtcctttaaccttagggctctggatcacgtaactcaccagccaccgaggacctctgctctaccactgcccaaagcagggactctgagattcacagtcacataaatcagtaaactcccccattgagacgcttaagcaatagcctgctcttttaggaaacatgctcatgtgagcaagctactattagttttcttg

SEQ ID NO: 4847 - DNA, 1000 bp, mus musculus
caaacagaagaggagagaaaaatgttctaggaaaagaggaggactaaagaatgcagatgatcctaaatctaactgtgcaaatgaaaagtcctaagatttgactcatcccatgcttctgagcagttcttgtcaatgtgggggcagtgtggtgttctcgaaagtcttgagacaagaggctcgcaggactggcctgccccttctgttgcagtcattgtagcactgaaacatgtcttgtggatatgttcctttggtgatggatagtgatgatcagggtacctgtcatcccctgaaggcactaaggatccaccgcttcccctgaccttttgcactctcgtctattcctgcctgcagaggcgacaggaggaagggtattacagccgcctagaagctgagaggcgccgacagcacgaagaggcagcacgcaggctgctggagcctgaagagcccgggctgagccgacctccacttccacgggactatgagcccccgtccttgtcctcagcaccctgtgcccctcctcccccacctcagcgaaacgcatcctacctcaaaacacaggtcctctccccagactcgctgttcactgccaagtttgttgcgtatgatgaggaggaggaggactacggcccagcaggtcaggataagtaccccagcacacggaagtctcatgggcaccttcctcttgccacccttaagccgcagcagcccccctgccagccacgcccagcctcggatggcatctccctctgcaactcattccagccacccttggccaaagccaacagtacagcttacaaagcaggccagcccccgcccctgccaggcaaaccaagcctgtaccgtcctggccactggaaaggtcgaggtaaaagagggaatggtgaatcagacctttctgtccttgatgattgagcctggaatctctgtacccctgccatttggcaaggtacatggagaccatgcctgctttggcactgggttttatctgatcactctcagc

SEQ ID NO: 4848 - DNA, 1000 bp, mus musculus
caggaactggcctaagctagcagctacagctctctgtgtatgagactctcacctaaatcctcattgggcgaaaacggaaagaaagcaagctttgtctttctgtccccctggcagcccagcccaagtctacacacgacgatattgttacagaaactggaaattcctgtgtgtacagtctcaggtgtttgccaggacaataacacaatggagggtcccagcttgactctgacagctcggtcccaggtgacatctagggctccagagttgcagggtgtgtgaattgatgcagtcctctctgggactctgctgctttcggggagtttttgtctgccacccacacaaggttgggggactgcattacaggggagggtggtgacagaggtgggcacggtgtcttcagcattgggactcagcgttgctcaccatctgaaccgttgtcatagggtcagggctgagaactccaagtctcaaaccagctccagccgctcccccacccctgaagcctagggtgtggctggtagaaaggaaccaagtcaaaaacaatgttagcatattcttgttatgaatcttctgacatggagctcctattgagggagtgtcagctactgcatgccttttggtggggttttcagatgctcatcaaatagtcctgcgctgggggcatcctccctggaactgtggggctgttcctgggcaggaatgacccaagcaggcagactccagcccttggcccaggaacccaattacttcagtctgccctgggatgaactgctgtacggacctcatataattattttgataggaggaattgtggctgcaacctaagtggagcccccatcccatcttttaagaagggagactcataactcagaggatgtgggcccaaggtgggcccctcagaagggagtcacataaaaggaatcaaaagccattcatgctcagtaggcagacagacacttgatagtacctggccagccttggccactgcctctgctccact

SEQ ID NO: 4849 - DNA, 1400 bp, mus musculus
acatgtctgtccacatgtgttcctgacatctttccgttgctgactatggttgtgtttacaaagatacttgctcttttacaggtgtgacttatgaggtactgtcagcattagagacagtgatgacaaaatccaacttcctattaaaaatcatgttgccatattgggaaatggcagtgagcaagttcaagtcgcacaggtaacaagggtggcatggtgctatttattggtgctaagacgagaggcctgcgcaatgctgagggggtagaggtgagacctctcagattaggctgagtgcagaatgccttcctttggtgactcagacaagccctgactggttgaaatattctgtataatcttcttggtgctattgatagagcttttttttgttgctgttagaataagcttctttgtatttttctgagctcttactataagtaaaatattgcacctatcataagagaactacaggagtcggggagggaggaagacagacaagcctggccatgtattccctcaaaaccaaagccatgcaagagccaggcacagcatgttttcagggaggcagagcctggagatccagtgagtggggtcattactgatcctcaggtgacctcacgcttagattcacttttcctcagctactccctgcagctctgcagctctgcagctctgcagctctgttctggccatcctcagaagtgatatgcagtgtttatagaaccttaatggcattttgttctactgaaactatgaaaaggtttcatcaagctttaaaacatgccccccccccaaaaaagaaagaaaaatggttttaaagtcattagtctatttagaattggatcctagtattttgcttccacattagcaagttgtatatccttgttttcaatgccatattatttgtgttgaggctgcagtgcagtaactgagacacctgctaatagactctggtcccccaggtttgccgactacaccatgttgttgctgtcacagctagaagctggactcaggagactgtttgctgcagttaacaagtgtcctgatagactgctcacagccgaggtacaagtgtttctgttactcactcaaactgcaattactatgttgacaattgtctgtggctatttaaaagttttaagggctggagatgcagaatgttagctaagcacttgcataatatgtgcaaaaccccagattcagtcctttacaacacacacacacacacacacacacacacacagcatgctttatttgctgttacagcatatatttatttgaattgtgattacataagatggttctgtttccaaactgccctttcaacttcatggtgttgcaaaagcatcaacattttctgaagccagaattgtttctgattttgcagaatactgctgttcttt

SEQ ID NO: 4850 - DNA, 1000 bp, mus musculus
attttagaagtctatatgtctacgtggagaatagatatcataacatgggccaaaggttaaaaacaaaaacagaataagaagggatagtaaacagaactaggcagggcccttctagtgaggcttgagggtctgggcatgatgtaggtgtatgtagatcagatctctggctggaactggtgagatgtctttggggtacccggctcattcgctgtagccagttgtgaccagacttttttctgcaccacctgcaagccttttaacttagcatacagattattattacaacaacatgtaggtttaagcacatcatttaagacagtgatgggcatggggaaggagcaccaagtctacaccagtctcttttagaattctattcatcttttctacctgtcctgagctttggagcttgtatgcacaatgtaacttctaatcaatctctaatatcttggccagtccctgatttacctgggcaacaaaggcaggtccattattggacctgattgccttggatatcccaaacctcgggaagatttcttctaggatcttcttggctattacattggccatctcagtctttcaaccgcgaggctactgccatccgtgtaccagcggtgaaatgcgtggtggtggtggtggtggggtgggcatcccagggaaacctctgcatgggtgttcccccctgggccacggtttcccatgtggtgcctcaccttggccagtgcatgctgctgccgccgaagccagaagttctcagtccggccctgcagctgcctgcggccaggaacgtgggtgtgaatccacgttctgccaactcgggaccccgagcgcacgtcccgctcagcgtctccccgactgagatccccaaggccgccaacttttccgactttcccaggctgggggcgcttcgtctcaagcactcttcccgagtcccccggtcccagctattcccggacaacttcccaccccgccgcgcaggtctccccgacgtccgcgcccactg

SEQ ID NO: 4851 - DNA, 1600 bp, mus musculus
cccactctcagttgctgcccaagtctctgaagagatccagttgcccatttttccttttggcaacttcctaaggccactttactgtagctgtaggccaggtactctccctttttagggatgctctgcctcaggccacagttcatctgtcccagggtgctggctggttgacatgtctgtccacatgtgttcctgacatctttccgttgctgactatggttgtgtttacaaagatacttgctcttttacaggtgtgacttatgaggtactgtcagcattagagacagtgatgacaaaatccaacttcctattaaaaatcatgttgccatattgggaaatggcagtgagcaagttcaagtcgcacaggtaacaagggtggcatggtgctatttattggtgctaagacgagaggcctgcgcaatgctgagggggtagaggtgagacctctcagattaggctgagtgcagaatgccttcctttggtgactcagacaagccctgactggttgaaatattctgtataatcttcttggtgctattgatagagcttttttttgttgctgttagaataagcttctttgtatttttctgagctcttactataagtaaaatattgcacctatcataagagaactacaggagtcggggagggaggaagacagacaagcctggccatgtattccctcaaaaccaaagccatgcaagagccaggcacagcatgttttcagggaggcagagcctggagatccagtgagtggggtcattactgatcctcaggtgacctcacgcttagattcacttttcctcagctactccctgcagctctgcagctctgcagctctgcagctctgttctggccatcctcagaagtgatatgcagtgtttataggaccttattggcattttgttctactgaaactatgaaaaggtttcatcaagctttaaaacatgccccccccccaaaaaaaaaagaaagaaaaatggttttaagtcattagtctatttagaattggatcctagtattttgcttccacattagcaagttgtatatccttgttttcaatgccatattatttgtgttgaggctgcagtgcagtaactgagacacctgctaatagactctggtcccccaggtttgccgactgcaccatgttgttgctgtcacagctagaagctggactcaggagactgtttgctgcagttaacaagtgtcctgatagactgctcacagccgaggtacaagtgtttctgttactcactcaaactgcaattactatgttgacaattgtctgtggctatttaaaagttttaagggctggagatgcagaatgttagctaagcacttgcataatatgtgcaaaaccccagattcagtcctttacaacacacacacacacacacacacacacacagcatgctttatttgctgttacagcatatatttatttgaattgtgattacataagatggttctgtttccaaactgccctttcaacttcatggtgttgcaaaagcatcaacattttctgaagccagaattgtttctgattttgcagaatactgctgttctttttaattgtttctcttttttatcttcccttttc

SEQ ID NO: 4852 - DNA, 1000 bp, mus musculus
agatatcataacatgggccaaaggttaaaaacaaaaacagaataagaagggatagtaaacagaactaggcagggcccttctagtgaggcttgagggtctgggcatgatgtaggtgtatgtagatcagatctctggctggaactggtgagatgtctttggggtacccggctcattcgctgtagccagttgtgaccagacttttttctgcaccacctgcaagccttttaacttagcatacagattattattacaacaacatgtaggtttaagcacatcatttaagacagtgatgggcatggggaaggagcaccaagtctacaccagtctcttttagaattctattcatcttttctacctgtcctgagctttggagcttgtatgcacaatgtaacttctaatcaatctctaatatcttggccagtccctgatttacctgggcaacaaaggcaggtccattattggacctgattgccttggatatcccaaacctcgggaagatttcttctaggatcttcttggctattacattggccatctcagtctttcaaccgcgaggctactgccatccgtgtaccagcggtgaaatgcgtggtggtggtggtggtggggtgggcatcccagggaaacctctgcatgggtgttcccccctgggccacggtttcccatgtggtgcctcaccttggccagtgcatgctgctgccgccgaagccagaagttctcagtccggccctgcagctgcctgcggccaggaacgtgggtgtgaatccacgttctgccaactcgggaccccgagcgcacgtcccgctcagcgtctccccgactgagatccccaaggccgccaacttttccgactttcccaggctgggggcgcttcgtctcaagcactcttcccgagtcccccggtcccagctattcccggacaacttcccaccccgccgcgcaggtctccccgacgtccgcgcccactgtccgccgcactcgttgctccaggacccgccgc

SEQ ID NO: 4853 - DNA, 1000 bp, mus musculus
acaccagtaatgactactaattttcctcaatgatgctatataagtctgatttaattcttacattgtattacctgccgtctgaccaatgtctggactgaaaaatttgcatataagtatatttttaaagattataccccaaggaaccctccagaatgtaccagagacctgggaggtaagagactctcaggaatcagaaggaggaaccttagatgaaatgcccaacagtagggagagggaccatgtagaacccacctccagcaggaagacagggcatcaagtgagagatggggttgccatcccacagtcacatctctgacccataattgttcttgtctgaaagaattacagggatggaaatggagaggagcctaaggaaaagaaggtccactgacaggcctaaagtgggatccaacaaaagggttggtcccaaggcctgacactattactgaggctatggagtactcgcaaaaagggacctatcatgactgcccttcgaaagacccaacaaacagctgaaagggtcagatgcagatctttgcactcaaccaatggacagaagcagctgactcctattgttgaattaggaaaaagctaaaagaagctgagaagaagggtgatcctgtagaagtacccagcagtctcaattaatctggaccctggatatctctcaaacactggaccaccaaacagacaacatacaccagctgatatgagcccccacaacacacatacaacagaggactgcctggtgtgtgttcattcagagatgatgcacctaaccctcaagagactagaggccccaggtgtttaaaggtcaggtggggggggggtggagaaaggggacttgaagaggaggtgtggaatgtggagcagttggagggtggatgggaggtgggggaatggaatatggagtgtaaaaaataaattagttaaaaacagagatcgttgaaaaaaatattacaccccaagactgtgaagagaaatactttcgggaatccct

SEQ ID NO: 4854 - DNA, 3000 bp, mus musculus
aaaatgttctttcagggaaattctgactcagtacaattttcctagcattttcctaattgtaactatgttgatgtttttgctgatagtgtaaaatcactggtagataaagctacatgtgctttagaattagttagtgacaccaaaacattctcgtagtcattttatttttcaaaaacatgtggtaatagtaaaggtctgcatattttaaatgttctgcatagtggaccacaaagtacttacaatgtacttatttctattcatttttgaagcagatggttatataatggcaaattacttgcacaattaagatgtgagccgaactagtgaaggaacaccattgctaatgaaaggaaataaaacttgagacatgtgattcatgtaatttatgtcaaatatcccaaagagttgtttgtgagctttgaaacctggggctgagaacatagcagaacaggccaggacatgcccgggcaggcccgtcgttacatgtcctgactggcctagtgcctccctatctcccgcccttctgacagtctgttaatgtttaaatggaccaatcatgtgaaaccgcgccaattcctccaccagccccaccccttttctataaaaacccctagcttccaagcgtcggggtcaaaaccactgtctcctgtgtgagatatgtttcgaaccggagctccgccattatggctccaccatgtggtcaacacctctgtctcctgtgggagatacatgtcggcccagagctccgtcattaaactacctcatgcttttacatcaagatggtcctctgttcgtgattcctgggtgcgcgccaaatcgagaattgagtggaggtttccccactaggttctttcatttggaggtcccaccgagatctgcgtgacacccaggaaccccgaaagaccccttggaggtacgtttgtttgtgtgtgtcttacatgttgtctgttgtctaagtgtggcaccactgaatttgtgtcttggtttttcagttctgagattgtgaatttgtgtcttggtttgtaaatctgtgtctcggtttgtgaatttgtttgtgccttggttttccagttacgagatcgtgggttcgagtcccacctcgtgccttggttttagggttgcgagatcgtgggttcgagtcccacctcgtgccttggttttagggttatgagatcgtgggttcaagtcccacctcgtgccttggttttctggttacgagatcgtgggtttgagtcccacctcctgccttggttttagggttgcgagatcgtgggttcgagtcccacctcgtgccttggttttagggttatgagattgtgggttcgagtcccacctcgtgccttggttttagggttgcgagattgtgggttcaagtcccacctcgtgccttggttttagggttacaagatcgtaggttcaagtcccacctcgtgccttggttttagggttgtgagatcgtgggttcgagtcccacctcctgccttggttttagggttatgagatcgtgggttcgagtcccacctcgtgccttggttttagggttgcgagattgtgggttcaagtcccacctcgtgccttggttttagggttacaagatcgtaggttcaagtcccacctcgtgccttggttttagggtggtgagatcgtgggttcgagtcccacctcctgccttggttttagggttatgagatcgtgggttcgagtcccacctcgtgccttggttttagggttgcgagattgtgggttcaagtcccacctcgtgccttggttttagggttacaagatcgtaggttcaagtcccacctcgtgccttggttttagggttgcgagatcgtgggttcgagtcccacctcctgccttggttttagggttatgagatcgtgggttcgagtcccacctcgtgccttggttttagggttgcgagattgtgggttcaagtcccacctcgtgccttggttttagggttacaagatcgtaggttcaagtcccacctcgtgccttggttttagggttgcgagatcgtgggttcgagtcccacctcctgccttggttttagggttgcgagattgtgggttcaagtcccacctcgtgccttggttttagggttacaagatcgtaggtacaagtcccacctcgtgccttggttttagggttgcgagatcgtgggttcgagtcccacctcgtgccttggttttagggttgcgagatcgtgggttcgagtcccacctcgtgccttggttttagggttacgagatcgtgggttcgagtcccacctcgtgccttggttttagggttgcgagatcgtgggttcgagtcccacctcgtgccttggtttcacatctggcagagtgaggaacaagtgtgcttagatactggtgtcttttattttctgttgctgtcttgtttttgtgttgctgtcttgtttttgtttgtggttttcgtcataggacagactgtgtgtgtagtgccgactgcggacttgaactgacgttaagacagaatttgtcagtgatagttaagaaaaactggctgcacacagccgcaggactggaatgagaccttccggcttaggcggcagcagcgcatactggccacgtgggaaaccgtgaccaaggggggaacacccgatgcagaggtttcccccgggatgcccaccccaccaccaccacggattcactgcctatgggacgggcaagaagaaaaagaggggtgaggcccacagggcccgcgctggcccctcctggcttcctagggtcgactagagttcgctgccttcccctgctccctgagttggcctggcgcagccagctgtgagagctaccttcccttccctgccccacgtgttttctcttctagagaggccccaccctaagctgctaaccagtgagggagacatctgtctacttaaaacttctttctcaggtaaggagcacctgcaagtctaatcaccaagctctgacaaatttgtatagaggtctagaaaaaggtgagcttagactg

SEQ ID NO: 4855 - DNA, 1000 bp, mus musculus
tgggttttttagagttgggatttttcagtgatagatttatttccatagcgattatgggatgcttttggtagtttaccctatccttatttagctttggtatcttgtatctgtctagaaaatctttcatttcatttagattttctagttttgttgagtataaacttttggagtaagatctgatgattttttgaatttcttcagtttctattgttatatctctcttttcatttctgattttactaacttggatactgtctctgttcctgatagttaatttgactaagggattatttatcttgttatttctcctcaaaggaccaactcctggttttgttgattctttgtagtgttatctttgtgtctaatttgttgattttcatcctgagtttgactactgactgcattctactgctcttagatgttttgctttattttattttattttattttattttattttattttattttattttattttttgatcttgagcttttaggtctggcattaaattgctagtgtagtatctttccaatttcttttttttttcaattttttattagatattttcttcatttacatttcaagtgctatcccgaaaaacccctatatcctcccccacgccctgctcccctacccacccactcccacttcttgtccctgttgttcccctgtactagggcataaaaagtttgcaagaccaaggggcctttcttcccaatgatggccggctaggtcatcttctgctacatatacagctagagacatgagctctgggggtactggttatttcatattgttgttctacctatagggttgcagtccccttcagctctttgggtactttctctagctcctccactggggaccctgtgttcctttcaatggatgcctgtgagcatccacttctgtatttgccaggcactggcctagcctcacacgagacagctatatcagggtcctttcagcaaagtcacttagtgctatgaattttcctctta

SEQ ID NO: 4856 - DNA, 1200 bp, mus musculus
gctgagtttggagtactcaggcagcagatcaaatagatccctttggtttcttgtacctcttttagggggtcttgagaaatgacttatatttaaatgccgcaggctattctacttatgtttatgatattttgttaatttattttctgagtcagattcctcctctaaggttgacattttttcttttgaatcatcattcacctctcctgagaaactttcctagactattctgttgaggaataaacattgtttttcgaacctgagcaagatagtattaacagagtcccctcacaatgaggtgaaattgtgtctcctgagaacattattgcttttttgccatccattagtgcctacctaagcacattccaaatagcatactcagtaaggggcatgcctattcttctatgctctttatatcagtttttaatatctaaccctacattctcccatgtatccacaactaaagtactccttcctagaaatcaaggcccaaccatttgtgcaaactgaagaaattcattcagctggaaagtgctaatcttaatgacttttaaaaagagtatgcttaatagcatttataaagcactcactgtacattcactttgtccatcctgagagatataaacaaaatgtacataacccacaactgatagcttctgacataagattggtgctgatagttctcaacagctatgatgggagaactgcctaatggcagtaggaaattaaggccagagctgatggctcctggcgtaacctgggtactgataacatccaatattagcctctgctgatggcattaggcagtataaactcctatttctcactctgcataaaaacacactcactggccaaggggtttccaagacacagttgtgagtcctatatgtgtcgacttaccttattcaaagtacttgttccaagtcaccgatttagatgccagtaacctcccagcctggagaagtagagatgaggccagattaggactctggtatggctataaagtctgtgggtccatgaaagttctagctctctaactacaatgaaatgttgataataacttctaaattgtcctaaaacctttttggctctttctgttagggattgacaactgtagcctggcagcaggggaataagcaaagtggacttttgttctatatccctagaaactttcagctctaagtctgttattcagaattcata

SEQ ID NO: 4857 - DNA, 1000 bp, mus musculus
cttttcctatgtgtttgccttcatgaaagtgcttccatacccacccacactctccagccccacatcaccatcatttcccttctctggggcatcagatcataaggttcagaccataaacactgagtccgggccacctcctgtgctgcttttcatcactcccctttgatgttacactgcctgctacctgccatgaggccaaaccagattttccggagttaactctgaatttggggagtttctcctaaaagactgttctgacaacttcacatctctacatcaggaaacttagcatgactggggatgggtttccctctttataagtgcagattttattattatacatttgaaccttgaacagactagcatgtcttgattccattatttctcgacccacgtagattccttcttctctttcaggtccaggatgccacccaggctcaaacccggacaagagagctgcaggccggccccatcaatttggtgtccgactcggggcctgggaatgacagaagaagctggaagaaacactgctggtatggagctccacaggtaggaaataattagaaaatttgtacagggacagggagaagcaatgggcaaaaggttgctaaggtatggtacggactgagctggaacagtgtgctgacccgtgcgctagattcgctcaggttcagcagtgatatcaggatctaggaacataacaggcagtcggccacagcttccagtagctgctttttaggcgagagaaataaaagagtttggattaaataatcaggcggatggccgcagtcggaaactgcatcaggcgggaggaaaatggattttgaaattctcccaaaggcagagagaaatcttgtgggacgccctgcctttttctctctagcccttacagcagaagttctctgctctctttgttttctttaaagtctaatgtctggtgcaccggtctgttaatgtgttcaattcatgtgagttcatgtctggtcatctgaatgactga

SEQ ID NO: 4858 - DNA, 1000 bp, mus musculus
ctagttcaagatgttccataatctaaattggctccttggagcaagaattttgaggaaggtatgtcaacacagataggactctcaactggaacttgtaaaccccttgatcatggagtgtatggttatggaggatgagaaataggagttgatattgtctaatgccaaaaacagaggctgatattgggtacaatcatcacatgcttcataccatgagccatcagcactgacttgaaattgcctgctgccatcagcataagcccatagtaggtgccatcagaatctggttgtgttagttgatgtgatggtttgtatactcttggaccagggagtggcaccatttggaggtgtggccttgttggaataagtgtgacctggtttgtgtaggtgtgtcacggtgagtgtgagcttaagattctcaccacagttgcctggaagtcagtcttccactagcagcctttggatgaagatgtagaactttcagctctgtctttgccatgcctgcctacatgctgccatgctctcaccttgatgataatggactgaacctctgaacctgtaagccagccccaattaaatgttgtttcttataagacttgccttggtcatggtgtctgttcacagtagtaaaaccctaactaagacagttgagtaccatcagtgcccacagtaggccaagagccatcaactctggccttaattgcctgctctcaccaggcagttctccaagcggttctattgggatttgtcagcatcaaccttagatcaggagccatcagagcttggttgtgagcatttcatgtatctctcagggtggaacaaagtgactctgccaacagaaaattgttacagatgttattaagaatacttttaaaggaaaaaaggattaaggttagcaccagtcacctgactgactttcttcagtttgtaaaagtggtcaatccttggtttccaggaaggaaacttcagatatggatgcatgggagaaaacagagttagatat

SEQ ID NO: 4859 - DNA, 1200 bp, mus musculus
tgtatccctgtgtgccactttgaaacaaacaatacatttatcattgtgttgagatagatgtgtaatagatatttttcaaactacaatggattgaaaagatattgttttttattagttcatttatttattcatatatgtatttacactccatatttattctgtccctcatccaccatccaacggtaccacatcctttacctactctcacgccctgtatccatgtggatgtccctaaccccttccacctatcctctaaactcccttgggcctccagtcacttgagggttaagtgcatcatatctgaatgaacagacccagaagtcctctactctatgtgtgtttggggtctcatatcagctggtgtatactgcctgtttggtggtctagtatttgaaagatatcaggggtccagattaatcgagactgttggtcccctacaggattgcctgtctcctcagcttctttcagcatcccctaattcataggaggggtgagcagcttcagtccattggttacgtacaaaaatctgcacctgaccctttcagctgctttttggatcttcttgaatgtggtaaggctaggtccttttttgtcagcgctccatagcctcagtaatatagtcaggcctttggatgtcttctgagctgtttcccactttgggcatgtctgaggaccttcttttcctcaggatactcttaatttcatttcttcatttctttcatacaaaaacaattatgggtcagagttgtgactgcgagattgcaaccccattcctggctttttccctgtcttccttctggaggtgggctctcttagtttccacttcttcctatctggcattatatctaggtccctcacttggactcctgagagtctctcacctcccaaatatgtggtacagtatggaacctgccccgacctcctatctcctaaggttgcctgtttccattctttcttgtggcactcagagcttcagtccttttcccttacccaataccaagtcaggaacccctctaatcccactccccttatcctgtacattttccctcccaggtccctccctccatcccctaatgaagaagagattttacatgtaagaggagacaagtattttcactaagtactagaaatcacccgggacctatgtttaaattaaactcagggtaagacttcaaaggcctgtggataccagggcagata

SEQ ID NO: 4860 - DNA, 1200 bp, mus musculus
ttttaaatgcttctacctgtttagcagtgttctcctgtatttctttaagtgaaattattcatgtcctccttaaaatcctctaccagcatcatgagatatgaatttagatcaaaatcttgctttccggagggtggggtgttgggatatccaggactcactgtggtgggcctactaggttctgatgatgccatgtggtcttggtttctgttagtaaaatcttttattttccttttgccatctggtaatttctggtgttagatgttctagctgtctctggctggagcttgttcctcctgttattctttagcttctattagcactcctgggagaccaactgcctactgcttcctagtgttcattacactctctgcaggcaagctctcctcttgtagggaaggtgcacagacatctggaactaagatgcacctccttattcctggggtcagaacccaccctggaggtcaaaactcctctggcaggaaaggtgtccagatgtctgcatctcagctctgcctcctggctgaggatgaatgcccgacataaccatgtccaagaagctctgttgcttctgctgcccatgtgctctcctgcatagagtggtctcagtgatcccacgattctgaatgtggtagggcctgcctttgtcctttgaccctgttgttgctagcacaagtccctctggggttttttggaacagatgtttcattccactcaccgtgatctcaagatccctggtgtgagatcatcttgccaaagatggtgccagggttgtgctgaccagaaggaacccaagccacaggttgggcacatgtcctttttccctgttcctgctagcacaagaccctttgggttttttggaactgatgttgtattccactcaccagaggtctcaaggtcctgggcatgctagggttcctacagtgtggagagtcctctgggaaacagatgcttttcatgatccctttactcaacaatactttccatcaaattaagttgagaaatcaaggttgtccctgcgaaatcaaatttaaacaatatatatccacaaattcatccctacatttgatgttatatagaaaactccaaagcacagaggttaattacaaccaagacaacataagaaataaagaatttcataccaatgataccaacagcattgacatgtacaaataccaccacccaccagcaacaaaattaaca

SEQ ID NO: 4861 - DNA, 1000 bp, mus musculus
attagtcggcatctgagttctatgctcttgcaccccacagatttatgaatccattgcactgggatgagagagactcaatgatcattgatcagcccttgcacattgctgaggtttcctcattgcacacgatagggtgatcatgatttccccactaattcatttttgactggcctcttttgtagagtccgccctaggtcatttaacagttatggtcacacagcactgtggtatccagagacgggcaactttcctcatgcacagaccaacctaagacatggggcctggtgacgatagggttaccctatgacaggtaaggctgtgtcattagaggaacgacctaaaacaggagccatggtggatggacataattgcacaggcctagtccagcctcattttattaaaacaaaaatggggagatgtgggaagccacatgtgccattgcacggtggcgctggccaccactggccaccatgcatacagaggcagtaaagtttttttctcccaagatgaggttttgagaatcaaccaaaattaaccaatcagatgagagacaagttaaccaatcagatgtaggcatgcaaatgaggtggtaagcataacccatgcacaaccaatccgggtgtgagacatgcctctcctaggcctatataagcagcaccagttctgggcttggggtcacttcgcctctgcaatcaagctctcccaatgaatatgtgcggaaggatgctgttgcagcatcgttcttgctggccagtcgggcgcacacaagactctcaggtctgtctgcctagatgctgtcatattcctatcttgatgataaaggactgaacttctgaatctattattcagcacctattaaaggtttttttgtttttttgtttttttgttttttgtttttttaagagttgccttgtccttggtcttggtgtctgttaatagcagtaatattcaaacttagagaataactcttaccaaatttaaataaatattagagaaatca

SEQ ID NO: 4862 - DNA, 1000 bp, mus musculus
tggagcagagtctgaaggagtaaccacagagagtctgtcgcacctggggatacatcccataatcaaacaccaaacacagacactattgtgcatgcctacaagagcttgctgacaggaaactgatatagctgtttcctgagaggtatggggcaatgggctatgtagagacagcctggtttccagttgacgctagatcttgaatattgggagaacccgatgggtggtaattcccacctacatgggtcagtaggtgttcaaccatgtctcctggacccatggttcccctagaagttactaccgccacagcgcccacaggaaagtgtggatagtagtcacataaccaatgtcccaaccttctgaccttcaggctagactcctcccagttacatagcaacagtaagataaagcctaccataaggggggctgtttggcccctcctcactctctcctcatcctctcttcattctcctctcactcttttactctctctccctcttgctctctcccttttattctagattttcttctctctctctgtgtctctctctctgtgtctctctctctctgtctctctctctctgtctctctctctctccttttctcctttctttcctcttggccatggccattctatctctctttctaccttttctcttcccccctgcctttctacaatagagctgtaaaaccatagactgtctctgttcatcaaggctcgctgtgcatggatgatgggataggctttctcctaattggccatttctaatctcccgattgaaggccttcctgtgctcaagtctaagcctagaataaggttccctgcatgagaacctatctcaccatgccttctttcccataacccagtgttcaagggcgtcaccccagggatcctggtatcaggggttgccccttgtccactccctgtccagtggggtcagtggcttagatttccacaaggagttgagtggaaagcatctggcagtcctctagcatctgcctg

SEQ ID NO: 4863 - DNA, 1600 bp, mus musculus
caaagcaaaacatcccttagattccacatcacaagagtcagaatggctaatatcaaaaattcagatgacagcagacactggcgaggatttggagaaagaggaacacttctccattattggtggggtttcaagcttgtacaaccagtctggaaatcagtctggcagttcctcagaaaattggacaatagtactacctgaggatcccacaatacctttcctgggcatatacccagaagatgctccaactggtaagaaggacacatgctccactatgttcatagcagccttaattataatagccagaaactgaaaaaaaaaaaaaaacagacacccctcaacagaggagtggatacagaaaatatggtacatttacacaatggagtactacacagctattaaaaagaatgaatttatgaaattcctaggcaaatggatggacctggagtgcatcatcatgagtgaggtaaaccaataacaaaagaactcacaatatatgtaatcactgataagtggatattagcccagaatcttagaatacccaagataaaagaagaccaaggtgtggacaatttgccccttcatagaattgggaacaaaacacccatggaaggagatacagagataaagtttgtagctgagatgaaagggcagaccatctagagattgacataccctgggatccatcacataatctgcctccaaaggctgacaccattccatatactcacaagattttgctgaaaggaccctgatatagctgtctcttgtgaggctaagccggggcctagccaacacagaagtggttgttcacagtcacctattggatggatcacagagctcacaatggaggagctagagaaagtacctaaggaactaaaaggatctgcaacctataggtggaacaacaatctgaactaaccagtacaccctggagctcctgtgcttgctgcatatgtatcagaagatggcctactcggccattattggaaagtgaggcccgttgcttttgcaaactttatatgcctcaatacaggggaactccagggataagaagtgggagtgtgtgggggaggggatgggggacttttgggatagcattggaaatgtaaaaggagaaaataactaataaaaaatatcagcttgataaacacaacaacatatagtcaagtgttatatacagagttactgagtaaaggaagcaagcaactgagcagtaaatgaatgaaatgcatagatatattagagcattaatacagaactacacaatcaaataaatataatatactataaataaagttaatagctaggcaccaacctgttgttttcttgacttaaacttattctttctgaaatatatacaaacatacattttaagagacatacatgcacacagtcacacataaaaacaccataatatacacaatgataagaatgaaaggtcaaggcactgtactcatttaatgtcatctattcagatacagaagcaggctttcctatttctttctatgacattagtaatttcacactgccatactcaaaacttacatcagagaaatatctaccttggtcacatgcaatgaaatgaagttcagaatattat

SEQ ID NO: 4864 - DNA, 1200 bp, mus musculus
aggacttgctatgatgggagagtttggttgtgatgatgccaagtaaccatgttttctgttgcttctgttcttacacgtgcctcctggatctgattatatcaagtgcttactacccttaatatatctgattggagcccatccttcctgtcatcctgattgattcaggactcctcagagtccaggtttctctgtgatcctgtgattctgggctcctgtgaaccagagattctgggtgtgtcagagttcttggcagtcaagcttcctctgagatcctgagatcctggtgtgaccaagctcctggtatcctggtatcctggaaacctaagatcctgttcgtgttacagcacctggaagtcgtgtctcctctgagggttgtgggactgtctggagtgtttgaaaccaaggtacaccagtacatatcagaaggatcccaaccttctggtcaggcagggctcctgtgtccttgctcttgctgacaaaggcctgactcaattggtttggaaccaatgttgtgttccactcaccagtgatcctaagattgggtggagagttctctggggaccatgggactgtccgctgagtttttgcccaatgtgacttgatgctggcactgaccagaagggactgaactggagcctactagaagagacttgtgaccctggtcaggtaggttttctgcttccctgctgctggctcaggcttcgcataattggattggaattgatgttgtgttacactcactagtgatcctaaattgatcccaagattgcatggaaagtcctctagggaccttgggactgtccgcctagtttgtgcccaaggtgacctggagctggtgctgaccagaaaggacttcttcccctggtgtacttcactttttaataggattgtttgtttcattttatgagaaacttctaatggatctgaagatttttttttcacctgttctggtactgaatgtccatagaacacttacattcatcttgtaaagcattcacccaaatgaagtaaatatgattgtttttttcaaaaagaataaaatttaaggagagtaaagtcggtaatcacttaaaacttttgtcttgtaagcctgagcacaaactgctgagacccacagatgtatagaactgcctctacctaattgctctatggtttctacaatgatgaacacacatgcacacacacacacatccacaaaaa

SEQ ID NO: 4865 - DNA, 1200 bp, mus musculus
aaattttagtttatcaatctaaaattctgcatactattatatgtattacattgtccctgacaaaacaaaagacagtgatttcttgacagtactaatagttagaaatgtctcctaataaaaggaatcaccatgtattggactcctgtgttcatgataacctatatttctcacaagatgtataccagtgtgtgaagtgtccagaaggtcattatgcaaatacagagaggaacaactgcttccaaaaatctgtgatctttcttgcctatgaagaccctttggggatgactctagccagcgtagctttgtgcttatctgcactcacagtctttgttattggcatctttgtgaaacacagagacactccgattgtaaaggcaaataatcgagctctcagttacattttgctcctcacactcacattctgtttcctgtgttctttgaacttcattggtcagccaaacacagctacctgcattctccagcagactacctttgcagttactttcactatggctcttgctactgtgttggccaaagctattactgtggtccttgcctttaaggtcagttttccagggaaaatagtaagatggctaatgttatcaaggggtccaaactacatcattcctatatgcaccctgatccagcttcttatttgtggaatatggatgacaacttctccaccattcattgatcaagatgctcatactgaacatggacacatcatcattttgtgcaataagggctcagctgttgccttccactctgtcctgggatatctctgcttcttggcccttggaagttacaccatggccttcttgtctagaaatttgcctgatacattcaatgaatccaaatatctgtcattcagtatgctagtgttcttctgtgtctgggtcacttttctgcctgtcttccacagcactaaagggaagatcatggtctctatggaagtattttctatcttggcttccagcatagcactcctggccttcatatttggtcccaagtgttacattatcttgttgaaaccagagaacaattcatttactcatgtgcggaagaaaacatactctagaaagaattatcctaaaatataattgaaaaaaataaatgtagcttttatgttaacaactttttaaaatgcatcattcatatatcattctaaaatatcttatagcatactaatatgaatgcaat

SEQ ID NO: 4866 - DNA, 1200 bp, mus musculus
gtcaatttgtttcaccctataatttgcaacctttcccccaaaatgcaaaaatgaaaaataaaaaaaaatctttatggaaggagtagtctgtcagtatgtcccattgcataccatattacccacgtttctttacttacatgtgttctttgtattgattcctttattaagaatcctatggcttgtaataaactaacaatatgaaatatgtacctgggctgctctgcaatatcatgttattgccctgtctcatggatatcctgaagctttggatttgtaggtctgggcctttcatgtactccagcagatcacaaagcaagtgtgtgggaagacaagctcaaggttctggatctatctatagctgggtagtagctgagccacaccaacaacacacaggagagccccaggtttgtcgtggttatctcacctaatgctgcaaacagaaaggggcagaaccaactctgatgctctcatgtccagagactactcaaatttctcctcacaatcatcatcatctacagtgttactcatgcgacttacaggttcttatcagagtgctacagtcaatgagggggtaaggctatctctgctgttctcaataacacaggaatagcaaagctatgaccaactctattgtacttttaagatgagatgctagtcatgttcttccaagttttgtaatcagggagaaacaagggcaggataggtttcttgctctcattccttcaggccagcctttttgcctaccaactttggtgggaaggaagaagcttatggctagctctccatggcccacaccaaggcatcctaaaaaaattgcaggtctagagtttataaaaccagaccaccacaggctactcaaatttcttctcacaatcagcatcatctctacagtggtactcatgtgagttacaggttcttatcagagtactacagtcagtgaggggtacggatatctctgctcttctcaataacacgggaatagtgctccagcttactgaaagtaagaataaatttttcttttgtgacttaatgtcattttttagttacattttaagtgtgacccaggtgggtacattgtgtcaacacttcaatcactttgactaaaaaatgacattaagtctattaactacccatcagggaaatggtgtacgtttagaatttgttcttgttttccaaaaaagatgtgctcactgcttctta

SEQ ID NO: 4867 - DNA, 1400 bp, mus musculus
attacagaacaattgtgataaaacctgcatggtattggtaccgaaacaagaagatagataaatggaataggattgcagtcccagaaatgaactcacatgccaagggttactaaatcaaaggagcgaaaaacatccagtgaaaaaaaagagagcattttctttctttctttctttcttttttctttctttctttctttctttctttctttctttctttctttctttctttctttctttcttccttccttccttccttccttccttccttccttccttcctttctttctttctttctttctttctttctttctttctttctttctttcttttttaattattagatattttcttcattcacatttcaaatcctatccctaaagtcccctatacgctccctctgccctggtctccagcccatccactcctgcttcctgtccctggcattctcctgtactgaggcatataatcttcacaagaccaagagcctctcctcccattgatggcctactaggccattctctgctacatacgcaactagagacacaagctctggggtgtactagttagttcagattgtggttcttcctatagggttgcagaaccctttagctccttgggttctttctctaactccttcattaggagccctgtgttccatccaatagatgactatgagcaaccacttctgtatttgtcaggtactggcatagcctcataagagacagctatatcagggttctttctgcaatattcttgctggcatatgcaacagtgtttgggtttgttggttgtttatgtaatggatccctgggtatctcagtctctggacggtccttccttctgtctcagctatgaacttggtctctgtaacatcttccatgagtattttgttccccattctaagaaggaatgatctctccatactttggtattccttcttcttgagttttatgtgttttgcaaactatatctagggtattcttagtttcttggttaatatccacttatcagtgagtccatatcatgtgtgttcttttttgattggattacctcactgaggatgatatcctacagatccatctatgtgactaagaatttcataaattcattgtttttaatagctgagtagcactccattgtgtacatgtaccacgttttctgtatccattcctctgttgagggaaatctgtatttttttccagcttctggctattataaataaggcttctaggaacatagtggagcatgtgttcttattacaagttggaatatcttctgggtatatgcccaggaatggtattgctggaccttctggtagtactatgtccaattttctgaggaaccaccaaacttatttacagagtaattgtaccacattacaatccctccagcaatggaga

SEQ ID NO: 4868 - DNA, 1600 bp, mus musculus
taggatcctaaaactgtcttagaaggcatgagttttatctcaagatactcattgtaggatgagaacatttgtcctcacaatttttctttcacttgaaaatgtgaggtgcataaatagtatgtgcatacacacaaatgttatatatgataataaatttgaaaagactataatattaatgcaacaatcaaaaaagcctatttactctttaaattattcaatattaaacatgaacactggacacagtgaatattcacttcttatacttcctaaatagtagataaaaagaacaaaattagaaaatgttacctttaaaatgctaatataacagaatataatgacagactcacttgtttgtaaatgtgatagtaacaaggaaaacatttatgcttacaaacatataatgaataagaatctcaaacagagataagaaatcatctatttacctaagttgatctgctccgtatactaatccgtcgtagaggaaccactatactcagagcagttggtaagaacccagcccccctctgacccagtcccagaactgatgctcggagcctggtggactcaggacctatcacacaccaaaacccctgccctcccgaataccaatcctcttccttccatttcttctaccccttatgtctggtcctcactgctgagtcatactcctagttggtgtgctcctgtgaaagctacatatcccgtacatcctacaggatccactgtacacagaagagttcaacccactgcactcagaacagttgagcaattgaggatcctctgttctcagagcaatcgaggatcggctgttgttggacaacagcttgactgctgcactgaagacccaacagtctgaaggcctcccaggagatctacttcagccagggaaataaattagcagcttctttgctcctgtgaagagccccaagttggaaggtcccacaggtggtctgatacagccagggtagtaagcctaccaggagaactgaagtaacccagggacaaaagagccagactccatacagtcattcagatcaacaaataccacagatatccagatgtcgaaaggcaagcataagaccatacacaacagaatccaaattacatgggcatcatcagaacccagttctcccactacagcaagccctgaatataccaacatatctgaaaatcaagaatctgtcctaaaatcctatctcatgaacttaatagagttctttaaggaggatgtcaataactcagtgaaagaaatacaggaaaacacaggtaaacaggtaaagaaattgaataaagtgatccaagagctgaaagtgaaagtagaaacaataaagaaaacacaaatggaggcaaacctggaaatggaaaacctagggaagaggtcaggaattacagatgttaagtattaccaacagaatacaagagataaaagagagaatctcaggtgtaggagatacagtacaagagactgacacaactgtcaaagaaaattcaaaacccaaactcctaacccaaagcatccaggaaatccaggacacaatgaaaagacgaaatctaaggataatcggaatagagaagaacaaagattcccaactcaaaggac
